United States Patent Application Publication US 2018/0126003 A1 - sequence listing, part 87

SEQ ID NO: 157624 - DNA, 1608 bp, Artificial Sequence
  derived and/or modified sequence
atggccgccctgctggccgctgctgctgtgcgggcccgcatcctgcaggtgagcagcaaggtgaagagcagccccacctggtacagcgccagcagcttcagcagctctgtgcccaccgtgaagctgttcatcggcggcaagtttgtggagagcaagagtgacaagtggattgacatccacaacccagccaccaatgaagtcatcggccgggtgccccaggccaccaaggccgagatggatgctgccatcgccagctgcaagagggccttccctgcctgggccgacacctctgtgctgagccggcagcaggtgctgctgcgctaccagcagctgatcaaggagaacctgaaggagatcgccaagctgatcaccctggagcagggcaagaccctggctgatgctgaaggagatgtgttccggggcctgcaggtggtggagcacgcctgcagcgtgaccagcctgatgatgggagagaccatgcccagcatcaccaaggacatggacctgtacagctaccgcctgcccctgggcgtgtgtgccggcatcgcccccttcaacttccctgccatgatccccctgtggatgttccccatggccatggtgtgtggcaacaccttcctgatgaagcccagcgagcgggtgcctggggccaccatgctgctggccaagctgctgcaggacagcggggccccagatggcaccctgaacatcatccacggccagcacgaggccgtgaacttcatctgtgaccacccagacatcaaggccatcagctttgtgggcagcaacaaggccggggagtacatctttgagcggggcagccgccacggcaagagggtgcaggccaacatgggcgccaagaaccacggcgtggtgatgccagatgccaacaaggagaacaccctgaaccagctggtgggcgccgccttcggggctgctggccagcgctgcatggccctgagcacagctgtgctggtgggggaggccaagaagtggctgcctgagctggtggagcacgccaagaacctgcgggtgaatgctggggaccagcctggagctgacctgggccccctcatcaccccccaggccaaggagcgggtgtgcaacctgattgattctggcaccaaggagggcgccagcatcctgctggatggcaggaagatcaaggtgaagggctatgaaaatggaaactttgtgggccccaccatcatcagcaatgtgaagcccaacatgacctgctacaaggaggagatctttggacctgtgctggtggtgctggagacagagaccctggatgaggccatccagatcgtgaacaacaacccctatggaaatggaacagccatcttcaccaccaatggagccacagccaggaaatatgcccacctggtggatgtgggccaggtgggcgtgaatgtgcccatccctgtgcccctgcccatgttctccttcaccggcagccgcagcagcttccggggggacaccaacttctacggcaagcagggcatccagttctacacccagctgaagaccatcaccagccagtggaaggaggaggatgccaccctgagcagccctgctgtggtgatgcccaccatgggccgctag

SEQ ID NO: 157625 - DNA, 5499 bp, Artificial Sequence
  derived and/or modified sequence
ccaatgaggaagcctggcaggatggagggcgaggcctggcagctgtagtgcttctgggcagtagaggcgcggggtgcggagctagggcggccgagagccatggcggcgctattggcggcggcggcagtgcgagcccggatcctgcaggtttcttccaaggtgaaatccagtcccacctggtattcagcatcttccttctcttcttcagtgccaactgtaaagctcttcattggtgggaaattcgttgaatccaaaagtgacaaatggatcgatatccacaacccagccaccaatgaggtcattggtcgggtccctcaggccaccaaggcagaaatggatgcagccattgcttcctgcaaacgtgcttttcctgcatgggcagacacttcagtattaagccgccagcaggtcttgctccgctatcaacaacttattaaagaaaacttgaaagaaattgccaagttaatcacattggaacaagggaagaccctagctgatgctgaaggagatgtatttcgaggccttcaggtggttgagcatgcctgtagtgtgacatccctcatgatgggagagaccatgccatccatcaccaaagacatggacctttattcctaccgtctgcctctgggagtgtgtgcaggcattgctccattcaattttcctgccatgatccccctttggatgtttcccatggccatggtgtgtggaaataccttcctaatgaaaccatctgagcgagtccctggagcaactatgcttcttgctaagttgctccaggattctggtgcccctgatggaacattaaacatcatccatggacagcatgaagctgtaaattttatttgcgatcatccggacatcaaagcaatcagctttgtgggatccaacaaggcaggagagtatatcttcgagagaggatcaagacatggcaagagggttcaagccaatatgggagccaagaaccatggggtagtcatgccagatgccaataaggaaaataccctgaaccagctggttggggcagcatttggagctgctggtcagcgctgcatggctctttcaacagcagtccttgtgggagaagccaagaagtggctgccagagctggtggagcatgccaaaaacctgagagtcaatgcaggagatcagcctggagctgatcttggccctctgatcactccccaggccaaagagcgagtctgtaatctgattgatagtggaacaaaggagggagcttccatccttcttgatggacgaaaaattaaagtgaaaggctatgaaaatggcaactttgttggaccaaccatcatctcgaatgtcaagccaaatatgacctgttacaaagaggagatttttggtccagttcttgtggttctggagacagaaacattggatgaagccatccagattgtaaataacaacccatatggaaatggaactgccatcttcaccaccaatggagccactgctcggaaatatgcccacttggtggatgttggacaggtgggagtgaatgtccccattccagtgcctttgccaatgttctcattcaccggctctcgatcctccttcaggggagacaccaatttctatggcaaacagggcatccaattctacactcagttaaagaccattacttctcagtggaaagaagaagatgctactctttcctcacctgctgttgtcatgcctaccatgggccgttagaaacaagtttgtttaagactgactccatcctgagtaatctccctttatttttgaccagcttcatttgtcagctttgctcagatcagatcgatgggattggaatacattgtaactaaaatcttcctcaggactattaacccccgcaaagtttctatagggaactgcctagtgtaacaatgaaaccagatttctcacttgctcttcatacttctattttgaggtaactgttgtaactatgaaatgcttatctgaaagtagtgcttaaacctgatttctaaaaattatcccattttctgatgatttgaaggggagaaaagccagtgtatgtaaagaaaatgttccagccaggcgcggtggctcacgcctgtaattccatcattttgggaggccacagtgggcagattgcttgagcccaggagttgaagaacgtggcgaaaccccgtatctattatttaaaaaaattgaaaaagtaaaaaaagaaaagggaaaaaaaattttttaaagaagatgttccaataattgcaagaagaactcttagatggggaaacaggacagaaataactcaccgcttttggttgatcctcaaacatagcgctacctaaatgccactgggagagacctcctgcaaagttttctttagcccctcttttatcccacaatacacaagatataatccatttttatatatcccaaagttgtggcaacagcttctttcttttctgctcaatgccactttgtttcctagtaattcatgaccactattaattctatcattgtcactgctcctgcttaagatcacttctcaaggatacctcagtaagcaatggataaatcaactttttgttatatgtgccaagtactaagtttcagggttctcttcagcaatcattaattaatacttcagccattaattcagatgcaaataattttcttttttcttttttttgagatggagtttcactcttgttgcccaggctggagtgcaatggcgtgatctcagctcaccgcaacctccgcctcccaggttcaagcgattctcctgcctcagcccccctagtagctgggattacaggcatgcgccaccacacccagctaattttgtatttttagtagagacggggtttctccgtgttggtcaggctggtctcgaactcctgacctcaggtgatccgcctgcctcggcctcccaaagtgctgggattacaggcatgagccaccacacccagccagatgcaaataattttcttagaaaattatttcaaaagttattttaggcccagaaatcaaggattgttccaaccatgaaaatgggtaagacacctgccttaagcaaatctaacctgctattacttgccaaattttatatattcttttctcttgcctgtatttctaattagtgatttgtttaatgaagaactcttcatgtagagcaattaactgggcctaagaaatttcgaagctttccatgacataaagtggttaaaaaaaaatgctttgacagtcttcttctgccattagttcaactgcctttacgcttttttttttttttttttttttgagatggagtttcactcttgttgcccaggctagagtgcaatggcgtgatcttggctcactgcaacctctgcctcccgggttcaagcaattctcctgcctcagcctcctgagtagctgggatttcaggcatacgccaccatgcctggctaattttgtatttttagtagagacagggtttctccatgttggtcaggctggtctcgaactcccgacctcaggtgatctgcctgccttggcctcccaaagtgctgggattacaggtgtgagccaccacccccagccgcctctatgctttttgtttctttgatatatctaaacttaaggtcagaacagaaattcatgtgctgaacagaatggattctttttgcagtaccaatccaattgaatcctctttttattttcctgcgtccttaccagtcactttgatagtgctaactaacctacactatgggggttattcatgaattaagtatgataaaaaaaaaaaagaccttgaaaatgttgtgtaccctgtggatttgaggcttattactaccacctggctggataaaatgtcaaaaccttcaatcacttaaggtgactggaacttttgtaaaatacacttatgatcctactgggccttttttttttttttttctgctttcctaaatatgaggcaatagaaatttataatttgagactacagtaccccttgttttagctcttatcacagctggcaactggtagtgattttttttgttgttgttttgttttgttttgagatggagtctcgctctgttgcccagggtggagtgcagtggcacgatctcggctcactgcaacctccacctcctgggttcaagtaattctcctgcctcagtctcccgagtagctgggattacaggtgcatgcccccacacccggataattttttgtacttttagtagagacagggtttcaccatgttagccaggatggtctcaatctcctgacctaatgatccgcccacctcggcctcccaaagtgctgggattacaggcgtgaaccaccgcacctggccctggtagtgatatttaatccaatccaacaactataggctgggttaaataaaaggtcattattgtctatattccaagtggaattaaatgtagtcacagagattcctaacattttccttatatttaagggaaatcacttctaaaaaaacacactaatcagaactgtgatgctctaattagaaacaactcatctggccaactatttgctgctcagagtttcttatttcttagatgaaaaaaactcatcagttatattcatgtgatcgcggctaaaaagtcagtattttctttttgttctaatgtggcttcatttgaaatttctcagattctacattgtactaattatgaataacaaattataaattaaaaactcttaaagagaaaaacttggcttaaaaaaatcatttcatatctccttataagcctttgtcctctaggttgtaatgactctgacttcccacctgtgatggaaagctaagagtcacaaggtcactatgtttactcttacgtaaaagatagtacacattttggctaggctgtttacttcaaaaggcaacctataggtttctacacaaaaagaggcacacatttgcatttgcattagtataatatgcatttgtacggatattgctttaaaaatttatgtaatctactaatgctatttattactcattccactgatccctgaagtctctcaactagtagagaaaataaccgtgatttagcaagaagcgacatggggaagggtgacaacaatatacattgtttgattagatacagactccttactgtgtcagactcctgaggttcttttggaatagtgggtagcaccacttcaccagaagagtctgatattgcaatttgctgggtgatgaagattttatcttgaagcttactttcatccctgcaataatgacaaaataacagaaccgtcaacaactctacacacatgaaacctggtttagaataacagacttgtcatattactttcaattagcacattcaagatgcccacaagaaccatcgtgttgggctcatgtttattacttaagcaagagagctcttacccaaattcctttgtttccccactgtcagaaacaacatagtctggaactggaggcctagaactctggttgtatttcctgtagtgggtaaaagtcaacaaagataatgaatgaggcagtgtctcctcatgcct

SEQ ID NO: 157626 - DNA, 1608 bp, Artificial Sequence
  derived and/or modified sequence
atggccgccctgctggccgccgccgccgtgcgggcccggatcctgcaggtgagttctaaggtgaaaagctcacccacctggtatagtgcttcctcgttctcctcatccgtgcccaccgttaaactcttcattgggggtaaattcgtggaatcaaagagtgataagtggattgatatacacaatcctgctacgaacgaagtgatcggtagagtgccgcaggcaactaaagctgagatggacgccgcaatcgcctcttgcaaacgggcatttccagcgtgggcagacacgagcgtcctttcacgacagcaggtgctgctgcgataccagcagctgattaaggagaatctgaaagagatcgcaaagctgataaccctggaacaggggaagacactggcagatgctgagggcgacgtgttcagggggctgcaagtcgttgaacatgcctgcagtgtgacctctctgatgatgggtgaaactatgccctccataaccaaggatatggatttgtatagctacagactgcccctgggcgtatgcgcaggtatcgcaccttttaatttccccgctatgattcctctttggatgtttcctatggcgatggtgtgtggaaacactttcctgatgaagccatctgagagggtcccaggggctacaatgttgctggccaaacttctgcaggactcaggagcacctgatggaaccctcaacattatccacggtcagcacgaagccgttaactttatttgtgaccaccccgacatcaaggccatatcttttgtgggctcgaataaagcaggggagtatattttcgagcggggttcacgccatggcaaaagggtgcaggccaatatgggcgctaaaaatcacggcgtcgtcatgcctgacgcaaacaaggaaaacaccctcaatcaactcgtaggcgccgcatttggggcagcaggacagagatgcatggctctgagcaccgctgtcttagttggcgaggccaagaaatggctcccggaactggtcgaacacgccaagaatctgagagttaatgccggagaccagcccggagcagatttgggaccgttgattacgccccaggcaaaggaacgggtctgcaatctgatagatagcggaaccaaagagggtgcctcaatcctgctggatggtaggaagatcaaagtgaaagggtacgaaaatggaaattttgtggggcccacaatcatctctaacgtaaagcccaatatgacgtgttacaaagaagaaatcttcggccctgttcttgtagtgttggagacagagaccttggacgaggccatccaaatagtgaacaataacccgtacggaaacgggacggccatcttcaccacaaacggagctaccgcacgaaaatatgcacacttagtggacgttggacaggtgggcgtgaacgttcctatcccggtcccattgccaatgtttagcttcaccggctcacggagctccttcaggggcgatacaaatttttacgggaaacaagggatccagttttatacccagctgaagacaatcactagccagtggaaggaggaggacgccactttatcctcccccgccgtcgtaatgcccactatggggaggtag

SEQ ID NO: 157627 - DNA, 1608 bp, Artificial Sequence
  derived and/or modified sequence
atggctgccctgctagctgccgctgctgtacgggctaggatcctgcaggtcagctctaaggtgaaaagttcgccgacctggtatagcgctagtagttttagctcctcagtacctacggtgaaactctttatcggaggaaagttcgtcgagtccaagtccgataagtggatagacattcataaccctgcaaccaatgaggttatcggccgagtgcctcaggccacgaaagctgagatggatgcagcaatcgcctcctgcaaacgggctttcccagcctgggctgatacatctgtcctttctcgccagcaagtgctgctgcggtatcagcagctgatcaaggagaatctgaaagagatcgccaaactgattacactggagcaggggaagacactcgccgacgctgaaggagacgttttcagaggactgcaagtggtcgaacatgcctgcagcgtgacgtctctgatgatgggtgaaaccatgccttccataacaaaagatatggatctgtattcatacaggctgccactcggtgtgtgtgccggaattgcgcctttcaacttccccgctatgatccccctgtggatgttccccatggccatggtgtgtgggaacaccttcctaatgaagcccagcgaaagagtgcccggagccacaatgctgctggccaagctcctgcaagactccggagctccagatggaaccttaaatatcattcatggccagcatgaggccgtgaacttcatctgtgatcacccagacattaaggccatatccttcgttggtagcaacaaagccggtgagtacatctttgaacgcggttctaggcacgggaagcgagtgcaggccaacatgggagccaaaaatcacggggtggtgatgcccgatgccaataaagaaaataccttaaaccaattggttggagcagcttttggggctgctggtcagaggtgcatggctctgtctaccgccgtccttgtcggcgaggcaaagaagtggttacctgaattggtcgagcacgcaaaaaaccttagggtcaatgcaggtgaccagccaggggcagacctgggacctttgatcaccccgcaagctaaggaaagagtgtgcaatctgattgattccggcactaaagagggagcttcaatcctgcttgatggcaggaagatcaaagttaaaggctacgagaatggcaactttgtcgggcctaccattatctctaatgtgaagcccaatatgacctgctacaaagaggaaattttcggaccagttctcgttgttttggaaactgaaaccctggatgaagctatccagatcgttaacaacaacccatacggaaatggaacagccatctttaccaccaatggcgcaacagccaggaaatatgcccacctcgtagatgtgggtcaagtgggagtgaacgtgccaattcccgtccctttacccatgttctcattcactggatcaagatcaagctttaggggggacaccaacttctatgggaagcagggcatccagttctatacccagctgaagacaatcactagtcagtggaaggaggaagatgctaccctgagctcccctgccgtagtcatgcccacaatgggccgttag

SEQ ID NO: 157628 - DNA, 1608 bp, Artificial Sequence
  derived and/or modified sequence
atggccgccctgctggccgccgccgccgtgagagccagaatcctgcaggtgagcagcaaggtgaagagcagccccacctggtacagcgccagcagcttcagcagcagcgtgcccaccgtgaagctgttcatcggcggcaagttcgtggagagcaagagcgacaagtggatcgacatccacaaccccgccaccaacgaggtgatcggcagagtgccccaggccaccaaggccgagatggacgccgccatcgccagctgcaagagagccttccccgcctgggccgacaccagcgtgctgagcagacagcaggtgctgctgagataccagcagctgatcaaggagaacctgaaggagatcgccaagctgatcaccctggagcagggcaagaccctggccgacgccgagggcgacgtgttcagaggcctgcaggtggtggagcacgcctgcagcgtgaccagcctgatgatgggcgagaccatgcccagcatcaccaaggacatggacctgtacagctacagactgcccctgggcgtgtgcgccggcatcgcccccttcaacttccccgccatgatccccctgtggatgttccccatggccatggtgtgcggcaacaccttcctgatgaagcccagcgagagagtgcccggcgccaccatgctgctggccaagctgctgcaggacagcggcgcccccgacggcaccctgaacatcatccacggccagcacgaggccgtgaacttcatctgcgaccaccccgacatcaaggccatcagcttcgtgggcagcaacaaggccggcgagtacatcttcgagagaggcagcagacacggcaagagagtgcaggccaacatgggcgccaagaaccacggcgtggtgatgcccgacgccaacaaggagaacaccctgaaccagctggtgggcgccgccttcggcgccgccggccagagatgcatggccctgagcaccgccgtgctggtgggcgaggccaagaagtggctgcccgagctggtggagcacgccaagaacctgagagtgaacgccggcgaccagcccggcgccgacctgggccccctgatcaccccccaggccaaggagagagtgtgcaacctgatcgacagcggcaccaaggagggcgccagcatcctgctggacggcagaaagatcaaggtgaagggctacgagaacggcaacttcgtgggccccaccatcatcagcaacgtgaagcccaacatgacctgctacaaggaggagatcttcggccccgtgctggtggtgctggagaccgagaccctggacgaggccatccagatcgtgaacaacaacccctacggcaacggcaccgccatcttcaccaccaacggcgccaccgccagaaagtacgcccacctggtggacgtgggccaggtgggcgtgaacgtgcccatccccgtgcccctgcccatgttcagcttcaccggcagcagaagcagcttcagaggcgacaccaacttctacggcaagcagggcatccagttctacacccagctgaagaccatcaccagccagtggaaggaggaggacgccaccctgagcagccccgccgtggtgatgcccaccatgggcagatag

SEQ ID NO: 157629 - protein, 680 aa, Artificial Sequence
  derived and/or modified sequence
MSTADALDDENTFKILVATDIHLGFMEKDAVRGNDTFVTLDEILRLAQENEVDFILLGGDLFHENKPSRKTLHTCLELLRKYCMGDRPVQFEILSDQSVNFGFSKFPWVNYQDGNLNISIPVFSIHGNHDDPTGADALCALDILSCAGFVNHFGRSMSVEKIDISPVLLQKGSTKIALYGLGSIPDERLYRMFVNKKVTMLRPKEDENSWFNLFVIHQNRSKHGSTNFIPEQFLDDFIDLVIWGHEHECKIAPTKNEQQLFYISQPGSSVVTSLSPGEAVKKHVGLLRIKGRKMNMHKIPLHTVRQFFMEDIVLANHPDIFNPDNPKVTQAIQSFCLEKIEEMLENAERERLGNSHQPEKPLVRLRVDYSGGFEPFSVLRFSQKFVDRVANPKDIIHFFRHREQKEKTGEEINFGKLITKPSEGTTLRVEDLVKQYFQTAEKNVQLSLLTERGMGEAVQEFVDKEEKDAIEELVKYQLEKTQRFLKERHIDALEDKIDEEVRRFRETRQKNTNEEDDEVREAMTRARALRSQSEESASAFSADDLMSIDLAEQMANDSDDSISAATNKGRGRGRGRRGGRGQNSASRGGSQRGRAFKSTRQQPSRNVTTKNYSEVIEVDESDVEEDIFPTTSKTDQRWSSTSSSKIMSQSQVSKGVDFESSEDDDDDPFMNTSSLRRNRR

SEQ ID NO: 157630 - DNA, 2043 bp, Artificial Sequence
  derived and/or modified sequence
atgagcaccgccgacgccctggacgacgagaacaccttcaagatcctggtggccaccgacatccacctgggcttcatggagaaggacgccgtgagaggcaacgacaccttcgtgaccctggacgagatcctgagactggcccaggagaacgaggtggacttcatcctgctgggcggcgacctgttccacgagaacaagcccagcagaaagaccctgcacacctgcctggagctgctgagaaagtactgcatgggcgacagacccgtgcagttcgagatcctgagcgaccagagcgtgaacttcggcttcagcaagttcccctgggtgaactaccaggacggcaacctgaacatcagcatccccgtgttcagcatccacggcaaccacgacgaccccaccggcgccgacgccctgtgcgccctggacatcctgagctgcgccggcttcgtgaaccacttcggcagaagcatgagcgtggagaagatcgacatcagccccgtgctgctgcagaagggcagcaccaagatcgccctgtacggcctgggcagcatccccgacgagagactgtacagaatgttcgtgaacaagaaggtgaccatgctgagacccaaggaggacgagaacagctggttcaacctgttcgtgatccaccagaacagaagcaagcacggcagcaccaacttcatccccgagcagttcctggacgacttcatcgacctggtgatctggggccacgagcacgagtgcaagatcgcccccaccaagaacgagcagcagctgttctacatcagccagcccggcagcagcgtggtgaccagcctgagccccggcgaggccgtgaagaagcacgtgggcctgctgagaatcaagggcagaaagatgaacatgcacaagatccccctgcacaccgtgagacagttcttcatggaggacatcgtgctggccaaccaccccgacatcttcaaccccgacaaccccaaggtgacccaggccatccagagcttctgcctggagaagatcgaggagatgctggagaacgccgagagagagagactgggcaacagccaccagcccgagaagcccctggtgagactgagagtggactacagcggcggcttcgagcccttcagcgtgctgagattcagccagaagttcgtggacagagtggccaaccccaaggacatcatccacttcttcagacacagagagcagaaggagaagaccggcgaggagatcaacttcggcaagctgatcaccaagcccagcgagggcaccaccctgagagtggaggacctggtgaagcagtacttccagaccgccgagaagaacgtgcagctgagcctgctgaccgagagaggcatgggcgaggccgtgcaggagttcgtggacaaggaggagaaggacgccatcgaggagctggtgaagtaccagctggagaagacccagagattcctgaaggagagacacatcgacgccctggaggacaagatcgacgaggaggtgagaagattcagagagaccagacagaagaacaccaacgaggaggacgacgaggtgagagaggccatgaccagagccagagccctgagaagccagagcgaggagagcgccagcgccttcagcgccgacgacctgatgagcatcgacctggccgagcagatggccaacgacagcgacgacagcatcagcgccgccaccaacaagggcagaggcagaggcagaggcagaagaggcggcagaggccagaacagcgccagcagaggcggcagccagagaggcagagccttcaagagcaccagacagcagcccagcagaaacgtgaccaccaagaactacagcgaggtgatcgaggtggacgagagcgacgtggaggaggacatcttccccaccaccagcaagaccgaccagagatggagcagcaccagcagcagcaagatcatgagccagagccaggtgagcaagggcgtggacttcgagagcagcgaggacgacgacgacgaccccttcatgaacaccagcagcctgagaagaaacagaagatag

SEQ ID NO: 157631 - DNA, 384 bp, Artificial Sequence
  derived and/or modified sequence
atgagcaccgccgacgccctggacgacgagaacaccttcaagatcctggtggccaccgacatccacctgggcttcatggagaaggacgccgtgagaggcaacgacaccttcgtgaccctggacgagatcctgagactggcccaggagaacgaggtggacttcatcctgctgggcggcgacctgttccacgagaacaagcccagcagaaagaccctgcacacctgcctggagctgctgagaaagtactgcatgggcgacagacccgtgcagttcgagatcctgagcgaccagagcgtgaacttcggcttcagcaagttcccctgggtgaactaccaggacggcaacctgaacatcagcatccccgtgttcagcatccacggctag

SEQ ID NO: 157632 - DNA, 336 bp, Artificial Sequence
  derived and/or modified sequence
atgagcaccgccgacgccctggacgacgagaacaccttcaagatcctggtggccaccgacatccacctgggcttcatggagaaggacgccgtgagaggcaacgacaccttcgtgaccctggacgagatcctgagactggcccaggagaacgaggtggacttcatcctgctgggcggcgacctgttccacgagaacaagcccagcagaaagaccctgcacacctgcctggagctgctgagaaagtactgcatgggcgacagacccgtgcagttcgagatcctgagcgaccagagcgtgaacttcggcttcagcaagttcccctgggtgaactactag

SEQ ID NO: 157633 - DNA, 666 bp, Artificial Sequence
  derived and/or modified sequence
atgagcaccgccgacgccctggacgacgagaacaccttcaagatcctggtggccaccgacatccacctgggcttcatggagaaggacgccgtgagaggcaacgacaccttcgtgaccctggacgagatcctgagactggcccaggagaacgaggtggacttcatcctgctgggcggcgacctgttccacgagaacaagcccagcagaaagaccctgcacacctgcctggagctgctgagaaagtactgcatgggcgacagacccgtgcagttcgagatcctgagcgaccagagcgtgaacttcggcttcagcaagttcccctgggtgaactaccaggacggcaacctgaacatcagcatccccgtgttcagcatccacggcaaccacgacgaccccaccggcgccgacgccctgtgcgccctggacatcctgagctgcgccggcttcgtgaaccacttcggcagaagcatgagcgtggagaagatcgacatcagccccgtgctgctgcagaagggcagcaccaagatcgccctgtacggcctgggcagcatccccgacgagagactgtacagaatgttcgtgaacaagaaggtgaccatgctgagacccaaggaggacgagaacagctggttcaacctgttcgtgatccaccagaacagagtgtag

SEQ ID NO: 157634 - DNA, 2043 bp, Artificial Sequence
  derived and/or modified sequence
atgtcgaccgccgatgcactggacgacgagaacacatttaaaatacttgtagctactgacatccatctgggatttatggagaaagacgcagttaggggaaatgatacgttcgtcaccttggacgaaatcctgagactggcccaggaaaatgaagttgatttcatccttctggggggagaccttttccatgaaaataagccttcccgcaagaccttgcacacttgcttagagttgttgagaaaatactgtatgggcgaccgacccgtacagttcgagattctatccgatcagagcgtcaattttgggttttctaaatttccttgggttaactatcaggatggaaatttaaacatttctatcccagtgttctctatccacgggaatcacgacgaccccactggagcagacgctctgtgcgctcttgatattctgagctgcgcaggcttcgttaaccactttggccgatccatgagtgtggaaaagattgatatatcgcccgtccttcttcagaagggatccaccaagattgctctctatggcctaggcagcatacctgacgagagactgtaccgaatgtttgtgaataagaaggttaccatgctgaggcccaaggaagatgagaacagctggttcaacctatttgttatccaccagaatagatctaagcatggtagcactaacttcatcccagagcagtttctcgacgattttattgatctggtaatctggggtcacgagcatgaatgtaagatcgcaccgactaagaatgaacaacagctcttttatattagccagcctggatcttctgtggtgacttcactcagccccggggaagccgtcaaaaagcatgtcgggctattacggatcaaaggtcgcaagatgaacatgcataaaattcctctgcacactgtgagacagttctttatggaggacatcgtacttgccaatcacccagacatcttcaacccggataatcctaaagttacacaggctatccaatccttttgtctggagaagatagaagaaatgctcgagaatgctgagcgcgaaagactcggaaattcccaccagccagagaaaccactggtgcgcctacgggtggactacagcggcggcttcgaaccgtttagtgtacttcgcttttcgcagaagtttgttgatagagtagccaaccctaaggacattatccatttctttaggcatagagaacagaaagaaaagacgggcgaggagatcaattttggaaagctcatcacaaaaccgagtgaaggcaccactttgagggtggaggacctcgtgaaacaatactttcaaactgccgagaagaatgtccagctttcacttctgacagaaagagggatgggcgaggcagtgcaggagttcgtcgacaaggaagagaaggatgctattgaagagctggtgaaatatcagctcgagaaaacacagcggtttctgaaagagcgtcatatagatgccctggaggacaagatcgatgaggaggttcggcgtttccgtgagactaggcagaagaacaccaatgaagaagatgatgaggtgcgagaagcgatgactcgcgcccgggcattgcgctctcagagtgaggaatccgccagtgccttcagcgcagatgacctaatgagcatcgatttggccgagcagatggcaaacgacagcgacgattccattagcgccgccacaaataaaggaaggggcagaggtagaggccgtaggggcgggaggggccagaattccgcctcccggggggggtcacagcgaggtcgcgctttcaaaagcacccgacagcaaccaagccggaacgttacaaccaaaaactactccgaggtaattgaggttgacgaatctgatgtagaggaggacatttttccaaccacgagtaagacagaccaaaggtggagtagcacttcctccagtaagataatgagtcagagtcaggttagtaagggcgtggattttgagagtagcgaggatgatgatgacgacccatttatgaatacctcttctctccggcgcaaccgccgctag

SEQ ID NO: 157635 - DNA, 384 bp, Artificial Sequence
  derived and/or modified sequence
atgtcaaccgctgacgccctggatgatgagaacaccttcaagatcctagtagcgaccgatatacacctaggcttcatggaaaaggacgccgtgagaggtaacgataccttcgtgaccttggacgagattctacggcttgctcaggagaacgaggtggatttcatcctcttaggcggtgacctgtttcatgaaaacaaacccagtaggaaaactctccatacatgcttggaactattacggaaatactgtatgggcgaccggccagtccagttcgagattctgtccgatcaatccgtgaacttcgggttctctaaatttccctgggttaactaccaggacgggaatctgaacattagcatccccgtttttagcatccatggttag

SEQ ID NO: 157636 - DNA, 336 bp, Artificial Sequence
  derived and/or modified sequence
atgtccaccgcagatgctttagatgatgaaaacaccttcaagattcttgtggcaaccgatatccatctgggtttcatggagaaagacgcagtcaggggaaatgataccttcgtgacactggatgagatcctccggctagcgcaggagaacgaagttgattttattcttcttggaggtgacctgtttcacgagaataagccatcacgcaaaacactgcatacttgtttagaattgctgaggaagtactgcatgggcgatcgcccagtgcaatttgaaattctctctgatcaaagcgtgaattttgggttctcaaaattcccctgggtcaattactag

SEQ ID NO: 157637 - DNA, 666 bp, Artificial Sequence
  derived and/or modified sequence
atgtctaccgcagatgctctagatgatgagaacaccttcaaaattctggtggccaccgacatccacttgggcttcatggaaaaagacgcggttagaggaaacgacaccttcgtgaccttagacgagattctgcgcctagcacaggaaaacgaggtggatttcatactccttggcggcgacctgttccacgagaacaagccctcacgcaagaccctgcatacgtgcttggaactcctgcgtaagtattgcatgggagatcgccctgtccaattcgagatcctgtcagaccaatccgtgaattttggtttcagtaaattcccatgggtgaattatcaggacggcaatctgaatatttctattcctgtcttctccatccatggtaaccacgacgaccccactggggccgatgcgctatgtgccttagatatccttagctgtgccggcttcgtcaaccacttcggtcgaagcatgtccgtagaaaagatagacattagtcccgttctgctgcagaaagggtctacgaagatcgcactgtacgggcttggatccatcccagacgagcgcctgtatagaatgtttgtcaataagaaggttacgatgctcagacctaaagaggatgaaaactcgtggtttaacctattcgtcattcaccagaacagggtgtag

SEQ ID NO: 157638 - DNA, 2043 bp, Artificial Sequence
  derived and/or modified sequence
atgagcacagcagatgccctggatgatgagaacaccttcaagatcctggtggccacagacatccacctgggcttcatggagaaggatgctgtgagaggaaatgacacctttgtgaccctggatgagatcctgcggctggcccaggagaatgaggtggacttcatcctgctgggcggggacctcttccacgagaacaagcccagcaggaagaccctgcacacctgcctggagctgctgaggaagtactgcatgggagacaggcctgtgcagtttgagatcctgagtgaccagagcgtgaactttggcttcagcaagttcccctgggtgaactaccaggacggcaacctgaacatcagcatccctgtgttcagcatccacggcaaccatgatgaccccactggagcagatgccctgtgtgccctggacatcctgagctgtgccggctttgtgaaccacttcggccgctccatgtctgtggagaagattgacatcagccctgtgctgctgcagaagggcagcaccaagatcgccctgtatggcctgggcagcatcccagatgagcggctgtacaggatgtttgtgaacaagaaggtgaccatgctgcggcccaaggaggatgaaaattcctggttcaacctcttcgtcatccaccagaacagaagcaagcacggcagcaccaacttcatccctgagcagttcctggatgacttcatcgacctggtgatctggggccatgaacatgagtgcaagatcgcccccaccaagaatgagcagcagctgttctacatcagccagcccggcagctctgtggtgaccagcctgagccctggagaggccgtgaagaagcacgtgggcctgctgcgcatcaagggcaggaagatgaacatgcacaagatccccctgcacacagtgcggcagttcttcatggaggacatcgtgctggccaaccacccagacatcttcaacccagacaaccccaaggtgacccaggccatccagagcttctgcctggagaagattgaggagatgctggagaatgctgagcgggagcggctgggcaacagccaccagcctgagaagcccctggtgcggctgcgggtggactacagcggcggctttgagcccttctctgtgctgcgcttcagccagaagtttgtggacagagtggccaaccccaaggacatcatccacttcttccgccaccgggagcagaaggagaagacaggagaggagatcaactttgggaagctgatcaccaagcccagcgagggcaccaccctgcgggtggaggacctggtgaagcagtacttccagacagctgagaagaatgtgcagctgagcctgctgacagagcggggcatgggagaggccgtgcaggagtttgtggacaaggaggagaaggatgccatcgaggagctggtgaagtaccagctggagaagacccagcgcttcctgaaggagcggcacattgatgccctggaggacaagattgatgaggaggtgcggcgcttccgggagacccggcagaagaacaccaatgaagaagatgatgaggtgcgggaggccatgacccgggcccgggccctgcggagccagagcgaggagagcgccagcgccttcagcgcagatgacctgatgagcattgacctggccgagcagatggccaatgacagtgatgacagcatctctgctgccaccaacaagggccggggccggggccggggccggcggggcggccggggccagaacagcgccagccggggcggcagccagaggggccgggccttcaagagcacccggcagcagcccagcagaaatgtgaccaccaagaactacagcgaggtgattgaggtggatgaaagtgatgtggaggaggacatcttccccaccaccagcaagacagaccagcgctggagcagcaccagcagcagcaagatcatgagccagagccaggtgtccaagggcgtggactttgagagcagtgaagatgatgatgatgaccccttcatgaacaccagcagcctgcggaggaacagaagatag

SEQ ID NO: 157639 - DNA, 384 bp, Artificial Sequence
  derived and/or modified sequence
atgagcacagcagatgccctggatgatgagaacaccttcaagatcctggtggccacagacatccacctgggcttcatggagaaggatgctgtgagaggaaatgacacctttgtgaccctggatgagatcctgcggctggcccaggagaatgaggtggacttcatcctgctgggcggggacctcttccacgagaacaagcccagcaggaagaccctgcacacctgcctggagctgctgaggaagtactgcatgggagacaggcctgtgcagtttgagatcctgagtgaccagagcgtgaactttggcttcagcaagttcccctgggtgaactaccaggacggcaacctgaacatcagcatccctgtgttcagcatccacggctag

SEQ ID NO: 157640 - DNA, 336 bp, Artificial Sequence
  derived and/or modified sequence
atgagcacagcagatgccctggatgatgagaacaccttcaagatcctggtggccacagacatccacctgggcttcatggagaaggatgctgtgagaggaaatgacacctttgtgaccctggatgagatcctgcggctggcccaggagaatgaggtggacttcatcctgctgggcggggacctcttccacgagaacaagcccagcaggaagaccctgcacacctgcctggagctgctgaggaagtactgcatgggagacaggcctgtgcagtttgagatcctgagtgaccagagcgtgaactttggcttcagcaagttcccctgggtgaactactag

SEQ ID NO: 157641 - DNA, 666 bp, Artificial Sequence
  derived and/or modified sequence
atgagcacagcagatgccctggatgatgagaacaccttcaagatcctggtggccacagacatccacctgggcttcatggagaaggatgctgtgagaggaaatgacacctttgtgaccctggatgagatcctgcggctggcccaggagaatgaggtggacttcatcctgctgggcggggacctcttccacgagaacaagcccagcaggaagaccctgcacacctgcctggagctgctgaggaagtactgcatgggagacaggcctgtgcagtttgagatcctgagtgaccagagcgtgaactttggcttcagcaagttcccctgggtgaactaccaggacggcaacctgaacatcagcatccctgtgttcagcatccacggcaaccatgatgaccccactggagcagatgccctgtgtgccctggacatcctgagctgtgccggctttgtgaaccacttcggccgctccatgtctgtggagaagattgacatcagccctgtgctgctgcagaagggcagcaccaagatcgccctgtatggcctgggcagcatcccagatgagcggctgtacaggatgtttgtgaacaagaaggtgaccatgctgcggcccaaggaggatgaaaattcctggttcaacctcttcgtcatccaccagaacagagtgtag

SEQ ID NO: 157642 - DNA, 2043 bp, Artificial Sequence
  derived and/or modified sequence
atgagcaccgccgacgccctggacgacgagaacaccttcaagatcctggtggccaccgacatccatctgggtttcatggaaaaggacgccgtgcgggggaatgacacctttgtcaccctggacgagatcctcagactcgcccaggagaatgaagtggactttatattgttgggcggggacctgtttcatgagaataagccaagtcgcaagaccttacacacatgcctggagctgttgcggaaatattgcatgggcgacagaccggtgcagttcgagatcctgtccgatcagtctgtcaatttcggcttcagcaagtttccatgggtcaattatcaagacggcaacctgaatattagtatcccggtatttagtattcacggaaaccacgacgatccaacaggggccgacgctctttgtgcactggatattctttcttgcgcaggcttcgttaaccacttcggtagaagcatgtcagtagagaaaattgacatttccccggtgctgctgcagaaaggcagtactaaaattgcactctacggcctgggaagcatcccagatgagcggttatatcgcatgttcgtcaataagaaggttaccatgcttagacccaaggaagatgaaaactcttggtttaacctgttcgtgatccatcaaaataggagcaagcacgggagcaccaactttatccctgagcagttcctggatgactttatcgatctggttatttggggacacgaacatgaatgtaaaatcgctcctaccaaaaatgagcaacaactgttttacatttcacagccagggagtagcgtagttactagtctgagtccaggcgaagccgtgaagaaacacgtcggcttgttgcggatcaaagggcggaaaatgaatatgcataaaatccctcttcacacagtgcggcagttcttcatggaggacattgtgctggctaaccacccagacatctttaacccagacaatccaaaggtcactcaggcgatccagtcgttttgtttagagaagatcgaggaaatgctggaaaacgctgaaagggagcgactgggaaacagtcaccaacccgaaaaacccctggtgcgcttgagagtggactatagtggaggattcgaaccattctcagtactgcggttcagccaaaagtttgtcgatcgggtggcaaaccccaaggacatcatccattttttccgccaccgtgagcagaaagagaagacaggagaagagatcaattttgggaagctaatcacaaaaccatcggaaggcaccaccctgcgcgttgaggacctggtcaaacagtatttccaaaccgcagaaaaaaatgtgcagctgtccctcttaaccgagcgcggcatgggggaggccgtccaggaatttgtcgataaagaagaaaaggatgcaattgaggagctggtgaagtaccagttagagaagactcagcgcttcctgaaagaacgacacattgatgcactggaagataagatcgatgaggaggttcgaaggtttcgggagacgagacagaagaatacgaacgaggaagatgatgaagtccgcgaggccatgaccagagcacgtgccctcaggtctcagtccgaagagagcgcaagcgctttcagcgctgacgatcttatgagtatcgacctggccgagcagatggccaatgactccgatgactcgatcagtgccgctactaacaaggggcgaggcaggggaagagggagacgaggaggccgcgggcagaactctgcatccaggggaggttctcagagaggccgcgcattcaaaagcaccagacaacaaccttcccgaaacgtgaccactaaaaactactccgaggtgatcgaagtggacgagagcgacgtcgaggaagacattttccctacgacttccaaaacagaccagcgttggagctccacctctagttccaaaatcatgtctcagtctcaggtgtctaaaggcgtggactttgaatcatccgaagacgacgacgacgatccttttatgaatacgtcctctctgaggcgtaatcgacgctag

SEQ ID NO: 157643 - DNA, 384 bp, Artificial Sequence
  derived and/or modified sequence
atgagcaccgccgacgccctggacgacgagaacaccttcaagatccttgtcgcgactgacatccaccttggattcatggagaaggatgccgtgcgcggcaacgatactttcgttactctcgacgaaattctccgactggcacaggaaaatgaggtcgattttatacttttgggaggagacctcttccacgaaaataaacctagccgcaaaaccctccacacatgcttggaactgttacggaagtactgcatgggagaccgaccggtgcagttcgagatcttgagcgaccagtccgtcaactttggcttctcaaagtttccttgggtgaactaccaggatggcaatctgaacatcagcatcccagtcttctcgatccacggctag

SEQ ID NO: 157644 - DNA, 336 bp, Artificial Sequence
  derived and/or modified sequence
atgagcaccgccgacgccctggacgacgagaacaccttcaagatcctcgtagcaactgatattcatcttggctttatggaaaaggatgccgtgcgggggaatgacacattcgtcacccttgacgaaatcctccgcctggcccaagagaatgaggtagattttattctgctgggaggagatctgttccacgaaaacaaaccttcccggaaaaccctgcacacttgtttagaattattgcgaaagtattgtatgggtgatcggcccgttcagttcgagatactcagcgatcagtctgttaattttgggttctccaaattcccctgggtgaactattag

SEQ ID NO: 157645 - DNA, 666 bp, Artificial Sequence
  derived and/or modified sequence
atgagcaccgccgacgccctggacgacgagaacaccttcaagatcctggtcgcaacggatatccacctcggcttcatggagaaagacgcagtgcgcgggaacgataccttcgttacactggacgaaattttgcggttggcccaggaaaatgaggttgacttcatactgcttggcggggatctattccacgagaataagccgtcacgtaagaccctgcatacatgccttgaactgctaagaaagtactgtatgggagataggcccgtgcaatttgaaattctctcggatcagtccgtgaactttggcttttcaaaatttccatgggtaaattaccaggacggcaatctcaatatctccatcccagtgttcagtattcatggcaatcacgatgaccccaccggcgcagatgccctgtgtgcccttgacatcctttcctgcgccggttttgtgaatcattttggcaggtctatgagcgtggagaagatagacataagcccagtgcttcttcagaagggaagcacgaaaatcgctctttacggtctgggctccataccggatgagcgtctatatcggatgtttgtgaacaagaaagttactatgctgcgcccgaaagaagacgagaattcctggttcaaccttttcgttatccatcagaatagggtctag

SEQ ID NO: 157646 - DNA, 2588 bp, Artificial Sequence
  derived and/or modified sequence
acgttatccatgaagtgtcgcgagagaaacggacgccgttctctcccgcggaattcaggtttacggccctgcgggttctcagaggcaagttcagaccgtgttgttttcttttcacggatcctgccctttcttcccgaaaagaagacagccttgggtcgcgattgtggggcttcgaagagtccagcagtgggaatttctagaatttggaatcgagtgcattttctgacatttgagtacagtacccaggggttcttggagaagaacctggtcccagaggagcttgactgaccataaaaatgagtactgcagatgcacttgatgatgaaaacacatttaaaatattagttgcaacagatattcatcttggatttatggagaaagatgcagtcagaggaaatgatacgtttgtaacactcgatgaaattttaagacttgcccaggaaaatgaagtggattttattttgttaggtggtgatctttttcatgaaaataagccctcaaggaaaacattacatacctgcctcgagttattaagaaaatattgtatgggtgatcggcctgtccagtttgaaattctcagtgatcagtcagtcaactttggttttagtaagtttccatgggtgaactatcaagatggcaacctcaacatttcaattccagtgtttagtattcatggcaatcatgacgatcccacaggggcagatgcactttgtgccttggacattttaagttgtgctggatttgtaaatcactttggacgttcaatgtctgtggagaagatagacattagtccggttttgcttcaaaaaggaagcacaaagattgcgctatatggtttaggatccattccagatgaaaggctctatcgaatgtttgtcaataaaaaagtaacaatgttgagaccaaaggaagatgagaactcttggtttaacttatttgtgattcatcagaacaggagtaaacatggaagtactaacttcattccagaacaatttttggatgacttcattgatcttgttatctggggccatgaacatgagtgtaaaatagctccaaccaaaaatgaacaacagctgttttatatctcacaacctggaagctcagtggttacttctctttccccaggagaagctgtaaagaaacatgttggtttgctgcgtattaaagggaggaagatgaatatgcataaaattcctcttcacacagtgcggcagtttttcatggaggatattgttctagctaatcatccagacatttttaacccagataatcctaaagtaacccaagccatacaaagcttctgtttggagaagattgaagaaatgcttgaaaatgctgaacgggaacgtctgggtaattctcaccagccagagaagcctcttgtacgactgcgagtggactatagtggaggttttgaacctttcagtgttcttcgctttagccagaaatttgtggatcgggtagctaatccaaaagacattatccattttttcaggcatagagaacaaaaggaaaaaacaggagaagagatcaactttgggaaacttatcacaaagccttcagaaggaacaactttaagggtagaagatcttgtaaaacagtactttcaaaccgcagagaagaatgtgcagctctcactgctaacagaaagagggatgggtgaagcagtacaagaatttgtggacaaggaggagaaagatgccattgaggaattagtgaaataccagttggaaaaaacacagcgatttcttaaagaacgtcatattgatgccctcgaagacaaaatcgatgaggaggtacgtcgtttcagagaaaccagacaaaaaaatactaatgaagaagatgatgaagtccgtgaggctatgaccagggccagagcactcagatctcagtcagaggagtctgcttctgcctttagtgctgatgaccttatgagtatagatttagcagaacagatggctaatgactctgatgatagcatctcagcagcaaccaacaaaggaagaggccgaggaagaggtcgaagaggtggaagagggcagaattcagcatcgagaggagggtctcaaagaggaagagcctttaaatctacaagacagcagccttcccgaaatgtcactactaagaattattcagaggtgattgaggtagatgaatcagatgtggaagaagacatttttcctaccacttcaaagacagatcaaaggtggtccagcacatcatccagcaaaatcatgtcccagagtcaagtatcgaaaggggttgattttgaatcaagtgaggatgatgatgatgatccttttatgaacactagttctttaagaagaaatagaagataatatatttaatggcactgagaaacatgcaagatacaggaaaaatgaaaatgttacaagctaagagtttacagtttaagattttaagtattgtttcctgagcataactccataagtaagaaatttctagttcacagacatacaatagcattgattcaccttgtttttttaacctggttgttgtagtaagagctttgtttcaatatcactcttgagtaaagattaaaataaagctaccattttacatttcta

SEQ ID NO: 157647 - DNA, 572 bp, Artificial Sequence
  derived and/or modified sequence
ttgaagcatctacgttatccatgaagtgtcgcgagagaaacggacgccgttctctcccgcggaattcaggtttacggccctgcgggttctcagagaatttggaatcgagtgcattttctgacatttgagtacagtacccaggggttcttggagaagaacctggtcccagaggagcttgactgaccataaaaatgagtactgcagatgcacttgatgatgaaaacacatttaaaatattagttgcaacagatattcatcttggatttatggagaaagatgcagtcagaggaaatgatacgtttgtaacactcgatgaaattttaagacttgcccaggaaaatgaagtggattttattttgttaggtggtgatctttttcatgaaaataagccctcaaggaaaacattacatacctgcctcgagttattaagaaaatattgtatgggtgatcggcctgtccagtttgaaattctcagtgatcagtcagtcaactttggttttagtaagtttccatgggtgaactatcaagatggcaacctcaacatttcaattccagtgtttagtattcatggc

SEQ ID NO: 157648 - DNA, 558 bp, Artificial Sequence
  derived and/or modified sequence
acggccctgcgggttctcagaggcaagttcagaccgtgttgttttcttttcacggatcctgccctttcttcccgaaaagaagacagccttgggtcgcgattgtggggcttcgaagagtccagcagtgggaatttggaatcgagtgcattttctgacatttgagtacagtacccaggggttcttggagaagaacctggtcccagaggagcttgactgaccataaaaatgagtactgcagatgcacttgatgatgaaaacacatttaaaatattagttgcaacagatattcatcttggatttatggagaaagatgcagtcagaggaaatgatacgtttgtaacactcgatgaaattttaagacttgcccaggaaaatgaagtggattttattttgttaggtggtgatctttttcatgaaaataagccctcaaggaaaacattacatacctgcctcgagttattaagaaaatattgtatgggtgatcggcctgtccagtttgaaattctcagtgatcagtcagtcaactttggttttagtaagtttccatgggtgaactat

SEQ ID NO: 157649 - DNA, 1212 bp, Artificial Sequence
  derived and/or modified sequence
ctctcccgcggaattcaggtttacggccctgcgggttctcagagaatttctagaatttggaatcgagtgcattttctgacatttgagtacagtacccaggggttcttggagaagaacctggtcccagaggagcttgactgaccataaaaatgagtactgcagatgcacttgatgatgaaaacacatttaaaatattagttgcaacagatattcatcttggatttatggagaaagatgcagtcagaggaaatgatacgtttgtaacactcgatgaaattttaagacttgcccaggaaaatgaagtggattttattttgttaggtggtgatctttttcatgaaaataagccctcaaggaaaacattacatacctgcctcgagttattaagaaaatattgtatgggtgatcggcctgtccagtttgaaattctcagtgatcagtcagtcaactttggttttagtaagtttccatgggtgaactatcaagatggcaacctcaacatttcaattccagtgtttagtattcatggcaatcatgacgatcccacaggggcagatgcactttgtgccttggacattttaagttgtgctggatttgtaaatcactttggacgttcaatgtctgtggagaagatagacattagtccggttttgcttcaaaaaggaagcacaaagattgcgctatatggtttaggatccattccagatgaaaggctctatcgaatgtttgtcaataaaaaagtaacaatgttgagaccaaaggaagatgagaactcttggtttaacttatttgtgattcatcagaacagggtataggattgattgaaaagaagacagacttgaagaagcaagatttattatctgatcactgcagtaaaaatgtgaggtggtgacagtgatggcaatgaaacagaaatgggagggacacaccggagaagttgtcagggaagaactcaaaggatttggggcctgattatataatttattacagttgtcccttggtatccacggggggtgttcggtccaggacctaaaatcctgggatgctgaaatcccttgaataaaatggtatagcatttgcatataacctacatatatcctcctatgtactttaaatcatctctagattacttgtaatacctgatacaatgtaaatactgtttaaatagttgttatactgtattgctttaaaaatttatatttttcgttgtta

SEQ ID NO: 157650 - DNA, 2043 bp, Artificial Sequence
  derived and/or modified sequence
atgtccaccgctgacgcactggatgacgagaacactttcaaaattctagtagccacagatattcatctcggattcatggagaaggacgcggtccggggaaatgacacgttcgttacacttgacgagatcctaaggcttgcccaggagaatgaggtcgattttatactccttggaggcgatttgttccatgagaacaaaccgagccgaaagactctgcacacttgcttggaattgttgagaaagtactgtatgggggacaggcccgtccaattcgaaattctgtcagaccaaagcgtcaacttcggcttctctaaatttccatgggtgaactatcaggacggtaaccttaatatcagcatccctgtcttttcaatacatggcaatcatgatgaccccaccggagcggacgccttatgcgccctggacatcctgagttgtgccggatttgtcaaccactttggtaggtctatgagcgttgaaaaaatagacatctctcccgtacttctgcagaagggtagtacgaagattgctctttacggattgggtagtatcccagacgaacggctctataggatgtttgtgaataaaaaggtaaccatgttgcggccaaaagaggatgaaaactcctggtttaacttattcgtcattcaccagaacaggtcgaagcatggcagcaccaactttattcctgaacaattcttggacgactttatagatctggtcatatggggtcatgaacacgagtgcaaaatagccccaaccaaaaatgagcagcaactgttctacatatcgcaacctggctcttccgtggtcacttctctctctcccggtgaggccgttaagaagcacgtgggactacttcgtatcaaaggcagaaagatgaacatgcataaaattccgctacatacagtccgacagttctttatggaggatatagtgctcgcaaaccaccccgacatctttaacccagataaccccaaggtgacccaagccatacaaagcttttgtctagagaagatcgaagaaatgttggagaacgccgaacgcgaacgcttggggaatagccaccagccagagaagccactcgtaaggttaagggtggactattccggaggatttgagcccttcagcgttctccgcttttcccaaaagttcgttgaccgcgtagcgaaccctaaagatatcatccactttttccgccaccgagagcagaaggagaaaactggtgaggagattaatttcgggaaactgattacgaagcctagtgaggggacaaccctgcgtgtcgaggatctggtaaaacagtacttccagactgcagaaaaaaatgttcagctgagcctgcttactgagaggggaatgggcgaggctgtgcaggagttcgtggataaagaggaaaaggatgccatcgaggaacttgtgaaataccagctggagaagacacaacgctttctcaaggagcggcacatcgacgctctggaagacaaaatcgatgaggaggtgaggaggttcagagaaaccagacagaaaaacacaaatgaggaagatgacgaagtgcgcgaagccatgactagagccagagctctgagatcccagtctgaagagtctgcatccgcatttagcgccgacgatctgatgagcatcgatctggcggagcagatggcaaacgactccgacgattctatttcagctgcaaccaacaaaggcaggggcaggggccgtggcaggaggggaggaagaggccagaatagcgcgtcacgcggtggctcgcaaagaggaagagcctttaaaagcacgaggcagcaaccttcacggaacgtgaccacaaagaactatagtgaagtaatcgaggtcgacgagagtgatgtcgaagaggatatcttccctaccacctccaaaaccgaccagcgttggagttcaacttctagctctaagattatgagtcagtctcaggtctctaaaggagtggacttcgagtcttccgaggacgacgacgacgatccattcatgaacacttcttctttgcggaggaacagaagatag

SEQ ID NO: 157651 - DNA, 384 bp, Artificial Sequence
  derived and/or modified sequence
atgtcaacagccgatgctctagatgacgagaatacattcaagattttggtagccacggacatccacctcggcttcatggagaaagacgccgtgagaggcaacgacactttcgtcactctggatgagattttgcggcttgcacaagagaacgaagttgacttcatcttgcttgggggagaccttttccatgaaaataagccatccagaaagaccctgcacacctgtctggaactcctgagaaagtactgtatgggggataggcccgtgcagttcgaaattttgagcgatcagtccgtcaatttcggattttcgaagttcccctgggtcaattatcaggatggaaatttgaacattagcatccctgtcttcagtatccatggttag

SEQ ID NO: 157652 - DNA, 336 bp, Artificial Sequence
  derived and/or modified sequence
atgtctacagccgacgcactggatgatgagaacaccttcaaaatcctggtggccaccgatattcacctggggtttatggaaaaagatgctgtgagagggaatgatactttcgtgaccttggacgagattcttcggctggcccaagagaacgaagtggactttatactgttagggggtgacttgttccatgaaaacaaaccttcacgcaaaaccttgcacacttgtctggaactgctgcggaagtactgtatgggtgacaggccagtccagttcgaaatcctctctgatcagagcgtgaacttcgggttctccaaattcccatgggtgaactattag

SEQ ID NO: 157653 - DNA, 666 bp, Artificial Sequence
  derived and/or modified sequence
atgagtactgccgatgctttggatgatgaaaacacatttaagattcttgtggcgaccgatattcacctcggttttatggagaaggatgcagtgagagggaacgacaccttcgtcactttggacgaaattttgcgcctagctcaggagaatgaggtggatttcatcttgttgggtggcgatctttttcatgagaataagccttcacgtaagactctgcatacttgccttgaactacttaggaaatactgtatgggcgacagacctgtgcagttcgagattctttccgaccagtcggttaacttcggcttttccaaattcccttgggttaactaccaggacggaaatctgaacattagtatccccgtatttagcattcatggaaatcatgatgaccccacaggtgctgatgcactctgcgcgctcgacatcctgtcctgcgccggatttgttaatcacttcggacggagtatgtccgtggagaagattgatatttcacccgttctactgcagaaaggcagcaccaagatagctttatacggtctcggcagcattcctgatgagcggctgtatcgtatgtttgtcaacaagaaagttactatgctcagacctaaggaagatgaaaactcatggtttaacttgtttgtgattcatcaaaacagggtgtag

SEQ ID NO: 157654 - protein, 708 aa, Artificial Sequence
  derived and/or modified sequence
MSTADALDDENTFKILVATDIHLGFMEKDAVRGNDTFVTLDEILRLAQENEVDFILLGGDLFHENKPSRKTLHTCLELLRKYCMGDRPVQFEILSDQSVNFGFSKFPWVNYQDGNLNISIPVFSIHGNHDDPTGADALCALDILSCAGFVNHFGRSMSVEKIDISPVLLQKGSTKIALYGLGSIPDERLYRMFVNKKVTMLRPKEDENSWFNLFVIHQNRSKHGSTNFIPEQFLDDFIDLVIWGHEHECKIAPTKNEQQLFYISQPGSSVVTSLSPGEAVKKHVGLLRIKGRKMNMHKIPLHTVRQFFMEDIVLANHPDIFNPDNPKVTQAIQSFCLEKIEEMLENAERERLGNSHQPEKPLVRLRVDYSGGFEPFSVLRFSQKFVDRVANPKDIIHFFRHREQKEKTGEEINFGKLITKPSEGTTLRVEDLVKQYFQTAEKNVQLSLLTERGMGEAVQEFVDKEEKDAIEELVKYQLEKTQRFLKERHIDALEDKIDEEVRRFRETRQKNTNEEDDEVREAMTRARALRSQSEESASAFSADDLMSIDLAEQMANDSDDSISAATNKGRGRGRGRRGGRGQNSASRGGSQRGRADTGLETSTRSRNSKTAVSASRNMSIIDAFKSTRQQPSRNVTTKNYSEVIEVDESDVEEDIFPTTSKTDQRWSSTSSSKIMSQSQVSKGVDFESSEDDDDDPFMNTSSLRRNRR

SEQ ID NO: 157655 - protein, 711 aa, Artificial Sequence
  derived and/or modified sequence
MNRNISHQKGDDENTFKILVATDIHLGFMEKDAVRGNDTFVTLDEILRLAQENEVDFILLGGDLFHENKPSRKTLHTCLELLRKYCMGDRPVQFEILSDQSVNFGFSKFPWVNYQDGNLNISIPVFSIHGNHDDPTGADALCALDILSCAGFVNHFGRSMSVEKIDISPVLLQKGSTKIALYGLGSIPDERLYRMFVNKKVTMLRPKEDENSWFNLFVIHQNRSKHGSTNFIPEQFLDDFIDLVIWGHEHECKIAPTKNEQQLFYISQPGSSVVTSLSPGEAVKKHVGLLRIKGRKMNMHKIPLHTVRQFFMEDIVLANHPDIFNPDNPKVTQAIQSFCLEKIEEMLENAERERLGNSHQPEKPLVRLRVDYSGGFEPFSVLRFSQKFVDRVANPKDIIHFFRHREQKEKTGEEINFGKLITKPSEGTTLRVEDLVKQYFQTAEKNVQLSLLTERGMGEAVQEFVDKEEKDAIEELVKYQLEKTQRFLKERHIDALEDKIDEEVRRFRETRQKNTNEEDDEVREAMTRARALRSQSEESASAFSADDLMSIDLAEQMANDSDDSISAATNKGRGRGRGRRGGRGQNSASRGGSQRGRADTGLETSTRSRNSKTAVSASRNMSIIDAFKSTRQQPSRNVTTKNYSEVIEVDESDVEEDIFPTTSKTDQRWSSTSSSKIMSQSQVSKGVDFESSEDDDDDPFMNTSSLRRNRR

SEQ ID NO: 157656 - protein, 127 aa, Artificial Sequence
  derived and/or modified sequence
MSTADALDDENTFKILVATDIHLGFMEKDAVRGNDTFVTLDEILRLAQENEVDFILLGGDLFHENKPSRKTLHTCLELLRKYCMGDRPVQFEILSDQSVNFGFSKFPWVNYQDGNLNISIPVFSIHG

SEQ ID NO: 157657 - protein, 111 aa, Artificial Sequence
  derived and/or modified sequence
MSTADALDDENTFKILVATDIHLGFMEKDAVRGNDTFVTLDEILRLAQENEVDFILLGGDLFHENKPSRKTLHTCLELLRKYCMGDRPVQFEILSDQSVNFGFSKFPWVNY

SEQ ID NO: 157658 - DNA, 2127 bp, Artificial Sequence
  derived and/or modified sequence
atgagcaccgccgacgccctggacgacgagaacaccttcaagatcctggtggccaccgacatccacctgggcttcatggagaaggacgccgtgagaggcaacgacaccttcgtgaccctggacgagatcctgagactggcccaggagaacgaggtggacttcatcctgctgggcggcgacctgttccacgagaacaagcccagcagaaagaccctgcacacctgcctggagctgctgagaaagtactgcatgggcgacagacccgtgcagttcgagatcctgagcgaccagagcgtgaacttcggcttcagcaagttcccctgggtgaactaccaggacggcaacctgaacatcagcatccccgtgttcagcatccacggcaaccacgacgaccccaccggcgccgacgccctgtgcgccctggacatcctgagctgcgccggcttcgtgaaccacttcggcagaagcatgagcgtggagaagatcgacatcagccccgtgctgctgcagaagggcagcaccaagatcgccctgtacggcctgggcagcatccccgacgagagactgtacagaatgttcgtgaacaagaaggtgaccatgctgagacccaaggaggacgagaacagctggttcaacctgttcgtgatccaccagaacagaagcaagcacggcagcaccaacttcatccccgagcagttcctggacgacttcatcgacctggtgatctggggccacgagcacgagtgcaagatcgcccccaccaagaacgagcagcagctgttctacatcagccagcccggcagcagcgtggtgaccagcctgagccccggcgaggccgtgaagaagcacgtgggcctgctgagaatcaagggcagaaagatgaacatgcacaagatccccctgcacaccgtgagacagttcttcatggaggacatcgtgctggccaaccaccccgacatcttcaaccccgacaaccccaaggtgacccaggccatccagagcttctgcctggagaagatcgaggagatgctggagaacgccgagagagagagactgggcaacagccaccagcccgagaagcccctggtgagactgagagtggactacagcggcggcttcgagcccttcagcgtgctgagattcagccagaagttcgtggacagagtggccaaccccaaggacatcatccacttcttcagacacagagagcagaaggagaagaccggcgaggagatcaacttcggcaagctgatcaccaagcccagcgagggcaccaccctgagagtggaggacctggtgaagcagtacttccagaccgccgagaagaacgtgcagctgagcctgctgaccgagagaggcatgggcgaggccgtgcaggagttcgtggacaaggaggagaaggacgccatcgaggagctggtgaagtaccagctggagaagacccagagattcctgaaggagagacacatcgacgccctggaggacaagatcgacgaggaggtgagaagattcagagagaccagacagaagaacaccaacgaggaggacgacgaggtgagagaggccatgaccagagccagagccctgagaagccagagcgaggagagcgccagcgccttcagcgccgacgacctgatgagcatcgacctggccgagcagatggccaacgacagcgacgacagcatcagcgccgccaccaacaagggcagaggcagaggcagaggcagaagaggcggcagaggccagaacagcgccagcagaggcggcagccagagaggcagagccgacaccggcctggagaccagcaccagaagcagaaacagcaagaccgccgtgagcgccagcagaaacatgagcatcatcgacgccttcaagagcaccagacagcagcccagcagaaacgtgaccaccaagaactacagcgaggtgatcgaggtggacgagagcgacgtggaggaggacatcttccccaccaccagcaagaccgaccagagatggagcagcaccagcagcagcaagatcatgagccagagccaggtgagcaagggcgtggacttcgagagcagcgaggacgacgacgacgaccccttcatgaacaccagcagcctgagaagaaacagaagatag

SEQ ID NO: 157659 - DNA, 2136 bp, Artificial Sequence
  derived and/or modified sequence
atgaacagaaacatcagccaccagaagggcgacgacgagaacaccttcaagatcctggtggccaccgacatccacctgggcttcatggagaaggacgccgtgagaggcaacgacaccttcgtgaccctggacgagatcctgagactggcccaggagaacgaggtggacttcatcctgctgggcggcgacctgttccacgagaacaagcccagcagaaagaccctgcacacctgcctggagctgctgagaaagtactgcatgggcgacagacccgtgcagttcgagatcctgagcgaccagagcgtgaacttcggcttcagcaagttcccctgggtgaactaccaggacggcaacctgaacatcagcatccccgtgttcagcatccacggcaaccacgacgaccccaccggcgccgacgccctgtgcgccctggacatcctgagctgcgccggcttcgtgaaccacttcggcagaagcatgagcgtggagaagatcgacatcagccccgtgctgctgcagaagggcagcaccaagatcgccctgtacggcctgggcagcatccccgacgagagactgtacagaatgttcgtgaacaagaaggtgaccatgctgagacccaaggaggacgagaacagctggttcaacctgttcgtgatccaccagaacagaagcaagcacggcagcaccaacttcatccccgagcagttcctggacgacttcatcgacctggtgatctggggccacgagcacgagtgcaagatcgcccccaccaagaacgagcagcagctgttctacatcagccagcccggcagcagcgtggtgaccagcctgagccccggcgaggccgtgaagaagcacgtgggcctgctgagaatcaagggcagaaagatgaacatgcacaagatccccctgcacaccgtgagacagttcttcatggaggacatcgtgctggccaaccaccccgacatcttcaaccccgacaaccccaaggtgacccaggccatccagagcttctgcctggagaagatcgaggagatgctggagaacgccgagagagagagactgggcaacagccaccagcccgagaagcccctggtgagactgagagtggactacagcggcggcttcgagcccttcagcgtgctgagattcagccagaagttcgtggacagagtggccaaccccaaggacatcatccacttcttcagacacagagagcagaaggagaagaccggcgaggagatcaacttcggcaagctgatcaccaagcccagcgagggcaccaccctgagagtggaggacctggtgaagcagtacttccagaccgccgagaagaacgtgcagctgagcctgctgaccgagagaggcatgggcgaggccgtgcaggagttcgtggacaaggaggagaaggacgccatcgaggagctggtgaagtaccagctggagaagacccagagattcctgaaggagagacacatcgacgccctggaggacaagatcgacgaggaggtgagaagattcagagagaccagacagaagaacaccaacgaggaggacgacgaggtgagagaggccatgaccagagccagagccctgagaagccagagcgaggagagcgccagcgccttcagcgccgacgacctgatgagcatcgacctggccgagcagatggccaacgacagcgacgacagcatcagcgccgccaccaacaagggcagaggcagaggcagaggcagaagaggcggcagaggccagaacagcgccagcagaggcggcagccagagaggcagagccgacaccggcctggagaccagcaccagaagcagaaacagcaagaccgccgtgagcgccagcagaaacatgagcatcatcgacgccttcaagagcaccagacagcagcccagcagaaacgtgaccaccaagaactacagcgaggtgatcgaggtggacgagagcgacgtggaggaggacatcttccccaccaccagcaagaccgaccagagatggagcagcaccagcagcagcaagatcatgagccagagccaggtgagcaagggcgtggacttcgagagcagcgaggacgacgacgacgaccccttcatgaacaccagcagcctgagaagaaacagaagatag

SEQ ID NO: 157660 - DNA, 2127 bp, Artificial Sequence
  derived and/or modified sequence
atgtctacagccgacgcccttgacgatgagaacaccttcaagatcttggttgcaaccgatattcacctaggattcatggaaaaagacgccgtcagaggtaatgatacctttgtcacgctggatgagattctccgccttgcccaagaaaatgaagtggattttattttgttgggaggtgatttatttcacgaaaataagcctagtcggaagactctccacacctgccttgagttactacgaaagtattgcatgggagaccggcctgttcagtttgaaatactgtccgaccaaagtgttaacttcgggttctccaaattcccttgggtcaactatcaggacggaaatctcaacatttccatcccagtttttagtattcatggcaaccatgacgaccccaccggcgccgatgcactgtgtgctttggatattctctcctgcgccgggttcgtgaatcacttcggaagatcaatgtctgttgaaaaaatcgacatctctccagtcctccttcagaaagggtcaactaagatcgccttgtacggtctgggctcaattcccgacgaaagactctatagaatgtttgtgaacaagaaggttaccatgctgagacccaaggaagacgagaattcctggttcaacctgttcgtgatacatcagaaccggagtaaacatgggtccactaacttcatccctgaacagttcttagacgactttattgacctggtgatatggggacatgagcacgaatgcaagatcgcccctactaagaacgagcagcagctcttttacatctcacagccaggttcgagcgtcgtgacatctctgagtcctggcgaagctgttaaaaaacatgttgggctgctgcgtattaagggacggaagatgaacatgcacaaaatccctctgcacactgtccggcagttctttatggaggacattgttctcgccaatcatccggatattttcaaccctgacaatcccaaggtgacccaggctatccaatccttttgcctggaaaagatcgaagagatgctcgagaatgccgagcgcgagaggcttggaaactcacaccagcccgagaaaccgcttgtgcgcttgagagtggattacagtggcggatttgaacccttcagcgtgctccgattttcccagaagttcgtcgaccgcgtggctaaccccaaggatattattcacttctttcgacaccgagagcaaaaggaaaagactggtgaagagattaatttcggcaagctcatcaccaagccctccgaagggactacactgcgggtggaagacttggtcaagcaatactttcaaaccgccgaaaagaacgtgcagctgtccttgctcaccgaacgcggcatgggggaggctgtacaggagttcgtggacaaagaagaaaaagatgccatcgaggagttggtaaagtatcaactggagaagacgcagcggtttctgaaagagcgacacatcgatgctctcgaagacaagatcgacgaagaggttagacgcttcagagaaacccggcagaaaaacacaaatgaagaggatgacgaggttcgggaggctatgactagagcgcgcgccctgagatctcagtctgaggagagcgcttctgcctttagcgccgacgacctgatgtctattgatctagcggagcagatggcaaacgactcggacgatagtatttctgccgccaccaacaaaggaagaggtcgcggccggggcagacgcgggggaagggggcagaactccgcatctcgtggcggcagccagagaggaagagccgacacaggacttgagacatctacaagatcacgcaactcgaagaccgcagtttctgcctcgcgtaacatgtccattatagacgcttttaaaagtacaagacaacagcctagccggaacgtcaccactaagaactactctgaggtcatcgaggtagatgagagtgacgtggaggaagatatattcccaaccacatccaaaaccgaccagcgctggtcaagcacttcctctagtaagatcatgtcacagtcgcaagtcagcaaaggtgtagattttgagagctccgaagatgacgacgatgaccccttcatgaatacatccagcttgagacggaataggcggtag

SEQ ID NO: 157661 - DNA, 2136 bp, Artificial Sequence
  derived and/or modified sequence
atgaatcgcaacatcagtcatcaaaaaggcgacgatgaaaatacttttaaaattctggtcgccaccgatatccacttaggttttatggagaaggatgcagtaaggggtaatgacaccttcgtcacactggacgagatcttaagactggcgcaggaaaatgaagttgattttattcttctgggtggggacctctttcatgaaaacaagccctcgagaaaaactctccatacctgtctcgaattgttgaggaagtactgcatgggtgacagaccagtccagttcgagattctgtccgaccagagcgtcaatttcggatttagcaaattcccgtgggtcaactatcaggacggcaacctgaacatctcaatccccgtgttctccattcatggcaaccacgacgaccctaccggagctgacgccctctgcgctttggatatactgtcatgtgcgggtttcgtgaaccacttcggacgttccatgtccgtggagaagatcgatatttctccggtactcctgcagaagggatccaccaaaattgctctctatggtctcgggagcatcccggatgaaaggctttaccgaatgtttgttaacaagaaggtcacaatgctacggccaaaggaggacgagaattcatggtttaacctcttcgtgattcaccagaatagaagcaaacacgggtctactaatttcattcctgaacagtttctggacgacttcatcgatttggtgatctgggggcacgaacacgaatgtaagatagcgcccacaaaaaacgaacaacagctgttttatattagtcagccgggcagcagtgtggttacatccctgtcaccaggtgaggctgtgaaaaaacacgtggggctgctccgtataaaggggcgcaaaatgaacatgcacaaaattcccctgcacaccgtgcggcagtttttcatggaggatatcgtgctcgcaaaccatcctgacatattcaacccagacaatcctaaggtgacacaggcgattcaatccttctgtctggagaagatagaggagatgctggagaacgccgaaagagagcgccttggcaattcacatcaacccgaaaagccactggtgaggctgagggtcgactactcgggagggtttgaaccgttctctgtgctgaggttcagccagaagttcgtcgaccgggtggctaaccccaaggacattatccatttttttaggcatcgggagcagaaagaaaaaacaggtgaagaaatcaactttggcaagctgattacaaaaccaagcgagggtaccaccttacgggttgaagaccttgtgaagcaatacttccagactgccgaaaagaacgtacagctatcactgttaacagaaagaggaatgggggaggccgtgcaggaattcgttgacaaagaggagaaagacgcaattgaggagctcgtgaagtaccagttagagaagactcagaggttcctgaaggagcgtcatattgacgccttagaagacaagatagacgaagaggtgaggagatttcgcgagaccagacaaaaaaatactaacgaagaggatgatgaagtacgcgaggcaatgacaagagcccgtgccctaaggtctcagtctgaggaatcagccagtgcattctcagcggacgaccttatgagtattgatctcgcagaacagatggcaaatgattcagatgattcaatttctgctgcaactaacaaggggcggggtagaggtagaggacgccgcggtggtcgagggcagaactccgccagccgcggcgggtcacaacgcgggagggctgataccgggctggaaactagtaccaggagccgcaattccaagacagccgtctctgcctctcgaaacatgagtataatcgacgcttttaagagcacccggcaacagccctcccggaatgtgacgactaaaaactactcggaagtgatagaagtggatgaatccgatgtggaagaggatatctttcctactacatcgaaaactgaccagcgttggtcatccacctcttctagcaagattatgtctcagtcccaagtttccaaaggagttgacttcgaatcaagtgaggacgatgacgacgacccattcatgaataccagctcccttaggcgtaataggaggtag

SEQ ID NO: 157662 - DNA, 2127 bp, Artificial Sequence
  derived and/or modified sequence
atgagcacagcagatgccctggatgatgagaacaccttcaagatcctggtggccacagacatccacctgggcttcatggagaaggatgctgtgagaggaaatgacacctttgtgaccctggatgagatcctgcggctggcccaggagaatgaggtggacttcatcctgctgggcggggacctcttccacgagaacaagcccagcaggaagaccctgcacacctgcctggagctgctgaggaagtactgcatgggagacaggcctgtgcagtttgagatcctgagtgaccagagcgtgaactttggcttcagcaagttcccctgggtgaactaccaggacggcaacctgaacatcagcatccctgtgttcagcatccacggcaaccatgatgaccccactggagcagatgccctgtgtgccctggacatcctgagctgtgccggctttgtgaaccacttcggccgctccatgtctgtggagaagattgacatcagccctgtgctgctgcagaagggcagcaccaagatcgccctgtatggcctgggcagcatcccagatgagcggctgtacaggatgtttgtgaacaagaaggtgaccatgctgcggcccaaggaggatgaaaattcctggttcaacctcttcgtcatccaccagaacagaagcaagcacggcagcaccaacttcatccctgagcagttcctggatgacttcatcgacctggtgatctggggccatgaacatgagtgcaagatcgcccccaccaagaatgagcagcagctgttctacatcagccagcccggcagctctgtggtgaccagcctgagccctggagaggccgtgaagaagcacgtgggcctgctgcgcatcaagggcaggaagatgaacatgcacaagatccccctgcacacagtgcggcagttcttcatggaggacatcgtgctggccaaccacccagacatcttcaacccagacaaccccaaggtgacccaggccatccagagcttctgcctggagaagattgaggagatgctggagaatgctgagcgggagcggctgggcaacagccaccagcctgagaagcccctggtgcggctgcgggtggactacagcggcggctttgagcccttctctgtgctgcgcttcagccagaagtttgtggacagagtggccaaccccaaggacatcatccacttcttccgccaccgggagcagaaggagaagacaggagaggagatcaactttgggaagctgatcaccaagcccagcgagggcaccaccctgcgggtggaggacctggtgaagcagtacttccagacagctgagaagaatgtgcagctgagcctgctgacagagcggggcatgggagaggccgtgcaggagtttgtggacaaggaggagaaggatgccatcgaggagctggtgaagtaccagctggagaagacccagcgcttcctgaaggagcggcacattgatgccctggaggacaagattgatgaggaggtgcggcgcttccgggagacccggcagaagaacaccaatgaagaagatgatgaggtgcgggaggccatgacccgggcccgggccctgcggagccagagcgaggagagcgccagcgccttcagcgcagatgacctgatgagcattgacctggccgagcagatggccaatgacagtgatgacagcatctctgctgccaccaacaagggccggggccggggccggggccggcggggcggccggggccagaacagcgccagccggggcggcagccagaggggccgggctgacaccggcctggagaccagcaccaggagcaggaacagcaagacagctgtgtctgccagcaggaacatgagcatcattgatgccttcaagagcacccggcagcagcccagcagaaatgtgaccaccaagaactacagcgaggtgattgaggtggatgaaagtgatgtggaggaggacatcttccccaccaccagcaagacagaccagcgctggagcagcaccagcagcagcaagatcatgagccagagccaggtgtccaagggcgtggactttgagagcagtgaagatgatgatgatgaccccttcatgaacaccagcagcctgcggaggaacagaagatag

SEQ ID NO: 157663 - DNA, 2136 bp, Artificial Sequence
  derived and/or modified sequence
atgaacagaaacatcagccaccagaagggagatgatgagaacaccttcaagatcctggtggccacagacatccacctgggcttcatggagaaggatgctgtgagaggaaatgacacctttgtgaccctggatgagatcctgcggctggcccaggagaatgaggtggacttcatcctgctgggcggggacctcttccacgagaacaagcccagcaggaagaccctgcacacctgcctggagctgctgaggaagtactgcatgggagacaggcctgtgcagtttgagatcctgagtgaccagagcgtgaactttggcttcagcaagttcccctgggtgaactaccaggacggcaacctgaacatcagcatccctgtgttcagcatccacggcaaccatgatgaccccaccggggctgatgccctgtgtgccctggacatcctgagctgtgccggctttgtgaaccacttcggccgctccatgtctgtggagaagattgacatcagccctgtgctgctgcagaagggcagcaccaagatcgccctgtatggcctgggcagcatcccagatgagcggctgtacaggatgtttgtgaacaagaaggtgaccatgctgcggcccaaggaggatgagaacagctggttcaacctgtttgtgatccaccagaacagaagcaagcacggcagcaccaacttcatccctgagcagttcctggatgacttcatcgacctggtgatctggggccacgagcacgagtgcaagatcgcccccaccaagaatgagcagcagctgttctacatcagccagcccggcagctctgtggtgaccagcctgagccctggagaggccgtgaagaagcacgtgggcctgctgcgcatcaagggcaggaagatgaacatgcacaagatccccctgcacacagtgcggcagttcttcatggaggacatcgtgctggccaaccacccagacatcttcaacccagacaaccccaaggtgacccaggccatccagagcttctgcctggagaagattgaggagatgctggagaatgctgagcgggagcggctgggcaacagccaccagcctgagaagcccctggtgcggctgcgggtggactacagcggcggctttgagcccttctctgtgctgcgcttcagccagaagtttgtggacagagtggccaaccccaaggacatcatccacttcttccgccaccgggagcagaaggagaagacaggagaggagatcaactttgggaagctgatcaccaagcccagcgagggcaccaccctgcgggtggaggacctggtgaagcagtacttccagacagctgagaagaatgtgcagctgagcctgctgacagagcggggcatgggagaggccgtgcaggagtttgtggacaaggaggagaaggatgccatcgaggagctggtgaagtaccagctggagaagacccagcgcttcctgaaggagcggcacattgatgccctggaggacaagattgatgaggaggtgcggcgcttccgggagacccggcagaagaacaccaatgaggaggatgatgaggtgcgggaggccatgacccgggcccgggccctgcggagccagagcgaggagagcgccagcgccttcagcgcagatgacctgatgagcattgacctggccgagcagatggccaatgacagtgatgacagcatctctgctgccaccaacaagggccggggccggggccggggcagaagaggaggccggggccagaacagcgccagcagaggaggcagccagaggggccgggctgacaccggcctggagaccagcaccaggagcaggaacagcaagacagctgtgtctgccagcaggaacatgagcatcattgatgccttcaagagcacccggcagcagcccagcagaaatgtgaccaccaagaactacagcgaggtgattgaggtggatgaaagtgatgtggaggaggacatcttccccaccaccagcaagacagaccagcgctggagcagcaccagcagcagcaagatcatgagccagagccaggtgtccaaaggagtggactttgagagcagtgaagatgatgatgatgaccccttcatgaacaccagcagcctgcggaggaacagaagatag

SEQ ID NO: 157664 - DNA, 2127 bp, Artificial Sequence
  derived and/or modified sequence
atgagcaccgccgacgccctggacgacgagaacaccttcaagatcctggtggctactgatattcacctcggctttatggagaaggatgcagtgaggggcaacgacaccttcgtcacattggacgagattctccgactggcccaggaaaacgaggtggattttatacttctgggtggggatttgttccacgaaaataaaccctcccggaaaacactgcacacctgcctggaacttcttcgcaaatattgcatgggggacaggcccgtacagtttgaaatcctgtctgatcaatcagtaaattttgggttctccaagtttccgtgggtcaactaccaagatggcaatctgaacatcagtattcctgtgttttctatccatgggaaccacgatgaccccacaggcgccgatgcactttgtgctctcgatatcttgagctgtgcaggtttcgtgaaccatttcgggagatcaatgagcgtggagaaaatagacatcagtccagtcctgctacaaaaggggtctacaaaaatagccctctatggcctcgggtcaatcccagatgaacgactataccggatgttcgtgaacaagaaagtcaccatgttacggccaaaagaagacgaaaactcctggtttaatctgtttgtgatccatcaaaatcgctcaaagcacgggtccaccaatttcattccagaacagtttcttgatgactttatagacctcgtgatttggggtcatgaacacgagtgtaaaatagccccgaccaagaatgaacagcaacttttctatatctcccaaccaggaagcagcgtcgtgacatctttatcaccaggggaggcggtgaagaagcacgttgggctgttgagaattaaaggccgcaaaatgaacatgcacaagattcctctgcatacagtccggcaattttttatggaggatatcgtcctggctaatcaccccgatatatttaatcctgacaacccaaaggtaacacaagcaatccaaagtttctgtctggagaaaatcgaggagatgctggagaatgccgagagggagaggctgggaaacagccaccagcccgagaaaccgcttgtccggttgagggtggactactccgggggattcgaacccttcagcgtgctgcgattctcacaaaaattcgtggatcgtgtcgcgaatcccaaagatattattcacttcttcaggcacagggagcaaaaggagaagacaggcgaggagatcaacttcggtaaactaatcacaaaaccctccgaaggcaccactctgagagtggaagacttggtaaagcagtattttcagacggccgagaaaaatgtgcagctgtcacttctcactgagagagggatgggggaggcagtgcaggagtttgtagacaaagaagaaaaggatgccatcgaggaactggttaagtaccagctggaaaaaactcagaggttcctcaaagagcgccacattgacgcactggaggataaaattgatgaagaagttaggaggttccgggaaactaggcagaaaaataccaatgaagaagacgatgaggtaagagaagcaatgacacgagccagagccctccgatcccagtcagaggagtctgcctccgccttctctgccgacgacctgatgagcatcgacctggctgagcagatggcaaacgactccgatgatagtatttcagcagcgacaaacaagggtcggggcagaggaagaggccggcggggcggcagagggcagaacagcgcctcaagaggaggtagccagcgaggtcgcgctgatacgggactggaaacatcaacccgcagccggaactccaagaccgcggtcagtgcttcaaggaatatgtccatcatcgatgcatttaagtcgactcgccagcaacccagccggaacgtgactacaaaaaactattcggaagtcatcgaggtagatgaaagtgatgtggaagaagatatattcccgacgacatccaagaccgaccaaaggtggagttccacaagtagtagtaagatcatgagccagtcccaggtttcaaaaggtgtagacttcgaatcctccgaggacgatgatgacgacccatttatgaatacttccagcctccgtagaaataggagatag

SEQ ID NO: 157665 - DNA, 2136 bp, Artificial Sequence
  derived and/or modified sequence
atgaaccggaacatcagccaccagaagggcgacgacgagaacaccttcaaaatactagtggctaccgatatccacctcgggttcatggagaaggatgccgtcaggggcaacgatacattcgtgacactagatgaaattctgcgcctggctcaggagaatgaggtggactttatcctgctgggaggggatctctttcatgagaacaagcctagtagaaagaccttgcacacttgtctcgagctgctgcgcaaatactgcatgggagatcggccagtacagtttgagattctgtccgaccagagcgttaattttggattctctaaatttccttgggtcaactaccaggatgggaacctgaatatttctatacctgttttttcaatccacggaaaccacgatgaccccaccggcgcggatgctttgtgtgcactggacattctctcttgtgccggatttgtgaaccacttcggccgcagcatgtctgtggagaagatcgatatctcccctgtgcttttacagaagggcagcacaaagattgccctgtacggtctgggaagcatacctgacgaacgtctctatcgcatgttcgtgaataagaaagtcacaatgctgcgccctaaggaggacgaaaatagctggttcaatctttttgtgatccaccaaaatcgctcaaagcatggatcaaccaactttatccccgagcagttcctggatgatttcatcgatctggttatatggggccatgagcatgagtgcaaaattgctcccactaaaaacgagcagcagctgttttatatcagccagcctggctcatccgtggtgactagcttaagccccggcgaagccgtgaagaaacacgtcggtctgctcagaatcaaaggccggaaaatgaacatgcataaaatccccttgcatacggtcaggcagtttttcatggaggatattgtattggcaaaccacccagacatattcaacccagacaatccaaaagtcacccaggcaatccagtctttttgcctagagaagatcgaggagatgctcgagaacgccgaacgcgagagactgggaaactcacaccagcctgaaaagcctctcgtgagactgcgggtggattatagcggcggatttgagcctttttcagttttaaggttttcacagaagtttgtggatcgggtagctaatccaaaagatatcattcacttttttaggcatagggaacaaaaagaaaagactggagaggagatcaacttcggaaagctgattacaaaaccgagcgaaggcacgactctacgggtagaagatctggtgaaacagtatttccagactgccgaaaaaaatgtacagctctctctgctgacagagcgcggcatgggagaggctgtgcaagagttcgtcgacaaggaggaaaaagatgccatagaggaattggtgaagtaccagttggaaaagacccagaggttcctgaaagaacgccatatcgacgctctggaagacaagattgacgaggaagtccgaaggtttagagagaccagacagaaaaatacaaatgaggaggacgatgaagtgcgagaggccatgacacgcgcacgggctttacgcagtcagtccgaagagtcagcatcagcctttagcgccgacgacttaatgtcaatcgatctggcagagcagatggctaacgattccgatgactcgatttccgccgcgacgaacaagggtcgcggtagaggccgaggccggaggggcggcaggggccagaactcggccagccggggtggaagccagcgtggacgcgcagatactggcctggagacgagcactaggtctcgcaacagcaagactgcagtttctgcaagccgaaacatgtccatcatcgacgcctttaaatctacccgacagcagcctagccgtaacgtcacaaccaagaactactccgaggtaatagaagtcgatgaatctgacgtggaggaggacatcttccctacaacatccaaaacagaccaaagatggagctccacgtcttcctccaaaattatgtcccaatctcaggtgtctaaaggcgtcgacttcgagagttccgaagacgacgacgatgatccgtttatgaacacctcaagtctccggcgcaacaggcggtag

SEQ ID NO: 157666 - DNA, 2746 bp, Artificial Sequence
  derived and/or modified sequence
agccaatgagagccgaactggacttgaagcatctacgttatccatgaagtgtcgcgagagaaacggacgccgttctctcccgcggaattcaggtttacggccctgcgggttctcagagaatttctagaatttggaatcgagtgcattttctgacatttgagtacagtacccaggggttcttggagaagaacctggtcccagaggagcttgactgaccataaaaatgagtactgcagatgcacttgatgatgaaaacacatttaaaatattagttgcaacagatattcatcttggatttatggagaaagatgcagtcagaggaaatgatacgtttgtaacactcgatgaaattttaagacttgcccaggaaaatgaagtggattttattttgttaggtggtgatctttttcatgaaaataagccctcaaggaaaacattacatacctgcctcgagttattaagaaaatattgtatgggtgatcggcctgtccagtttgaaattctcagtgatcagtcagtcaactttggttttagtaagtttccatgggtgaactatcaagatggcaacctcaacatttcaattccagtgtttagtattcatggcaatcatgacgatcccacaggggcagatgcactttgtgccttggacattttaagttgtgctggatttgtaaatcactttggacgttcaatgtctgtggagaagatagacattagtccggttttgcttcaaaaaggaagcacaaagattgcgctatatggtttaggatccattccagatgaaaggctctatcgaatgtttgtcaataaaaaagtaacaatgttgagaccaaaggaagatgagaactcttggtttaacttatttgtgattcatcagaacaggagtaaacatggaagtactaacttcattccagaacaatttttggatgacttcattgatcttgttatctggggccatgaacatgagtgtaaaatagctccaaccaaaaatgaacaacagctgttttatatctcacaacctggaagctcagtggttacttctctttccccaggagaagctgtaaagaaacatgttggtttgctgcgtattaaagggaggaagatgaatatgcataaaattcctcttcacacagtgcggcagtttttcatggaggatattgttctagctaatcatccagacatttttaacccagataatcctaaagtaacccaagccatacaaagcttctgtttggagaagattgaagaaatgcttgaaaatgctgaacgggaacgtctgggtaattctcaccagccagagaagcctcttgtacgactgcgagtggactatagtggaggttttgaacctttcagtgttcttcgctttagccagaaatttgtggatcgggtagctaatccaaaagacattatccattttttcaggcatagagaacaaaaggaaaaaacaggagaagagatcaactttgggaaacttatcacaaagccttcagaaggaacaactttaagggtagaagatcttgtaaaacagtactttcaaaccgcagagaagaatgtgcagctctcactgctaacagaaagagggatgggtgaagcagtacaagaatttgtggacaaggaggagaaagatgccattgaggaattagtgaaataccagttggaaaaaacacagcgatttcttaaagaacgtcatattgatgccctcgaagacaaaatcgatgaggaggtacgtcgtttcagagaaaccagacaaaaaaatactaatgaagaagatgatgaagtccgtgaggctatgaccagggccagagcactcagatctcagtcagaggagtctgcttctgcctttagtgctgatgaccttatgagtatagatttagcagaacagatggctaatgactctgatgatagcatctcagcagcaaccaacaaaggaagaggccgaggaagaggtcgaagaggtggaagagggcagaattcagcatcgagaggagggtctcaaagaggaagagcagacactggtctggagacttctacccgtagcaggaactcaaagactgctgtgtcagcatctagaaatatgtctattatagatgcctttaaatctacaagacagcagccttcccgaaatgtcactactaagaattattcagaggtgattgaggtagatgaatcagatgtggaagaagacatttttcctaccacttcaaagacagatcaaaggtggtccagcacatcatccagcaaaatcatgtcccagagtcaagtatcgaaaggggttgattttgaatcaagtgaggatgatgatgatgatccttttatgaacactagttctttaagaagaaatagaagataatatatttaatggcactgagaaacatgcaagatacaggaaaaatgaaaatgttacaagctaagagtttacagtttaagattttaagtattgtttcctgagcataactccataagtaagaaatttctagttcacagacatacaatagcattgattcaccttgtttttttaacctggttgttgtagtaagagctttgtttcaatatcactcttgagtaaagattaaaataaagctaccattttacatttctatttcataatgaaaaactatgtcagtattttaatatggttacatttagccaaagttgagggaaagagcttataaaatttaacttcttcataattttagtaatttcctagaggttctgggttttctgaaagtaaaacaatttatgcgaa

SEQ ID NO: 157667 - DNA, 2684 bp, Artificial Sequence
  derived and/or modified sequence
gacgccgttctctcccgcggaattcaggtttacggccctgcgggttctcagagaatttctagaatttggaatcgagtgcattttctgacatttgagtacagtacccaggggttcttggagaagaacctggtcccagaggagcttgactgaccataaaaatgagtactgcagatgcactgtaagcacctgacttctggaatcccttgttatttggggtttctaaagctcgtcaactgtgatcacagtaaaagaaaacttatttaataagcagtaaataaggaacctgtttatgaacagaaatattagtcatcaaaaaggtgatgatgaaaacacatttaaaatattagttgcaacagatattcatcttggatttatggagaaagatgcagtcagaggaaatgatacgtttgtaacactcgatgaaattttaagacttgcccaggaaaatgaagtggattttattttgttaggtggtgatctttttcatgaaaataagccctcaaggaaaacattacatacctgcctcgagttattaagaaaatattgtatgggtgatcggcctgtccagtttgaaattctcagtgatcagtcagtcaactttggttttagtaagtttccatgggtgaactatcaagatggcaacctcaacatttcaattccagtgtttagtattcatggcaatcatgacgatcccacaggggcagatgcactttgtgccttggacattttaagttgtgctggatttgtaaatcactttggacgttcaatgtctgtggagaagatagacattagtccggttttgcttcaaaaaggaagcacaaagattgcgctatatggtttaggatccattccagatgaaaggctctatcgaatgtttgtcaataaaaaagtaacaatgttgagaccaaaggaagatgagaactcttggtttaacttatttgtgattcatcagaacaggagtaaacatggaagtactaacttcattccagaacaatttttggatgacttcattgatcttgttatctggggccatgaacatgagtgtaaaatagctccaaccaaaaatgaacaacagctgttttatatctcacaacctggaagctcagtggttacttctctttccccaggagaagctgtaaagaaacatgttggtttgctgcgtattaaagggaggaagatgaatatgcataaaattcctcttcacacagtgcggcagtttttcatggaggatattgttctagctaatcatccagacatttttaacccagataatcctaaagtaacccaagccatacaaagcttctgtttggagaagattgaagaaatgcttgaaaatgctgaacgggaacgtctgggtaattctcaccagccagagaagcctcttgtacgactgcgagtggactatagtggaggttttgaacctttcagtgttcttcgctttagccagaaatttgtggatcgggtagctaatccaaaagacattatccattttttcaggcatagagaacaaaaggaaaaaacaggagaagagatcaactttgggaaacttatcacaaagccttcagaaggaacaactttaagggtagaagatcttgtaaaacagtactttcaaaccgcagagaagaatgtgcagctctcactgctaacagaaagagggatgggtgaagcagtacaagaatttgtggacaaggaggagaaagatgccattgaggaattagtgaaataccagttggaaaaaacacagcgatttcttaaagaacgtcatattgatgccctcgaagacaaaatcgatgaggaggtacgtcgtttcagagaaaccagacaaaaaaatactaatgaagaagatgatgaagtccgtgaggctatgaccagggccagagcactcagatctcagtcagaggagtctgcttctgcctttagtgctgatgaccttatgagtatagatttagcagaacagatggctaatgactctgatgatagcatctcagcagcaaccaacaaaggaagaggccgaggaagaggtcgaagaggtggaagagggcagaattcagcatcgagaggagggtctcaaagaggaagagcagacactggtctggagacttctacccgtagcaggaactcaaagactgctgtgtcagcatctagaaatatgtctattatagatgcctttaaatctacaagacagcagccttcccgaaatgtcactactaagaattattcagaggtgattgaggtagatgaatcagatgtggaagaagacatttttcctaccacttcaaagacagatcaaaggtggtccagcacatcatccagcaaaatcatgtcccagagtcaagtatcgaaaggggttgattttgaatcaagtgaggatgatgatgatgatccttttatgaacactagttctttaagaagaaatagaagataatatatttaatggcactgagaaacatgcaagatacaggaaaaatgaaaatgttacaagctaagagtttacagtttaagattttaagtattgtttcctgagcataactccataagtaagaaatttctagttcacagacatacaatagcattgattcaccttgtttttttaacctggttgttgtagtaagagctttgtttcaatatcactcttgagtaaagattaaaataaagctaccattttacatttctatttcataatg

SEQ ID NO: 157668 - DNA, 2127 bp, Artificial Sequence
  derived and/or modified sequence
atgtctacagccgacgctctggacgacgagaatactttcaagatccttgtagccacagacatccatctgggtttcatggagaaagatgccgttcgagggaacgacactttcgtgaccctggacgaaattctccgactggctcaggagaatgaggtggatttcatcttactcggaggagatctattccatgaaaacaagccctcaagaaagactctacacacatgccttgaattgttaagaaaatactgcatgggagaccggcctgtgcagtttgagatcctgtctgatcagtctgtcaattttggattcagtaaatttccttgggttaactaccaggatgggaatctcaacatctctataccagtgttttcaatccatgggaaccacgacgaccccaccggagcggacgccctgtgtgcattggacattctctcatgcgcaggtttcgtcaatcattttggtcggtccatgtctgtcgagaaaatcgacattagccccgtgctgttgcagaaaggctctaccaagattgcgttgtacggtctgggctcaataccggatgaacggctgtaccggatgtttgtgaataagaaagtcacaatgctgaggccaaaagaagacgagaattcttggttcaacctgtttgtgatccaccagaatcgctctaaacacggatcgactaatttcattccagagcagttcttagatgactttatagaccttgtgatctgggggcacgaacacgaatgtaagatcgcacctaccaaaaatgagcagcagctgttctatataagccagcccggttcgtccgtcgtgacttctttatctcctggggaggcagttaaaaagcatgtgggactcctcagaattaaagggcgaaaaatgaatatgcataagattccactgcacacagtcaggcagttttttatggaggacattgtgctggctaatcaccctgatatattcaatccagacaatcccaaagtgacgcaagccatccagtccttttgtttagaaaaaatagaggaaatgcttgagaatgcagagagggagaggctgggcaacagccaccagcccgagaaacccctggtgcggttgagggttgactatagcggaggattcgaacccttctctgtgctccggttcagtcagaagttcgtggatagggtcgcaaatcctaaagacatcatccatttttttaggcaccgggagcaaaaggaaaaaacaggggaagaaatcaactttgggaaactcattacgaaacctagtgagggaacgaccctgagggtcgaggacctcgtcaaacagtatttccaaaccgcagagaaaaacgtgcagctttcgcttttaacggaacgaggcatgggagaagctgtacaggaattcgttgataaggaagagaaggacgcgattgaagaacttgtcaagtaccagctcgagaaaacccagagattcctgaaggagcgccacatagacgccctggaagataagatcgacgaggaggtgcgtagatttagggagacacggcagaagaacactaacgaggaggatgacgaggtccgggaagccatgactcgcgctcgagctctacgcagtcaatcagaggagagtgcgagcgccttttctgccgatgatctgatgtcaatcgatttagccgaacagatggccaacgatagcgacgactccatcagtgcagccaccaacaagggacgcggacgaggaaggggcagaaggggcggtcggggacaaaacagtgccagtagaggcggttcacagcggggacgagccgacactggtttggaaacaagcactcgaagtagaaacagcaagacggccgtgagcgcctctagaaacatgagtatcatcgatgcttttaaaagcacaagacagcagccctcacggaatgtaactacgaaaaactatagtgaggtgatcgaagttgatgagagcgacgtggaagaggatattttccctaccacctccaagacagatcagaggtggtccagtacttcaagttctaagattatgagtcaaagtcaggttagcaaaggcgttgacttcgaatctagtgaagatgacgatgacgatccttttatgaatacatcaagtttaagaagaaacagacgctag

SEQ ID NO: 157669 - DNA, 2136 bp, Artificial Sequence
  derived and/or modified sequence
atgaaccgaaacatctcccaccagaagggggatgacgagaacacattcaagatactggtcgcaactgacatccaccttggatttatggagaaggatgccgtccggggaaacgatacattcgtcaccctggacgaaattctgcgcttggctcaagagaatgaagtagattttattttgctcgggggagatttgttccacgagaacaagccaagtaggaagaccctccacacctgcctcgaactcttgcgcaaatactgcatgggagaccgaccagtgcagtttgaaattctcagtgatcagtccgtcaacttcgggttttctaagtttccttgggtgaactaccaggacggaaatcttaatatcagcataccagtgtttagtattcacggtaatcatgatgaccccactggggctgatgctttatgcgccttggatatactgagctgcgctggcttcgtgaatcactttggcagatcaatgtcagtggaaaaaatagacatctcccccgtactcctccagaagggatcaaccaaaattgctctctatgggctgggatctattcccgacgaaaggctataccggatgttcgtcaataaaaaagtgactatgctgcggccaaaagaagatgagaatagctggttcaatctatttgtgattcatcagaatcggtctaagcacggctctacaaacttcatccccgagcagtttctggacgattttatagatctggtgatctggggacacgaacacgaatgcaaaatagcacccactaagaacgaacagcagctgttttacatctcccagcctggctcatctgttgtcaccagtctaagcccaggcgaagccgtcaagaagcacgttggcctcctgcggattaagggtagaaagatgaacatgcataagattcctctgcataccgtccggcaattcttcatggaggatatagtacttgccaatcaccctgatatttttaacccagataatcccaaagtcacccaagccatccagagcttttgtctggagaagatcgaggagatgctggagaacgcggagagagagcggctgggcaactctcatcagcccgaaaaacccctggtcagattacgagtcgattattccgggggatttgaacctttctcggtactgagattctcccagaaattcgtcgaccgagtggcgaatccaaaagacatcattcattttttccggcatagggaacaaaaggaaaagacaggcgaagagatcaatttcggcaagctcataactaagccttccgaaggaactaccctgagagtggaggatcttgtcaaacaatacttccaaactgcggagaaaaacgtccagcttagcctgcttaccgagcgcggtatgggggaagccgtgcaggagtttgtcgataaggaagagaaggatgccatcgaagagcttgtcaagtatcagctggaaaagacccaacggtttctcaaagagcggcacattgatgccctggaggataagattgatgaggaagtcagaaggttccgggaaactaggcagaaaaataccaacgaagaggacgacgaggtccgcgaagctatgacccgggctagagccctgcggtcccaatctgaggaaagcgctagcgctttctccgctgatgatctgatgtctattgacttggccgaacagatggctaatgattctgacgatagcatcagcgcagcaaccaataagggcagaggcaggggtagggggagacggggtggcagaggtcaaaattctgcctcaaggggcggttcacaaagaggcagggctgacaccggtttggagacatcgacgagatctcgtaactcgaaaaccgctgtcagtgcttcccggaatatgagcattatagatgcattcaagtccacaagacaacagccaagcagaaacgttacgaccaagaactacagcgaagtgattgaggtggacgaaagtgacgtggaagaggacatctttcccaccaccagcaagacggatcagagatggagctccacaagctcatctaaaataatgtcccagtcgcaggtgagtaaaggcgtcgatttcgagtcttctgaagatgatgatgatgaccccttcatgaacactagttccctgcgtcgtaacagaagatag

SEQ ID NO: 157670 - protein, 875 aa, Artificial Sequence
  derived and/or modified sequence
MRELVNIPLVHILTLVAFSGTEKLPKAPVITTPLETVDALVEEVATFMCAVESYPQPEISWTRNKILIKLFDTRYSIRENGQLLTILSVEDSDDGIYCCTANNGVGGAVESCGALQVKMKPKITRPPINVKIIEGLKAVLPCTTMGNPKPSVSWIKGDSPLRENSRIAVLESGSLRIHNVQKEDAGQYRCVAKNSLGTAYSKVVKLEVEVFARILRAPESHNVTFGSFVTLHCTATGIPVPTITWIENGNAVSSGSIQESVKDRVIDSRLQLFITKPGLYTCIATNKHGEKFSTAKAAATISIAEMLFISSFSKPQKDNKGYCAQYRGEVCNAVLAKDALVFLNTSYADPEEAQELLVHTAWNELKVVSPVCRPAAEALLCNHIFQECSPGVVPTPIPICREYCLAVKELFCAKEWLVMEEKTHRGLYRSEMHLLSVPECSKLPSMHWDPTACARLPHLDYNKENLKTFPPMTSSKPSVDIPNLPSSSSSSFSVSPTYSMTVIISIMSSFAIFVLLTITTLYCCRRRKQWKNKKRESAAVTLTTLPSELLLDRLHPNPMYQRMPLLLNPKLLSLEYPRNNIEYVRDIGEGAFGRVFQARAPGLLPYEPFTMVAVKMLKEEASADMQADFQREAALMAEFDNPNIVKLLGVCAVGKPMCLLFEYMAYGDLNEFLRSMSPHTVCSLSHSDLSMRAQVSSPGPPPLSCAEQLCIARQVAAGMAYLSERKFVHRDLATRNCLVGENMVVKIADFGLSRNIYSADYYKANENDAIPIRWMPPESIFYNRYTTESDVWAYGVVLWEIFSYGLQPYYGMAHEEVIYYVRDGNILSCPENCPVELYNLMRLCWSKLPADRPSFTSIHRILERMCERAEGTVSV

SEQ ID NO: 157671 - protein, 869 aa, Artificial Sequence
  derived and/or modified sequence
MRELVNIPLVHILTLVAFSGTEKLPKAPVITTPLETVDALVEEVATFMCAVESYPQPEISWTRNKILIKLFDTRYSIRENGQLLTILSVEDSDDGIYCCTANNGVGGAVESCGALQVKMKPKITRPPINVKIIEGLKAVLPCTTMGNPKPSVSWIKGDSPLRENSRIAVLESGSLRIHNVQKEDAGQYRCVAKNSLGTAYSKVVKLEVEVFARILRAPESHNVTFGSFVTLHCTATGIPVPTITWIENGNAVSSGSIQESVKDRVIDSRLQLFITKPGLYTCIATNKHGEKFSTAKAAATISIAEWSKPQKDNKGYCAQYRGEVCNAVLAKDALVFLNTSYADPEEAQELLVHTAWNELKVVSPVCRPAAEALLCNHIFQECSPGVVPTPIPICREYCLAVKELFCAKEWLVMEEKTHRGLYRSEMHLLSVPECSKLPSMHWDPTACARLPHLDYNKENLKTFPPMTSSKPSVDIPNLPSSSSSSFSVSPTYSMTVIISIMSSFAIFVLLTITTLYCCRRRKQWKNKKRESAAVTLTTLPSELLLDRLHPNPMYQRMPLLLNPKLLSLEYPRNNIEYVRDIGEGAFGRVFQARAPGLLPYEPFTMVAVKMLKEEASADMQADFQREAALMAEFDNPNIVKLLGVCAVGKPMCLLFEYMAYGDLNEFLRSMSPHTVCSLSHSDLSMRAQVSSPGPPPLSCAEQLCIARQVAAGMAYLSERKFVHRDLATRNCLVGENMVVKIADFGLSRNIYSADYYKANENDAIPIRWMPPESIFYNRYTTESDVWAYGVVLWEIFSYGLQPYYGMAHEEVIYYVRDGNILSCPENCPVELYNLMRLCWSKLPADRPSFTSIHRILERMCERAEGTVSV

SEQ ID NO: 157672 - protein, 869 aa, Artificial Sequence
  derived and/or modified sequence
MRELVNIPLVHILTLVAFSGTEKLPKAPVITTPLETVDALVEEVATFMCAVESYPQPEISWTRNKILIKLFDTRYSIRENGQLLTILSVEDSDDGIYCCTANNGVGGAVESCGALQVKMKPKITRPPINVKIIEGLKAVLPCTTMGNPKPSVSWIKGDSPLRENSRIAVLESGSLRIHNVQKEDAGQYRCVAKNSLGTAYSKVVKLEVEVFARILRAPESHNVTFGSFVTLHCTATGIPVPTITWIENGNAVSSGSIQESVKDRVIDSRLQLFITKPGLYTCIATNKHGEKFSTAKAAATISIAAFSKPQKDNKGYCAQYRGEVCNAVLAKDALVFLNTSYADPEEAQELLVHTAWNELKVVSPVCRPAAEALLCNHIFQECSPGVVPTPIPICREYCLAVKELFCAKEWLVMEEKTHRGLYRSEMHLLSVPECSKLPSMHWDPTACARLPHLDYNKENLKTFPPMTSSKPSVDIPNLPSSSSSSFSVSPTYSMTVIISIMSSFAIFVLLTITTLYCCRRRKQWKNKKRESAAVTLTTLPSELLLDRLHPNPMYQRMPLLLNPKLLSLEYPRNNIEYVRDIGEGAFGRVFQARAPGLLPYEPFTMVAVKMLKEEASADMQADFQREAALMAEFDNPNIVKLLGVCAVGKPMCLLFEYMAYGDLNEFLRSMSPHTVCSLSHSDLSMRAQVSSPGPPPLSCAEQLCIARQVAAGMAYLSERKFVHRDLATRNCLVGENMVVKIADFGLSRNIYSADYYKANENDAIPIRWMPPESIFYNRYTTESDVWAYGVVLWEIFSYGLQPYYGMAHEEVIYYVRDGNILSCPENCPVELYNLMRLCWSKLPADRPSFTSIHRILERMCERAEGTVSV

SEQ ID NO: 157673 - DNA, 2628 bp, Artificial Sequence
  derived and/or modified sequence
atgagagagctagtgaacatccctttggtccatatcctgacactggttgcttttagtggtactgaaaagctgcctaaggcacctgttatcaccaccccactcgagacagttgatgcccttgtcgaagaggtagccacgtttatgtgtgccgtcgaaagctatccgcagcctgagatatcctggactcgcaacaaaatactgatcaaactttttgacacacggtactccattcgcgaaaatgggcaactgcttaccatcctaagtgttgaggacagcgacgatgggatttattgctgtacagctaacaacggagtcgggggagcggttgagagttgtggcgccctgcaggtcaaaatgaaacctaaaattacccggcctcccattaacgttaaaatcattgaagggcttaaggctgtgctgccttgcactacaatggggaaccccaagccgtccgtcagctggataaagggcgattccccattacgagaaaatagccgaattgcagtgctggaatcaggctccctccggatccacaatgtccagaaggaggacgcaggacaatatcggtgcgttgccaagaattctctgggcaccgcatacagcaaggttgtcaagctggaagtggaagtgttcgcgcggatcctccgagcgccagaaagccataacgtcacttttgggtcctttgtgacccttcattgtaccgcgactgggatacctgttccgaccatcacatggattgagaatggaaacgcggtttcatcaggatccatccaggagtccgttaaagatcgcgtcatagacagtaggttacaattgtttattaccaagcccggtctttatacttgtattgcgactaacaagcacggggaaaaattcagcacagctaaagctgcggcaaccatctcgatcgctgaaatgcttttcatcagcagcttttctaaaccacaaaaagataataagggctattgcgcacagtaccgcggggaggtctgtaatgcagttctcgccaaagatgccctggtctttcttaatacgtcatatgccgacccagaggaagcacaggagctgttggtccacacagcctggaatgagctgaaagtggtatctcccgtgtgccgccctgccgccgaagctttactgtgcaaccacatctttcaagagtgctcccccggggtggttcctactcctattcctatctgtcgagaatattgtctggccgttaaagagctcttctgtgcaaaagagtggctggtgatggaagaaaaaactcacagaggcctctatcgcagcgagatgcatctgctgagcgtgcccgaatgctccaagctgccaagcatgcactgggacccaactgcttgcgctcggttgccgcatctggattataataaagagaatctaaaaacattccctcccatgacgtcaagtaaacccagcgtggacatcccgaatctaccttcctcttcaagctcgtctttcagcgtcagtcccacctactcaatgaccgtgataatttcaattatgtcgagtttcgccatctttgtgctgctcacgatcactaccctgtactgctgccgcaggcgaaagcaatggaaaaacaagaaacgtgaaagcgcggctgttactcttaccaccctgccttcagagctcctgttagacaggctgcacccaaacccaatgtaccagagaatgccattactgctgaaccccaagctcctctctttagaatacccacgcaacaacattgagtatgtccgcgatatcggtgagggcgcgttcggccgagttttccaggcaagagcccctggactacttccctatgagccctttactatggtggccgtcaaaatgcttaaggaggaagcctcagccgacatgcaagccgacttccaaagagaggctgcccttatggcagaattcgataatccaaacattgtgaagcttctaggcgtgtgtgccgtggggaaaccaatgtgcctgctcttcgaatatatggcctacggcgatctgaacgaattcctgcgatcaatgtcaccacacactgtgtgttctctcagtcattccgatttaagcatgagagcccaggtgtcatcacccggaccccctccactgtcttgcgctgagcagctgtgcattgcaaggcaagtggccgccggcatggcctacttatcggaacgaaaattcgtacaccgagacctggcaacaaggaactgcctagtaggtgagaatatggtcgtcaagatcgcagattttgggcttagcagaaatatttatagcgctgattactacaaggctaatgagaatgatgcgattcccatacgatggatgcctcctgagagtatcttttataatcggtataccacggagagcgacgtgtgggcctacggagtcgtattgtgggagatattcagttatggactccaaccatattatggaatggctcacgaagaagtcatttattatgtccgggatggtaatatactgtcttgccctgaaaattgtcctgtcgaactttacaacttaatgcgtctctgctggtccaaactgccagcagaccgcccttcgttcacctccatccataggattctcgagaggatgtgtgaacgcgcggaaggtactgtgtctgtgtag

SEQ ID NO: 157674 - DNA, 2610 bp, Artificial Sequence
  derived and/or modified sequence
atgagggaactggtaaacatcccactggtccacatcctgacgcttgtagctttttccgggactgagaagctgcccaaagcaccagtcatcacaacgcccttagaaaccgtagacgcgctggtggaggaggtggcaacattcatgtgcgccgtcgagagttatccacagccggagatctcgtggacacgtaacaagatcctgatcaaattgtttgacacacggtactctattagagagaatggccaactgttgactattctgtcagtcgaagactctgacgatggaatttattgttgtacggccaataacggagttggtggcgcagttgagagctgcggtgccttgcaggtgaaaatgaagccgaaaatcactcggcctcctatcaacgttaaaattattgagggcctgaaggcagtgctgccatgtactaccatgggcaatcctaagccatctgtttcgtggataaagggcgactcccctctcagggagaattcgcgcattgccgtgctcgaatctggatccttgcgcattcacaatgtgcaaaaggaagacgctggccagtatcggtgcgtcgcaaagaactcacttgggactgcctactccaaggtggtaaagctggaggtcgaggtttttgcccggattctcagggcgcctgagagccataacgtaactttcggctctttcgtcacccttcactgcacggcaaccgggattccggtcccgaccatcacatggatcgagaatgggaacgccgtgagcagtgggtcgattcaagagtcagttaaggacagagtgatcgactcgcgcctgcagctgtttatcaccaagccaggactctacacctgcatcgctactaataaacacggggagaaatttagcacagctaaggccgctgcgactatctccatagccgagtggtcaaagcctcaaaaggataataaaggctactgcgcacagtacagaggggaggtatgtaatgcagtgctggcaaaagacgctttggtctttctgaacactagctatgcagaccccgaggaggcacaggagcttctagttcacaccgcctggaacgagctgaaagtggtatctccggtctgtaggcccgctgcggaggccctgctgtgtaaccacattttccaggaatgctctccgggtgttgtccccacacctatcccaatttgccgagaatactgtcttgcagtcaaggaactgttctgcgctaaggaatggctggtgatggaggaaaaaacacataggggcttgtatcgttctgagatgcatctgctgtctgttccagaatgcagcaaactgccctcaatgcactgggaccccacagcctgtgcgcgactcccacatctggattacaataaggaaaatctgaagacttttccaccaatgaccagctccaaaccctcagtcgatattccaaatctccctagcagtagttcttccagtttctctgtatcacctacatactctatgaccgttatcatttccattatgtcgtccttcgctatttttgtgcttttgactattaccactttatattgctgtcgtaggaggaaacagtggaagaacaagaaacgagaatctgctgcagtgacattgaccacactgccatctgaacttcttctggacagacttcatccgaaccctatgtaccagaggatgcctttattgctcaatcccaaactgctgtcgctggaatatcctcgaaacaatattgagtacgtaagagacatcggggagggagcatttgggagagtatttcaggctagggcacccggtttgctcccctatgagcccttcactatggttgccgtgaaaatgttaaaggaagaagcctccgcagatatgcaggcagatttccagagagaggcagccctcatggccgagtttgacaatcccaacattgtaaaactactgggagtgtgtgccgttggtaaacctatgtgtctgcttttcgaatacatggcctacggggacttaaatgaatttctgagatcaatgtcccctcacaccgtctgtagtctttctcactctgatctgagcatgagagcccaagtgagctctccaggacccccccccctttcttgcgctgagcagttgtgcatcgctaggcaggtcgcagccggcatggcttacctgagcgaacgaaaattcgtgcaccgggatctcgctaccaggaactgcttggtgggagagaacatggtggtgaaaatcgcggatttcggcctgagcagaaatatctacagcgccgactattataaggcgaacgaaaatgatgctattccgataagatggatgcctcctgagtctatcttttacaacaggtacaccactgagagcgatgtatgggcctacggtgttgtgctttgggagatctttagctatggtctgcagccctactatggtatggcccacgaagaagtgatctactacgtccgcgatggcaatatcctcagttgccctgaaaattgccccgtggaattatataatcttatgcgattgtgctggtcaaaactgcctgccgacaggccatccttcactagcatccaccgcatcttggaacggatgtgtgagagggcggaagggaccgtatccgtctag

SEQ ID NO: 157675 - DNA, 2610 bp, Artificial Sequence
  derived and/or modified sequence
atgcgtgaactcgtcaatattccccttgttcatatcctcacactcgtagctttctccgggaccgagaagcttccgaaagctccagtcattacaacgccattggagacagttgatgcgttagtagaagaggtagccactttcatgtgcgcggtagaatcatatcctcagcctgagatcagttggacacggaacaagatcctgatcaaactttttgacacccggtattcaatccgagagaacggtcagttactaaccatactgtccgtcgaggattcggatgatggtatctactgctgtaccgctaataatggcgtgggcggagccgtggagagctgtggcgctctccaagtgaagatgaaacccaaaatcactcgcccacccatcaacgtgaagatcattgaggggctcaaggccgtgctgccatgtacaactatgggcaatcctaagccatccgtttcgtggattaagggcgactcacccctccgggagaattctcgtatcgctgtgctagagagtggctccctgaggatccataatgtgcagaaagaggatgccgggcagtacagatgcgtcgcgaagaattccctcgggacagcttatagcaaagtagtcaagttggaggtggaagtgttcgctcgtattctccgcgcaccagagtcccacaatgtcacattcggctcattcgtcaccctgcactgcactgccaccggcattccagtgccaacaatcacctggatagagaacgggaacgctgtctcaagcggaagcatacaggagtcagttaaagatcgcgtcattgattctagactccagttgtttataactaaaccgggactttatacctgcattgccactaataagcatggagagaaattttccaccgcaaaagctgctgcgactataagtatcgccgcattttctaagccccagaaggataacaagggctactgtgcacaatacaggggagaggtatgtaacgctgttctcgcaaaggatgcactcgtgttcctcaacacgtcctatgcagaccccgaggaggcacaggagctgctggtgcacacagcttggaatgagctcaaggtggtctcacccgtctgtagaccagccgccgaagccctgctttgtaaccatatcttccaagagtgttctcccggtgtagtcccaaccccaattcccatttgtcgggagtactgcctggcggtgaaggagctcttttgcgcgaaggagtggctggtcatggaggaaaaaactcacaggggcttgtaccgatccgagatgcatttgctgtccgtgcccgagtgtagtaagctgccatcaatgcattgggatcccaccgcctgcgcccgattgccccaccttgactacaataaagagaacctcaagacttttcccccaatgacctcatctaagccatcggtggacatcccaaacctccccagctccagcagctcttctttttctgttagtcctacatacagcatgaccgttatcatcagcatcatgtctagcttcgcaatctttgtgctgctaaccatcactactctgtactgctgtcgtcgtcgtaaacagtggaagaataagaaacgtgaatccgcggctgtaacactcactaccttgccttctgaactcctgttggatagactccacccaaatccaatgtaccagagaatgccccttctgctgaaccctaagctgttgtccctggaatacccccgcaataacattgagtatgtgcgcgacattggtgagggggctttcggtcgggtgttccaggcaagagcacccggactgctcccatacgagcctttcaccatggtcgctgtcaagatgctcaaagaagaggccagtgccgacatgcaggcagattttcaacgtgaggcagccctgatggccgaattcgacaaccctaatatcgttaagttgttaggggtgtgtgccgtgggcaagcccatgtgtcttctgttcgaatatatggcttatggcgatttgaacgagttcctccgctctatgtcaccccacactgtctgctccctgagccactccgacctcagcatgagggctcaggtgtcctctcccggaccgccacctctctcttgtgccgagcagctctgcatcgctcgacaggttgctgctgggatggcatacttaagtgagagaaagttcgttcatcgtgacttagccacccgtaattgcctggtcggcgaaaatatggtggtgaagatagctgatttcgggctgtctcggaatatctactccgccgactattacaaagccaatgagaacgatgccatcccaatcaggtggatgccccctgagagcatcttttacaatagatataccacagagtcggacgtttgggcttacggagttgtgctttgggaaatattctcctacggtctacagccctactacggcatggcacatgaggaggtgatctattatgtgcgcgatgggaatatcctgagttgtcctgagaattgtcctgtggaactgtataacctcatgagattatgttggagtaaactccctgctgatagaccatccttcaccagtatccaccgcatcctcgagcgcatgtgtgaaagagctgaggggaccgtttcagtctag

SEQ ID NO: 157676 - DNA, 2628 bp, Artificial Sequence
  derived and/or modified sequence
atgagggagctggtgaacatccccctggtgcacatcctgaccctggtggccttctctggaacagagaagctgcccaaggcccctgtgatcaccacccccctggagaccgtggatgccctggtggaggaggtggccaccttcatgtgtgctgtggagagctacccccagcctgagatctcctggaccaggaacaagatcctgatcaagctgtttgacacccgctacagcatcagagaaaatggccagctgctgaccatcctgtctgtggaggacagtgatgatggcatctactgctgcacagccaacaatggagtgggcggcgctgtggagagctgtggggccctgcaggtgaagatgaagcccaagatcacccggccccccatcaacgtgaagatcatcgagggcctgaaggctgtgctgccctgcaccaccatgggcaaccccaagcccagcgtgtcctggatcaagggggacagccccctgcgggagaacagcagaattgctgtgctggagagcggcagcctgcgcatccacaacgtgcagaaggaggatgctggccagtaccgctgtgtggccaagaacagcctgggcacagcctacagcaaggtggtgaagctggaggtggaggtgtttgcccgcatcctgcgggcccctgagagccacaacgtgaccttcggcagctttgtgaccctgcactgcacagccaccggcatccctgtgcccaccatcacctggattgaaaatggaaatgctgtgagcagcggcagcatccaggagagcgtgaaggacagagtcatcgacagccggctgcagctgttcatcaccaagccaggcctgtacacctgcatcgccaccaacaagcacggggagaagttcagcacagccaaggccgccgccaccatcagcattgctgagatgctgttcatcagcagcttcagcaagccccagaaggacaacaagggctactgtgcccagtacagaggagaggtgtgcaatgctgtgctggccaaggatgccctggtgttcctgaacaccagctatgctgaccctgaggaggcccaggagctgctggtgcacacagcctggaatgagctgaaggtggtgtcccctgtgtgcaggcctgctgctgaggccctgctgtgcaaccacatcttccaggagtgcagccctggggtggtgcccacccccatccccatctgccgggagtactgcctggccgtgaaggagctgttctgtgccaaggagtggctggtgatggaggagaagacccaccggggcctgtacagaagtgagatgcacctgctgtctgtgcctgaatgttccaagctgcccagcatgcactgggaccccacagcctgtgcccggctgccccacctggactacaacaaggagaacctgaagaccttcccccccatgaccagcagcaagcccagcgtggacatccccaacctgcccagcagcagcagcagcagcttctctgtgagccccacctacagcatgaccgtcatcatcagcatcatgagcagctttgccatctttgtgctgctgaccatcaccaccctgtactgctgcagaagaaggaagcagtggaagaacaagaagcgggagagcgctgctgtgaccctgaccaccctgcccagcgagctgctgctggaccggctgcaccccaaccccatgtaccagaggatgcccctgctgctgaaccccaagctgctgagcctggagtaccccaggaacaacattgaatatgtgcgggacattggagagggcgccttcggccgggtcttccaggcccgggcccctggcctgctgccctatgagcccttcaccatggtggccgtgaagatgctgaaggaggaggccagcgctgacatgcaggccgacttccagcgggaggccgccctgatggccgagtttgacaaccccaacatcgtgaagctgctgggcgtgtgtgctgtgggcaagcccatgtgcctgctgtttgagtacatggcctacggggacctgaatgagttcctgcgctccatgagcccccacacagtgtgcagcctgagccacagcgacctgtccatgagggcccaggtgagcagccctggccccccacccctgagctgtgccgagcagctgtgcatcgcccggcaggtggccgccggcatggcctacctgtctgagaggaagtttgtgcaccgggacctggccaccaggaactgcctggtgggggagaacatggtggtgaagattgctgactttggcctgagcaggaacatctacagcgctgactactacaaggccaatgaaaatgatgccatccccatccgctggatgcctcctgagagcatcttctacaaccgctacaccacagaaagtgatgtgtgggcctacggcgtggtgctgtgggagatcttctcctatggcctgcagccctactacggcatggcccacgaggaggtgatctactacgtgagagatggcaacatcctgagctgcccagagaactgccctgtggagctgtacaacctgatgaggctgtgctggagcaagctgcctgctgaccggcccagcttcaccagcatccaccgcatcctggagaggatgtgtgaaagagctgagggcaccgtgtctgtgtag

SEQ ID NO: 157677 - DNA, 2610 bp, Artificial Sequence
  derived and/or modified sequence
atgagggagctggtgaacatccccctggtgcacatcctgaccctggtggccttctctggaacagagaagctgcccaaggcccctgtgatcaccacccccctggagaccgtggatgccctggtggaggaggtggccaccttcatgtgtgctgtggagagctacccccagcctgagatctcctggaccaggaacaagatcctgatcaagctgtttgacacccgctacagcatcagagaaaatggccagctgctgaccatcctgtctgtggaggacagtgatgatggcatctactgctgcacagccaacaatggagtgggcggcgctgtggagagctgtggggccctgcaggtgaagatgaagcccaagatcacccggccccccatcaacgtgaagatcatcgagggcctgaaggctgtgctgccctgcaccaccatgggcaaccccaagcccagcgtgtcctggatcaagggggacagccccctgcgggagaacagcagaattgctgtgctggagagcggcagcctgcgcatccacaacgtgcagaaggaggatgctggccagtaccgctgtgtggccaagaacagcctgggcacagcctacagcaaggtggtgaagctggaggtggaggtgtttgcccgcatcctgcgggcccctgagagccacaacgtgaccttcggcagctttgtgaccctgcactgcacagccaccggcatccctgtgcccaccatcacctggattgaaaatggaaatgctgtgagcagcggcagcatccaggagagcgtgaaggacagagtcatcgacagccggctgcagctgttcatcaccaagccaggcctgtacacctgcatcgccaccaacaagcacggggagaagttcagcacagccaaggccgccgccaccatcagcattgctgagtggagcaagccccagaaggacaacaagggctactgtgcccagtacagaggagaggtgtgcaatgctgtgctggccaaggatgccctggtgttcctgaacaccagctatgctgaccctgaggaggcccaggagctgctggtgcacacagcctggaatgagctgaaggtggtgtcccctgtgtgcaggcctgctgctgaggccctgctgtgcaaccacatcttccaggagtgcagccctggggtggtgcccacccccatccccatctgccgggagtactgcctggccgtgaaggagctgttctgtgccaaggagtggctggtgatggaggagaagacccaccggggcctgtacagaagtgagatgcacctgctgtctgtgcctgaatgttccaagctgcccagcatgcactgggaccccacagcctgtgcccggctgccccacctggactacaacaaggagaacctgaagaccttcccccccatgaccagcagcaagcccagcgtggacatccccaacctgcccagcagcagcagcagcagcttctctgtgagccccacctacagcatgaccgtcatcatcagcatcatgagcagctttgccatctttgtgctgctgaccatcaccaccctgtactgctgcagaagaaggaagcagtggaagaacaagaagcgggagagcgctgctgtgaccctgaccaccctgcccagcgagctgctgctggaccggctgcaccccaaccccatgtaccagaggatgcccctgctgctgaaccccaagctgctgagcctggagtaccccaggaacaacattgaatatgtgcgggacattggagagggcgccttcggccgggtcttccaggcccgggcccctggcctgctgccctatgagcccttcaccatggtggccgtgaagatgctgaaggaggaggccagcgctgacatgcaggccgacttccagcgggaggccgccctgatggccgagtttgacaaccccaacatcgtgaagctgctgggcgtgtgtgctgtgggcaagcccatgtgcctgctgtttgagtacatggcctacggggacctgaatgagttcctgcgctccatgagcccccacacagtgtgcagcctgagccacagcgacctgtccatgagggcccaggtgagcagccctggccccccacccctgagctgtgccgagcagctgtgcatcgcccggcaggtggccgccggcatggcctacctgtctgagaggaagtttgtgcaccgggacctggccaccaggaactgcctggtgggggagaacatggtggtgaagattgctgactttggcctgagcaggaacatctacagcgctgactactacaaggccaatgaaaatgatgccatccccatccgctggatgcctcctgagagcatcttctacaaccgctacaccacagaaagtgatgtgtgggcctacggcgtggtgctgtgggagatcttctcctatggcctgcagccctactacggcatggcccacgaggaggtgatctactacgtgagagatggcaacatcctgagctgcccagagaactgccctgtggagctgtacaacctgatgaggctgtgctggagcaagctgcctgctgaccggcccagcttcaccagcatccaccgcatcctggagaggatgtgtgaaagagctgagggcaccgtgtctgtgtag

SEQ ID NO: 157678 - DNA, 2610 bp, Artificial Sequence
  derived and/or modified sequence
atgagggagctggtgaacatccccctggtgcacatcctgaccctggtggccttctctggaacagagaagctgcccaaggcccctgtgatcaccacccccctggagaccgtggatgccctggtggaggaggtggccaccttcatgtgtgctgtggagagctacccccagcctgagatctcctggaccaggaacaagatcctgatcaagctgtttgacacccgctacagcatcagagaaaatggccagctgctgaccatcctgtctgtggaggacagtgatgatggcatctactgctgcacagccaacaatggagtgggcggcgctgtggagagctgtggggccctgcaggtgaagatgaagcccaagatcacccggccccccatcaacgtgaagatcatcgagggcctgaaggctgtgctgccctgcaccaccatgggcaaccccaagcccagcgtgtcctggatcaagggggacagccccctgcgggagaacagcagaattgctgtgctggagagcggcagcctgcgcatccacaacgtgcagaaggaggatgctggccagtaccgctgtgtggccaagaacagcctgggcacagcctacagcaaggtggtgaagctggaggtggaggtgtttgcccgcatcctgcgggcccctgagagccacaacgtgaccttcggcagctttgtgaccctgcactgcacagccaccggcatccctgtgcccaccatcacctggattgaaaatggaaatgctgtgagcagcggcagcatccaggagagcgtgaaggacagagtcatcgacagccggctgcagctgttcatcaccaagccaggcctgtacacctgcatcgccaccaacaagcacggggagaagttcagcacagccaaggccgccgccaccatcagcattgctgccttcagcaagccccagaaggacaacaagggctactgtgcccagtacagaggagaggtgtgcaatgctgtgctggccaaggatgccctggtgttcctgaacaccagctatgctgaccctgaggaggcccaggagctgctggtgcacacagcctggaatgagctgaaggtggtgtcccctgtgtgcaggcctgctgctgaggccctgctgtgcaaccacatcttccaggagtgcagccctggggtggtgcccacccccatccccatctgccgggagtactgcctggccgtgaaggagctgttctgtgccaaggagtggctggtgatggaggagaagacccaccggggcctgtacagaagtgagatgcacctgctgtctgtgcctgaatgttccaagctgcccagcatgcactgggaccccacagcctgtgcccggctgccccacctggactacaacaaggagaacctgaagaccttcccccccatgaccagcagcaagcccagcgtggacatccccaacctgcccagcagcagcagcagcagcttctctgtgagccccacctacagcatgaccgtcatcatcagcatcatgagcagctttgccatctttgtgctgctgaccatcaccaccctgtactgctgcagaagaaggaagcagtggaagaacaagaagcgggagagcgctgctgtgaccctgaccaccctgcccagcgagctgctgctggaccggctgcaccccaaccccatgtaccagaggatgcccctgctgctgaaccccaagctgctgagcctggagtaccccaggaacaacattgaatatgtgcgggacattggagagggcgccttcggccgggtcttccaggcccgggcccctggcctgctgccctatgagcccttcaccatggtggccgtgaagatgctgaaggaggaggccagcgctgacatgcaggccgacttccagcgggaggccgccctgatggccgagtttgacaaccccaacatcgtgaagctgctgggcgtgtgtgctgtgggcaagcccatgtgcctgctgtttgagtacatggcctacggggacctgaatgagttcctgcgctccatgagcccccacacagtgtgcagcctgagccacagcgacctgtccatgagggcccaggtgagcagccctggccccccacccctgagctgtgccgagcagctgtgcatcgcccggcaggtggccgccggcatggcctacctgtctgagaggaagtttgtgcaccgggacctggccaccaggaactgcctggtgggggagaacatggtggtgaagattgctgactttggcctgagcaggaacatctacagcgctgactactacaaggccaatgaaaatgatgccatccccatccgctggatgcctcctgagagcatcttctacaaccgctacaccacagaaagtgatgtgtgggcctacggcgtggtgctgtgggagatcttctcctatggcctgcagccctactacggcatggcccacgaggaggtgatctactacgtgagagatggcaacatcctgagctgcccagagaactgccctgtggagctgtacaacctgatgaggctgtgctggagcaagctgcctgctgaccggcccagcttcaccagcatccaccgcatcctggagaggatgtgtgaaagagctgagggcaccgtgtctgtgtag

SEQ ID NO: 157679 - DNA, 2772 bp, Artificial Sequence
  derived and/or modified sequence
gtggagctgctgacacaaacagtcattagcagacaacccttttgcaacaaagtatgctttaaaatgtaaactgtggagccattttccttgcgttgtccagaaggaacttcgtcctgcgtgagcctggattaatcatgagagagctcgtcaacattccactggtacatattcttactctggttgccttcagcggaactgagaaacttccaaaagctcctgtcatcaccactcctcttgaaacagtggatgccttagttgaagaagtggctactttcatgtgtgcagtggaatcctacccccagcctgagatttcctggactagaaataaaattctcattaaactctttgacacccggtacagcatccgggagaatgggcagctcctcaccatcctgagtgtggaagacagtgatgatggcatttactgctgcacggccaacaatggtgtgggaggagctgtggagagttgtggagccctgcaagtgaagatgaaacctaaaataactcgtcctcccataaatgtgaaaataatagagggattaaaagcagtcctaccatgtactacaatgggtaatcccaaaccatcagtgtcttggataaagggagacagccctctcagggaaaattcccgaattgcagttcttgaatctgggagcttgaggattcataacgtacaaaaggaagatgcaggacagtatcgatgtgtggcaaaaaacagcctcgggacagcatattccaaagtggtgaagctggaagttgaggtttttgccaggatcctgcgggctcctgaatcccacaatgtcacctttggctcctttgtgaccctgcactgtacagcaacaggcattcctgtccccaccatcacctggattgaaaacggaaatgctgtttcttctgggtccattcaagagagtgtgaaagaccgagtgattgactcaagactgcagctgtttatcaccaagccaggactctacacatgcatagctaccaataagcatggggagaagttcagtactgccaaggctgcagccaccatcagcatagcagaaatgttgttcatttcttctttcagtaaaccacagaaagataacaaaggctactgcgcccagtacagaggggaggtgtgtaatgcagtcctggcaaaagatgctcttgtttttctcaacacctcctatgcggaccctgaggaggcccaagagctactggtccacacggcctggaatgaactgaaagtagtgagcccagtctgccggccagctgctgaggctttgttgtgtaaccacatcttccaggagtgcagtcctggagtagtgcctactcctattcccatttgcagagagtactgcttggcagtaaaggagctcttctgcgcaaaagaatggctggtaatggaagagaagacccacagaggactctacagatccgagatgcatttgctgtccgtgccagaatgcagcaagcttcccagcatgcattgggaccccacggcctgtgccagactgccacatctagattataacaaagaaaacctaaaaacattcccaccaatgacgtcctcaaagccaagtgtggacattccaaatctgccttcctcctcctcttcttccttctctgtctcacctacatactccatgactgtaataatctccatcatgtccagctttgcaatatttgtgcttcttaccataactactctctattgctgccgaagaagaaaacaatggaaaaataagaaaagagaatcagcagcagtaaccctcaccacactgccttctgagctcttactagatagacttcatcccaaccccatgtaccagaggatgccgctccttctgaaccccaaattgctcagcctggagtatccaaggaataacattgaatatgtgagagacatcggagagggagcgtttggaagggtgtttcaagcaagggcaccaggcttacttccctatgaacctttcactatggtggcagtaaagatgctcaaagaagaagcctcggcagatatgcaagcggactttcagagggaggcagccctcatggcagaatttgacaaccctaacattgtgaagctattaggagtgtgtgctgtcgggaagccaatgtgcctgctctttgaatacatggcctatggtgacctcaatgagttcctccgcagcatgtcccctcacaccgtgtgcagcctcagtcacagtgacttgtctatgagggctcaggtctccagccctgggcccccacccctctcctgtgctgagcagctttgcattgccaggcaggtggcagctggcatggcttacctctcagaacgtaagtttgttcaccgagatttagccaccaggaactgcctggtgggcgagaacatggtggtgaaaattgccgactttggcctctccaggaacatctactcagcagactactacaaagctaatgaaaacgacgctatccctatccgttggatgccaccagagtccattttttataaccgctacactacagagtctgatgtgtgggcctatggcgtggtcctctgggagatcttctcctatggcctgcagccctactatgggatggcccatgaggaggtcatttactacgtgcgagatggcaacatcctctcctgccctgagaactgccccgtggagctgtacaatctcatgcgtctatgttggagcaagctgcctgcagacagacccagtttcaccagtattcaccgaattctggaacgcatgtgtgagagggcagagggaactgtgagtgtctaaggttgaagac

SEQ ID NO: 157680 - DNA, 2754 bp, Artificial Sequence
  derived and/or modified sequence
gtggagctgctgacacaaacagtcattagcagacaacccttttgcaacaaagtatgctttaaaatgtaaactgtggagccattttccttgcgttgtccagaaggaacttcgtcctgcgtgagcctggattaatcatgagagagctcgtcaacattccactggtacatattcttactctggttgccttcagcggaactgagaaacttccaaaagctcctgtcatcaccactcctcttgaaacagtggatgccttagttgaagaagtggctactttcatgtgtgcagtggaatcctacccccagcctgagatttcctggactagaaataaaattctcattaaactctttgacacccggtacagcatccgggagaatgggcagctcctcaccatcctgagtgtggaagacagtgatgatggcatttactgctgcacggccaacaatggtgtgggaggagctgtggagagttgtggagccctgcaagtgaagatgaaacctaaaataactcgtcctcccataaatgtgaaaataatagagggattaaaagcagtcctaccatgtactacaatgggtaatcccaaaccatcagtgtcttggataaagggagacagccctctcagggaaaattcccgaattgcagttcttgaatctgggagcttgaggattcataacgtacaaaaggaagatgcaggacagtatcgatgtgtggcaaaaaacagcctcgggacagcatattccaaagtggtgaagctggaagttgaggtttttgccaggatcctgcgggctcctgaatcccacaatgtcacctttggctcctttgtgaccctgcactgtacagcaacaggcattcctgtccccaccatcacctggattgaaaacggaaatgctgtttcttctgggtccattcaagagagtgtgaaagaccgagtgattgactcaagactgcagctgtttatcaccaagccaggactctacacatgcatagctaccaataagcatggggagaagttcagtactgccaaggctgcagccaccatcagcatagcagaatggagtaaaccacagaaagataacaaaggctactgcgcccagtacagaggggaggtgtgtaatgcagtcctggcaaaagatgctcttgtttttctcaacacctcctatgcggaccctgaggaggcccaagagctactggtccacacggcctggaatgaactgaaagtagtgagcccagtctgccggccagctgctgaggctttgttgtgtaaccacatcttccaggagtgcagtcctggagtagtgcctactcctattcccatttgcagagagtactgcttggcagtaaaggagctcttctgcgcaaaagaatggctggtaatggaagagaagacccacagaggactctacagatccgagatgcatttgctgtccgtgccagaatgcagcaagcttcccagcatgcattgggaccccacggcctgtgccagactgccacatctagattataacaaagaaaacctaaaaacattcccaccaatgacgtcctcaaagccaagtgtggacattccaaatctgccttcctcctcctcttcttccttctctgtctcacctacatactccatgactgtaataatctccatcatgtccagctttgcaatatttgtgcttcttaccataactactctctattgctgccgaagaagaaaacaatggaaaaataagaaaagagaatcagcagcagtaaccctcaccacactgccttctgagctcttactagatagacttcatcccaaccccatgtaccagaggatgccgctccttctgaaccccaaattgctcagcctggagtatccaaggaataacattgaatatgtgagagacatcggagagggagcgtttggaagggtgtttcaagcaagggcaccaggcttacttccctatgaacctttcactatggtggcagtaaagatgctcaaagaagaagcctcggcagatatgcaagcggactttcagagggaggcagccctcatggcagaatttgacaaccctaacattgtgaagctattaggagtgtgtgctgtcgggaagccaatgtgcctgctctttgaatacatggcctatggtgacctcaatgagttcctccgcagcatgtcccctcacaccgtgtgcagcctcagtcacagtgacttgtctatgagggctcaggtctccagccctgggcccccacccctctcctgtgctgagcagctttgcattgccaggcaggtggcagctggcatggcttacctctcagaacgtaagtttgttcaccgagatttagccaccaggaactgcctggtgggcgagaacatggtggtgaaaattgccgactttggcctctccaggaacatctactcagcagactactacaaagctaatgaaaacgacgctatccctatccgttggatgccaccagagtccattttttataaccgctacactacagagtctgatgtgtgggcctatggcgtggtcctctgggagatcttctcctatggcctgcagccctactatgggatggcccatgaggaggtcatttactacgtgcgagatggcaacatcctctcctgccctgagaactgccccgtggagctgtacaatctcatgcgtctatgttggagcaagctgcctgcagacagacccagtttcaccagtattcaccgaattctggaacgcatgtgtgagagggcagagggaactgtgagtgtctaaggttgaagac

SEQ ID NO: 157681 - DNA, 2754 bp, Artificial Sequence
  derived and/or modified sequence
gtggagctgctgacacaaacagtcattagcagacaacccttttgcaacaaagtatgctttaaaatgtaaactgtggagccattttccttgcgttgtccagaaggaacttcgtcctgcgtgagcctggattaatcatgagagagctcgtcaacattccactggtacatattcttactctggttgccttcagcggaactgagaaacttccaaaagctcctgtcatcaccactcctcttgaaacagtggatgccttagttgaagaagtggctactttcatgtgtgcagtggaatcctacccccagcctgagatttcctggactagaaataaaattctcattaaactctttgacacccggtacagcatccgggagaatgggcagctcctcaccatcctgagtgtggaagacagtgatgatggcatttactgctgcacggccaacaatggtgtgggaggagctgtggagagttgtggagccctgcaagtgaagatgaaacctaaaataactcgtcctcccataaatgtgaaaataatagagggattaaaagcagtcctaccatgtactacaatgggtaatcccaaaccatcagtgtcttggataaagggagacagccctctcagggaaaattcccgaattgcagttcttgaatctgggagcttgaggattcataacgtacaaaaggaagatgcaggacagtatcgatgtgtggcaaaaaacagcctcgggacagcatattccaaagtggtgaagctggaagttgaggtttttgccaggatcctgcgggctcctgaatcccacaatgtcacctttggctcctttgtgaccctgcactgtacagcaacaggcattcctgtccccaccatcacctggattgaaaacggaaatgctgtttcttctgggtccattcaagagagtgtgaaagaccgagtgattgactcaagactgcagctgtttatcaccaagccaggactctacacatgcatagctaccaataagcatggggagaagttcagtactgccaaggctgcagccaccatcagcatagcagctttcagtaaaccacagaaagataacaaaggctactgcgcccagtacagaggggaggtgtgtaatgcagtcctggcaaaagatgctcttgtttttctcaacacctcctatgcggaccctgaggaggcccaagagctactggtccacacggcctggaatgaactgaaagtagtgagcccagtctgccggccagctgctgaggctttgttgtgtaaccacatcttccaggagtgcagtcctggagtagtgcctactcctattcccatttgcagagagtactgcttggcagtaaaggagctcttctgcgcaaaagaatggctggtaatggaagagaagacccacagaggactctacagatccgagatgcatttgctgtccgtgccagaatgcagcaagcttcccagcatgcattgggaccccacggcctgtgccagactgccacatctagattataacaaagaaaacctaaaaacattcccaccaatgacgtcctcaaagccaagtgtggacattccaaatctgccttcctcctcctcttcttccttctctgtctcacctacatactccatgactgtaataatctccatcatgtccagctttgcaatatttgtgcttcttaccataactactctctattgctgccgaagaagaaaacaatggaaaaataagaaaagagaatcagcagcagtaaccctcaccacactgccttctgagctcttactagatagacttcatcccaaccccatgtaccagaggatgccgctccttctgaaccccaaattgctcagcctggagtatccaaggaataacattgaatatgtgagagacatcggagagggagcgtttggaagggtgtttcaagcaagggcaccaggcttacttccctatgaacctttcactatggtggcagtaaagatgctcaaagaagaagcctcggcagatatgcaagcggactttcagagggaggcagccctcatggcagaatttgacaaccctaacattgtgaagctattaggagtgtgtgctgtcgggaagccaatgtgcctgctctttgaatacatggcctatggtgacctcaatgagttcctccgcagcatgtcccctcacaccgtgtgcagcctcagtcacagtgacttgtctatgagggctcaggtctccagccctgggcccccacccctctcctgtgctgagcagctttgcattgccaggcaggtggcagctggcatggcttacctctcagaacgtaagtttgttcaccgagatttagccaccaggaactgcctggtgggcgagaacatggtggtgaaaattgccgactttggcctctccaggaacatctactcagcagactactacaaagctaatgaaaacgacgctatccctatccgttggatgccaccagagtccattttttataaccgctacactacagagtctgatgtgtgggcctatggcgtggtcctctgggagatcttctcctatggcctgcagccctactatgggatggcccatgaggaggtcatttactacgtgcgagatggcaacatcctctcctgccctgagaactgccccgtggagctgtacaatctcatgcgtctatgttggagcaagctgcctgcagacagacccagtttcaccagtattcaccgaattctggaacgcatgtgtgagagggcagagggaactgtgagtgtctaaggttgaagac

SEQ ID NO: 157682 - DNA, 2628 bp, Artificial Sequence
  derived and/or modified sequence
atgcgggagctggtgaacatccccctggtgcacatcctgaccctggtagcgttcagcgggacagagaagcttcccaaagcacctgtaatcacaacccctctggaaacagtggacgcgcttgtggaggaggtggcaacatttatgtgcgctgtggaatcctatccccagcctgagatttcttggacgagaaacaaaatcctgataaagctttttgacactcgatattccattcgggagaacggccagctgctcaccatcctgtccgtcgaagactccgacgacggcatatactgttgtaccgccaataatggggtgggtggtgctgtcgaatcttgtggcgctctccaagtgaaaatgaaaccgaagatcacaagaccacccatcaatgtcaagatcatcgaaggtctgaaggccgtgttaccttgcacaacaatgggaaaccccaagcccagtgtctcctggattaagggcgactcccccctgagagaaaacagtcgtatagctgttctcgaatcagggtctctgcgcatccacaatgttcagaaggaagacgcaggacagtaccgatgcgttgctaagaactccctcggaactgcgtattccaaagtggtgaagttggaggttgaggtcttcgctagaatactacgcgcgcccgaatcccataacgtcacgttcggcagctttgttacactccactgcacggcgaccggcatacctgtccccacaatcacatggatagagaacggtaatgcagtgagctctgggagcatccaggagtctgtgaaagacagagtgatcgatagtcgcctacagcttttcattaccaaacctggtctgtacacatgtatcgccaccaacaagcatggcgagaagttctctactgctaaggcggccgccactatcagtatcgcagagatgctgtttatttcatccttctccaaaccccagaaagataacaaagggtactgcgctcagtaccgcggggaagtgtgcaatgctgtcttggcgaaggacgctctagtttttctgaacaccagctacgcagaccctgaggaagctcaagagctactggtacacactgcttggaacgagctgaaagtggtttctcctgtctgtcgacccgctgccgaagcactactatgcaatcacatcttccaggaatgctcacctggcgtggtgccaacccccattccgatctgccgtgaatattgcctggccgttaaggaactcttttgcgctaaggagtggcttgttatggaagagaaaacccaccgtggtctttacaggtccgagatgcacttgttaagtgtgcccgagtgttctaaactgccttctatgcattgggacccgaccgcatgtgcgaggctcccacatctagactataataaggagaaccttaaaacgtttcctccgatgacaagctccaagcctagtgtcgacatccctaaccttcccagctcctcctcatcctccttctctgtgtctcctacctacagcatgaccgtgatcataagcatcatgtcatccttcgccatttttgttctgctaaccatcacgaccctctattgttgcaggcgaagaaaacagtggaagaataagaaacgtgaaagtgccgcagtgacactaacaactctccccagcgagcttttgctggatcggctgcaccctaacccgatgtatcagagaatgccgctgctgctcaatcctaaattactgagtctggaatacccaagaaacaacatcgagtacgtccgagatatcggagagggagccttcggaagggtgttccaggcccgcgctccaggactccttccatacgaaccattcacaatggtggcagtgaaaatgctcaaagaagaggcttccgccgatatgcaggccgattttcagcgcgaagcagccttgatggctgagtttgacaacccgaatatcgtaaagctcctcggggtatgcgccgtcggcaaacctatgtgtctgctatttgaatacatggcctatggcgacctgaacgaattcctccgcagcatgagtccccataccgtctgctcactctcacattctgatttgtctatgcgggcccaggtctcaagccctggccccccaccactgtcctgcgcggaacagttgtgtatcgcccggcaggtggccgctggcatggcctacctgtccgagcggaaatttgtccaccgtgatcttgcgactaggaactgtttggtgggtgagaacatggtggtcaagatcgccgatttcggcctttcccgcaacatttattccgcagactattataaggctaatgagaacgacgctattcctataagatggatgcctcctgaatccatattctataatagatacactaccgaatccgatgtctgggcctacggtgtggtgctgtgggagatcttcagctacggattacaaccatactacggcatggcccacgaggaagtgatctactatgttagagatggcaacatcctgagttgtcccgaaaactgccccgttgaactgtacaacctcatgaggctatgctggagcaagttacctgctgacaggccttcttttacctctatacacagaatcctggagaggatgtgcgagcgcgccgaggggacagtgtcagtgtag

SEQ ID NO: 157683 - DNA, 2610 bp, Artificial Sequence
  derived and/or modified sequence
atgcgggagctggtgaacatccccctggtgcacatcctgaccctggtcgcctttagcggtaccgagaagctgccaaaagctccggtaataactacacccctggaaaccgtagacgcacttgttgaggaagtggccacttttatgtgcgcggtggagtcttatccgcagcctgaaatctcctggacacgcaataagatccttatcaagttattcgacacacgctactcaataagggagaatggccagcttctcaccatccttagtgttgaagactccgatgatgggatctattgctgtaccgccaataatggggtcggtggcgcagtcgagtcttgcggtgctttacaagtgaaaatgaagcctaagattactcgtcccccgatcaatgtcaagataattgaggggcttaaggcagtacttccatgtaccacaatgggaaatccaaagccttccgttagttggatcaagggcgattcacctctgcgcgaaaattcgaggattgcagttttagagagtggctcgctgaggattcacaatgttcagaaggaagacgcagggcagtacaggtgtgtcgccaagaattcccttggaaccgcctacagcaaagtggtcaaactcgaggtagaggtatttgcccgaatcctgagagcgcccgaaagccataatgtcacattcggatcgttcgttactttgcattgcacagcaactggtatccccgtgccaactattacctggatcgaaaacgggaatgcagtctcaagcgggagtatacaggaatctgtaaaggaccgggtcatcgactcacggctccaactgtttatcaccaagccaggtctctacacatgcattgctacgaataaacatggagagaagttttcgaccgcaaaagcagcggcgactattagcatagccgaatggagtaagccacagaaggacaataaggggtactgcgcgcagtaccgaggcgaggtgtgcaatgccgtacttgccaaggatgctctggtctttctgaacactagctacgccgacccggaggaggcccaagaactgcttgtccatacagcctggaacgaacttaaagtcgtgtcccccgtgtgtcgtcctgctgccgaggccctcttgtgcaaccacatttttcaggaatgctcacccggggtcgtgcctactccgatacctatttgccgagagtactgtcttgctgtgaaggagttgttttgtgccaaggaatggttggtgatggaagagaaaacccacaggggactctatcggagcgaaatgcacctgttgtctgtaccagagtgcagcaaactaccatcgatgcactgggatcccaccgcgtgtgcaagactcccacacctggactacaataaggagaacctcaaaaccttccctcctatgaccagcagcaagccgtccgttgatatccctaatctcccctcatcatcatctagttcgttttccgtgagtcccacgtactcaatgacagtgataattagtatcatgtcttccttcgcaatcttcgttctgctgacaataacaactctgtattgttgtcgaagacggaaacagtggaaaaataagaaacgcgaatccgccgccgtcacgctaaccactctgccaagcgaactgctcctggacagactgcatcctaacccaatgtaccagaggatgccactgctgcttaacccaaagttgctttcgctggagtacccccgaaacaatatcgagtatgtgagggatatcggcgaaggtgccttcgggagggtttttcaggcaagagctccgggtctgcttccctatgagccatttactatggtcgccgtgaagatgctgaaagaagaggctagcgccgacatgcaggcggactttcagagggaggctgctcttatggcagagtttgataacccaaacatcgtgaaactactcggggtgtgcgcagtgggaaagcctatgtgcctgttgtttgaatacatggcttacggtgatttgaatgagttcctgagaagcatgagccctcacaccgtgtgttcgctgagccactcagatcttagcatgagagcacaggtctcaagtcccgggcccccgcctctgagctgcgccgagcaactctgcatcgcccggcaggttgctgccggaatggcgtacctctctgagagaaagtttgtgcaccgggaccttgccacacgaaactgccttgtaggagagaacatggtggttaaaatagcagactttggcttgagcagaaatatttactccgccgactactacaaggcaaacgagaacgacgccatccccatccgctggatgcctcctgaaagcattttttacaatcggtatacgacagaatctgatgtgtgggcatatggtgtcgttctttgggagatttttagttacggcctgcagccctactacggcatggcccacgaagaagtgatatactatgttagagacggcaacattttatcctgtcctgaaaactgtccagttgaactgtacaacctgatgcggctgtgctggtctaagcttcccgctgatcggccttcgttcacatccatacataggatcctggagagaatgtgcgagagggccgagggaacagtgtctgtgtag

SEQ ID NO: 157684 - DNA, 2610 bp, Artificial Sequence
  derived and/or modified sequence
atgcgggagctggtgaacatccccctggtgcacatcctgaccctggtggcatttagtgggaccgaaaagcttcctaaggctcccgtgatcacaacgcccctggagaccgtggacgccttagtggaggaagtggctaccttcatgtgtgccgttgaatcttacccacaacccgaaatcagctggaccagaaacaaaatcctgataaaattgttcgataccaggtacagcattagagagaatggccagctgttgacgatattatccgtggaggatagtgatgacggaatctattgctgtaccgctaacaatggcgtcgggggggctgtcgaaagctgtggtgctctgcaggtgaaaatgaaacctaaaatcacccggccacctataaacgtgaaaataattgaaggtctgaaggccgtcttgccctgtacaactatgggtaaccctaaaccttccgtctcctggattaagggcgacagcccactgcgcgagaatagtagaattgcggtgcttgagtcaggaagcctaaggatccacaatgtgcagaaagaagatgccggacagtacagatgtgtggccaaaaatagtctgggtacagcatactcgaaagtagtcaaactcgaggttgaggtgttcgctaggattctccgggctcctgaaagtcataatgtgactttcggatcattcgtgaccctacattgtacagcaacaggaattcctgttcctacaataacatggattgaaaacggtaacgccgtatcttccggaagcatccaggagtcagtaaaggaccgagtgatcgacagccgccttcagttattcattactaagcctgggctctacacttgcatcgccaccaacaaacacggagagaagttcagcactgccaaagcagccgcaacaatttctatcgcagctttttcgaaacctcagaaagataacaaggggtattgtgctcagtatcggggcgaggtttgcaacgccgtgctggccaaagacgctttagtcttcttaaacactagctacgccgatcccgaggaggcccaggagctgctggtccataccgcctggaacgagctgaaagtagtgtcaccagtctgtcgccctgctgctgaggcgctcttatgcaaccacattttccaggaatgttctcctggggttgtccccacacccattcctatctgccgggaatattgtctggccgtgaaggaacttttttgcgctaaggagtggttagtgatggaggagaaaacccaccgtggtctgtaccgatcagagatgcatctccttagcgttcccgagtgctctaagttgccctcgatgcactgggatcctacagcatgcgctaggttgcctcacctcgattacaataaggagaacctgaaaacctttccgccaatgaccagttcaaaaccttccgttgacatccctaatctgccaagtagcagctcaagcagcttcagcgtctctccaacatacagtatgactgtgataatttcgatcatgagctccttcgcaatcttcgtattactcactattactacattgtattgttgcaggcgtcgaaaacaatggaagaataaaaaaagagaatcggcagctgtcacacttaccactttgccttctgagctcctgctggacaggctgcatcctaatccgatgtaccaaaggatgcctctgctactgaatcccaagttgcttagcctggagtatcctaggaacaatatcgagtatgtaagggacataggagagggcgcctttggcagggtgtttcaagctcgagcaccaggcttgttgccctatgagccttttaccatggtggccgttaaaatgctgaaggaggaggccagcgccgatatgcaggcagattttcagagagaggccgctctgatggcagaattcgacaatcctaacattgtcaagctgcttggagtgtgcgctgtggggaaacccatgtgcctgttatttgagtacatggcctacggggatctgaatgagttcctgcgctccatgagtcctcatacagtctgcagtctgtctcattccgatctctccatgcgagcacaggtgagtagccctggacctccgccactgtcctgcgcggagcagctgtgtatagctagacaggtggctgctggcatggcatatctgagcgagcggaaattcgttcatcgagacttagcaactaggaactgcctggttggagagaacatggtcgtcaagatcgccgatttcggcctgtcccgcaatatctactcagcagattattacaaggcaaatgaaaacgatgcgataccaatcaggtggatgccacccgagagtatcttttataatcggtacactactgagtccgacgtgtgggcttatggcgtagtactatgggagatattctcctacggcctgcagccttactatggcatggcccacgaagaggtgatatactatgttagggacgggaacatcctgtcgtgcccagagaactgccccgtggagctctacaacctgatgaggttatgttggagcaaacttcctgcagacaggcccagcttcacctccatacatcgaatcttagagagaatgtgtgagagagccgagggcacagtaagcgtgtag

SEQ ID NO: 157685 - DNA, 2628 bp, Artificial Sequence
  derived and/or modified sequence
atgcgagaactagtcaatataccactggtgcacattttgacactggtcgccttctcagggacggaaaagctcccaaaggcacccgtaatcaccacccctctggagaccgtggacgccctggtcgaggaagtcgccactttcatgtgcgccgtcgagagctatccccagccagaaatttcttggaccagaaacaagatcctcatcaagctgttcgacacgcgatactcgattagggaaaatggccagctcttaacaattctctcggtagaggattctgacgacgggatatattgctgtaccgccaataacggggtgggtggggctgtggaaagctgtggtgctctccaggttaaaatgaaaccaaagattacccggcctccgattaacgttaagattattgagggcctgaaagccgtgcttccatgcacaacaatgggcaaccctaaacccagcgttagctggattaaaggcgacagtccattgcgcgaaaactccagaatagccgttctggaaagcggcagcctgcggattcacaatgtacagaaggaggatgctggtcagtatcggtgtgtggcaaaaaattcgctgggtacggcttacagcaaggtcgtgaaactggaggtggaggtgtttgcacgcattttgcgcgctccagagtctcataacgtaaccttcggaagcttcgtgacgctccattgcacagcaaccggtatccctgtgccaacaattacatggattgagaacggtaatgctgtgagcagcgggagtatccaggagagtgtcaaggaccgggtgattgactctagactccagttattcattacaaaacctggactctacacctgcatcgccactaataagcacggagaaaagttttctactgctaaggcagctgctaccatctcgatcgctgagatgttattcatctctagtttctcgaagcctcagaaagacaacaaaggttattgtgcacagtatcggggagaggtatgcaacgccgtcttggccaaagatgccctcgtgtttctcaataccagctatgcggacccagaggaggcccaggagctccttgtccacaccgcatggaacgagctgaaggttgtaagccctgtctgccggccagcagctgaggcgctgctatgtaatcatatttttcaggaatgctcccctggcgtggtgccaacacccatacccatctgtcgcgagtattgcctggccgtcaaagaacttttctgcgctaaggaatggctggtcatggaagaaaagacccaccggggactgtatcggtccgagatgcacctcctctcagtgcccgagtgctctaaactgcctagtatgcattgggatcccactgcttgcgcccgattaccgcatcttgattataacaaggagaatctgaagaccttccctccgatgacctcctctaagcccagcgtcgatatcccaaacctgccaagtagctcaagctcatctttcagcgtgtcaccaacttactccatgaccgtcatcattagtataatgtcatcttttgctatcttcgtcctcctcacaattactaccctatactgctgtaggcggcgaaagcagtggaaaaacaagaagcgtgaatccgctgctgtgacactgaccactcttccttcagagttactcctggaccgcctgcatcccaaccccatgtaccagaggatgccactgttactgaaccccaaacttctgtcactcgagtaccccaggaacaacatcgaatacgttagggacatcggagaaggtgcctttggacgagtgtttcaggccagagcccctggcctgctaccctacgaaccattcacgatggtcgccgtgaaaatgctgaaggaggaagcatctgctgacatgcaggctgacttccagagagaggccgcactgatggccgaatttgacaaccccaacatcgtaaaacttctcggcgtgtgtgccgtgggaaaacctatgtgtttactgtttgagtatatggcctatggtgacctcaacgagtttctgcgttctatgagcccacacactgtctgctccttgtcccactcggacctgagtatgcgggcacaggtgtcatcacccggtccccctccactttcctgcgccgagcaactgtgtatcgctcgacaggttgcggcaggtatggcctacttgtcagagcgcaagttcgtccacagggacttggccacccgtaactgtctggtgggagaaaacatggtggttaagatcgcagatttcggcctgtccagaaacatctacagcgccgactattacaaagctaacgagaatgatgccatccctatccgttggatgcctccggagagtatcttttacaaccggtataccacagaatcggatgtgtgggcatacggggtggtgctttgggaaatcttttcctacggcctgcagccttattatggcatggcccatgaggaagtcatttattacgtcagggacggcaacatacttagctgccctgagaactgtccggtcgagctttacaacctgatgagactgtgctggagtaaattgcccgctgatcggcctagcttcacaagcattcatagaatcctggaacgcatgtgtgagagggctgaggggaccgtcagcgtctag

SEQ ID NO: 157686 - DNA, 2610 bp, Artificial Sequence
  derived and/or modified sequence
atgagagaactcgttaacatacctctcgtccacatcctgacgctggtggcattcagcggaaccgagaaactcccaaaagctcccgtcattacaactccactcgaaaccgtggacgcccttgtcgaggaagtggccacatttatgtgcgctgtagaatcctaccctcagcccgagatttcctggactcggaacaagatcttgattaaactgtttgacacccggtattccatccgagagaacggacagctcctgacgattcttagtgtggaggattccgacgatggcatttattgctgcaccgcgaacaacggcgtgggaggcgcagtcgaatcctgcggagccctccaagtgaagatgaaaccaaaaatcactagacccccaattaatgtaaaaatcatagagggacttaaggcagtcctcccctgcaccaccatggggaatcccaagcctagcgtcagttggattaaaggcgatagccctctcagagagaactctcgcattgccgttctggaaagcggaagcctgaggattcataatgtgcagaaggaagacgccggacaataccgctgcgtggcgaaaaattctctgggaacagcatactcaaaggtagtaaagttggaagtagaggtctttgcccgaatcctgcgcgctccagaatcacacaacgttacatttggctctttcgttaccctgcactgcaccgccaccggcatcccagtgcctacgattacatggatcgaaaatggcaacgcggtgagctcagggagcatccaggagtcggtgaaagatcgggttatcgacagccggctacagttgttcataaccaaacctggcctttacacctgtatcgcaaccaacaagcacggagaaaagttctcaaccgccaaagccgcagccactatcagcattgctgagtggagtaagccccagaaggacaataaggggtactgtgcacaatatcgcggagaggtttgcaacgccgtgcttgccaaggatgctctcgtttttctgaacacgtcctatgcagatccagaagaggcgcaggagctcttagtacacaccgcttggaacgagctaaaggttgtaagtcccgtttgtaggcccgcagctgaggccctgctctgcaatcatatcttccaggagtgctccccaggagtcgttccaactcccatcccaatatgtcgcgaatattgtcttgcagtgaaagaactgttctgtgctaaggaatggttagtcatggaggagaagactcacaggggactttatagatctgagatgcacctgctgagcgttccagagtgttccaaattgccatccatgcactgggatcccaccgcatgcgcccgattgccccacctcgactataacaaagagaacctgaagacctttccaccaatgacctcttccaagccctctgtggacatcccaaacctgccttccagcagctcatcttccttcagtgtgtccccaacttattcaatgactgtaattatctccatcatgtccagctttgccatttttgtactacttaccataactaccctgtattgctgtcgaaggcggaaacagtggaagaataagaagcgcgagagtgctgcagtgactttgactacccttccttcagagttactgctcgatcgcctgcaccctaatcccatgtatcaaaggatgcctctcctgctgaacccaaaactcctgagcctggagtatccacgaaataatattgaatacgttagggatatcggagagggggctttcggcagagtcttccaggcacgtgcccctggtctgctcccatacgagccttttacaatggtagcagttaaaatgctgaaggaggaggcctcagcagatatgcaagcagatttccagagggaagccgcactgatggcagagtttgacaatcctaatattgtgaagctgctcggtgtatgtgctgtgggcaaaccaatgtgcctgctgttcgagtatatggcatatggggatctgaatgaatttcttagatccatgagcccccatacagtctgctctttaagccactctgatctgagtatgcgggcacaggtgagttctcctggtccacctccgctgtcctgcgctgaacagctgtgcatcgcacgtcaggttgccgcagggatggcatacctttctgaaagaaaatttgtacatagggacttggctacaagaaactgcttggttggtgagaacatggtggtgaaaatcgcagacttcggattgtcaaggaacatttattcagcagattattacaaagccaacgagaacgacgccattccaattcggtggatgccgcctgaatccatcttttataacaggtacactaccgagtcagacgtgtgggcctacggcgtggtgttgtgggagatcttcagctacggattgcagccttactacggcatggcacacgaagaggtaatttattacgtgagagacggcaacattctgtcctgccccgaaaattgtcccgtggaattgtataatctgatgcgcttgtgctggtcaaagctgccagctgacaggcccagctttacctcaatacatcggatattggaacggatgtgtgagcgggctgagggcaccgtgagcgtgtag

SEQ ID NO: 157687 - DNA, 2610 bp, Artificial Sequence
  derived and/or modified sequence
atgcgggaattggtgaacattcctctggtgcatattctgacactagtggcttttagcggtacagaaaaattacccaaggccccagtaattaccacacctttggaaaccgtggacgctctagtggaggaggttgccacctttatgtgtgcagtcgagtcctatccccagccggagatttcatggactcgcaacaagattctgatcaaactctttgacaccagatacagtattcgcgagaacggccagctgttgacaatcttgtctgtcgaagacagtgacgacggtatttattgctgtaccgcaaataatggcgtgggcggagctgtcgaatcatgcggggctcttcaggtgaaaatgaaacctaagattaccagacccccaattaatgtaaagatcatagagggcctcaaggccgtcctgccctgtactactatggggaatcccaagccaagtgtaagctggatcaaaggagacagcccactgcgtgagaacagcagaattgccgtgcttgagtcagggtctctgaggatccacaatgtgcaaaaagaagatgcaggacaatatcgatgtgtagcgaaaaacagtttgggaacagcctactctaaggtcgttaagctggaggtggaggtgtttgccaggatcctacgtgcacccgagtcccataatgtaacattcggcagctttgttacccttcattgcacagccaccggcatccctgtgccgaccattacctggatcgagaatggtaacgccgttagctctggctccattcaagaatcagtgaaggacagggtcattgattctcgcctgcagctgttcatcaccaagcccggtctgtatacctgcatagctactaacaagcatggagaaaagtttagcacagcgaaggcagctgcgaccatttcaatagccgctttcagtaaaccccagaaggataataaagggtattgcgctcagtacaggggagaggtttgtaacgcagtcctggccaaggatgctttagtattcctgaacaccagttatgctgatcctgaagaagcacaagagttgctggtgcacaccgcatggaatgagcttaaagttgtcagtcccgtgtgtagacccgctgcggaggctttgctgtgcaatcacatctttcaggaatgctctccaggggtcgtacctacgcctatccccatatgcagagagtattgtttggctgttaaagagctgttttgcgctaaggaatggttggtgatggaggaaaagactcataggggcctgtacaggagcgaaatgcacctgctgtccgtacccgagtgtagtaaacttccatctatgcactgggatccaactgcctgtgcaaggctgcctcacctcgactacaataaagagaaccttaagacatttccaccgatgaccagctccaagccctctgtggatatcccaaaccttccctcatcatcctctagctcattctcagtatctccaacatacagcatgactgttataatctcgataatgtcttctttcgcaattttcgtcctgctgaccatcaccactttgtactgctgtaggagacggaagcagtggaagaacaagaagagagaaagcgctgcagtgacactgaccaccctgccctctgagcttctcctggacaggctgcaccccaatccaatgtaccaacggatgccattgctccttaatcctaaacttttgtctctggaataccctcggaataacatcgagtacgtccgggatatcggcgagggtgccttcggcagagtcttccaggcgagagcaccagggcttctcccttatgagccatttacaatggtcgccgtcaagatgctcaaggaagaggcttctgccgatatgcaagcagatttccagagagaagcagcactcatggcagagttcgacaatcccaacatagttaagttgctgggggtgtgtgctgtggggaagcctatgtgcctcctgtttgagtacatggcctacggtgacttgaacgaattcttgcgatctatgagccctcatacggtatgctccctctctcactccgatcttagcatgcgcgctcaggtatcttcccctgggcctcctccattgtcctgtgcggagcaattatgcatcgcacgacaggtcgcggctggaatggcatatctgagtgaaagaaagttcgtgcaccgcgatcttgctactagaaattgccttgttggggagaacatggtcgtgaaaatcgccgacttcggactttctcgaaatatttatagtgccgactattacaaggctaacgaaaacgatgcgatccccatcaggtggatgcccccagagagcatcttctataatcgatacacgacagaatccgacgtctgggcatatggtgtcgtactgtgggaaatcttcagttatggtctgcaaccatactatggaatggcccatgaggaggttatctactatgtaagggatggcaatatcctgtcctgccctgaaaattgccccgttgaactgtacaatttaatgaggctgtgctggtctaagctgccagctgatcggccatccttcacatccattcaccggattttggaaagaatgtgcgaacgcgctgaaggaaccgtgtccgtctag

SEQ ID NO: 157688 - DNA, 2628 bp, Artificial Sequence
  derived and/or modified sequence
atgagagagctggtgaacatccccctggtgcacatcctgaccctggtggccttcagcggcaccgagaagctgcccaaggcccccgtgatcaccacccccctggagaccgtggacgccctggtggaggaggtggccaccttcatgtgcgccgtggagagctacccccagcccgagatcagctggaccagaaacaagatcctgatcaagctgttcgacaccagatacagcatcagagagaacggccagctgctgaccatcctgagcgtggaggacagcgacgacggcatctactgctgcaccgccaacaacggcgtgggcggcgccgtggagagctgcggcgccctgcaggtgaagatgaagcccaagatcaccagaccccccatcaacgtgaagatcatcgagggcctgaaggccgtgctgccctgcaccaccatgggcaaccccaagcccagcgtgagctggatcaagggcgacagccccctgagagagaacagcagaatcgccgtgctggagagcggcagcctgagaatccacaacgtgcagaaggaggacgccggccagtacagatgcgtggccaagaacagcctgggcaccgcctacagcaaggtggtgaagctggaggtggaggtgttcgccagaatcctgagagcccccgagagccacaacgtgaccttcggcagcttcgtgaccctgcactgcaccgccaccggcatccccgtgcccaccatcacctggatcgagaacggcaacgccgtgagcagcggcagcatccaggagagcgtgaaggacagagtgatcgacagcagactgcagctgttcatcaccaagcccggcctgtacacctgcatcgccaccaacaagcacggcgagaagttcagcaccgccaaggccgccgccaccatcagcatcgccgagatgctgttcatcagcagcttcagcaagccccagaaggacaacaagggctactgcgcccagtacagaggcgaggtgtgcaacgccgtgctggccaaggacgccctggtgttcctgaacaccagctacgccgaccccgaggaggcccaggagctgctggtgcacaccgcctggaacgagctgaaggtggtgagccccgtgtgcagacccgccgccgaggccctgctgtgcaaccacatcttccaggagtgcagccccggcgtggtgcccacccccatccccatctgcagagagtactgcctggccgtgaaggagctgttctgcgccaaggagtggctggtgatggaggagaagacccacagaggcctgtacagaagcgagatgcacctgctgagcgtgcccgagtgcagcaagctgcccagcatgcactgggaccccaccgcctgcgccagactgccccacctggactacaacaaggagaacctgaagaccttcccccccatgaccagcagcaagcccagcgtggacatccccaacctgcccagcagcagcagcagcagcttcagcgtgagccccacctacagcatgaccgtgatcatcagcatcatgagcagcttcgccatcttcgtgctgctgaccatcaccaccctgtactgctgcagaagaagaaagcagtggaagaacaagaagagagagagcgccgccgtgaccctgaccaccctgcccagcgagctgctgctggacagactgcaccccaaccccatgtaccagagaatgcccctgctgctgaaccccaagctgctgagcctggagtaccccagaaacaacatcgagtacgtgagagacatcggcgagggcgccttcggcagagtgttccaggccagagcccccggcctgctgccctacgagcccttcaccatggtggccgtgaagatgctgaaggaggaggccagcgccgacatgcaggccgacttccagagagaggccgccctgatggccgagttcgacaaccccaacatcgtgaagctgctgggcgtgtgcgccgtgggcaagcccatgtgcctgctgttcgagtacatggcctacggcgacctgaacgagttcctgagaagcatgagcccccacaccgtgtgcagcctgagccacagcgacctgagcatgagagcccaggtgagcagccccggccccccccccctgagctgcgccgagcagctgtgcatcgccagacaggtggccgccggcatggcctacctgagcgagagaaagttcgtgcacagagacctggccaccagaaactgcctggtgggcgagaacatggtggtgaagatcgccgacttcggcctgagcagaaacatctacagcgccgactactacaaggccaacgagaacgacgccatccccatcagatggatgccccccgagagcatcttctacaacagatacaccaccgagagcgacgtgtgggcctacggcgtggtgctgtgggagatcttcagctacggcctgcagccctactacggcatggcccacgaggaggtgatctactacgtgagagacggcaacatcctgagctgccccgagaactgccccgtggagctgtacaacctgatgagactgtgctggagcaagctgcccgccgacagacccagcttcaccagcatccacagaatcctggagagaatgtgcgagagagccgagggcaccgtgagcgtgtag

SEQ ID NO: 157689 - DNA, 2610 bp, Artificial Sequence
  derived and/or modified sequence
atgagagagctggtgaacatccccctggtgcacatcctgaccctggtggccttcagcggcaccgagaagctgcccaaggcccccgtgatcaccacccccctggagaccgtggacgccctggtggaggaggtggccaccttcatgtgcgccgtggagagctacccccagcccgagatcagctggaccagaaacaagatcctgatcaagctgttcgacaccagatacagcatcagagagaacggccagctgctgaccatcctgagcgtggaggacagcgacgacggcatctactgctgcaccgccaacaacggcgtgggcggcgccgtggagagctgcggcgccctgcaggtgaagatgaagcccaagatcaccagaccccccatcaacgtgaagatcatcgagggcctgaaggccgtgctgccctgcaccaccatgggcaaccccaagcccagcgtgagctggatcaagggcgacagccccctgagagagaacagcagaatcgccgtgctggagagcggcagcctgagaatccacaacgtgcagaaggaggacgccggccagtacagatgcgtggccaagaacagcctgggcaccgcctacagcaaggtggtgaagctggaggtggaggtgttcgccagaatcctgagagcccccgagagccacaacgtgaccttcggcagcttcgtgaccctgcactgcaccgccaccggcatccccgtgcccaccatcacctggatcgagaacggcaacgccgtgagcagcggcagcatccaggagagcgtgaaggacagagtgatcgacagcagactgcagctgttcatcaccaagcccggcctgtacacctgcatcgccaccaacaagcacggcgagaagttcagcaccgccaaggccgccgccaccatcagcatcgccgagtggagcaagccccagaaggacaacaagggctactgcgcccagtacagaggcgaggtgtgcaacgccgtgctggccaaggacgccctggtgttcctgaacaccagctacgccgaccccgaggaggcccaggagctgctggtgcacaccgcctggaacgagctgaaggtggtgagccccgtgtgcagacccgccgccgaggccctgctgtgcaaccacatcttccaggagtgcagccccggcgtggtgcccacccccatccccatctgcagagagtactgcctggccgtgaaggagctgttctgcgccaaggagtggctggtgatggaggagaagacccacagaggcctgtacagaagcgagatgcacctgctgagcgtgcccgagtgcagcaagctgcccagcatgcactgggaccccaccgcctgcgccagactgccccacctggactacaacaaggagaacctgaagaccttcccccccatgaccagcagcaagcccagcgtggacatccccaacctgcccagcagcagcagcagcagcttcagcgtgagccccacctacagcatgaccgtgatcatcagcatcatgagcagcttcgccatcttcgtgctgctgaccatcaccaccctgtactgctgcagaagaagaaagcagtggaagaacaagaagagagagagcgccgccgtgaccctgaccaccctgcccagcgagctgctgctggacagactgcaccccaaccccatgtaccagagaatgcccctgctgctgaaccccaagctgctgagcctggagtaccccagaaacaacatcgagtacgtgagagacatcggcgagggcgccttcggcagagtgttccaggccagagcccccggcctgctgccctacgagcccttcaccatggtggccgtgaagatgctgaaggaggaggccagcgccgacatgcaggccgacttccagagagaggccgccctgatggccgagttcgacaaccccaacatcgtgaagctgctgggcgtgtgcgccgtgggcaagcccatgtgcctgctgttcgagtacatggcctacggcgacctgaacgagttcctgagaagcatgagcccccacaccgtgtgcagcctgagccacagcgacctgagcatgagagcccaggtgagcagccccggccccccccccctgagctgcgccgagcagctgtgcatcgccagacaggtggccgccggcatggcctacctgagcgagagaaagttcgtgcacagagacctggccaccagaaactgcctggtgggcgagaacatggtggtgaagatcgccgacttcggcctgagcagaaacatctacagcgccgactactacaaggccaacgagaacgacgccatccccatcagatggatgccccccgagagcatcttctacaacagatacaccaccgagagcgacgtgtgggcctacggcgtggtgctgtgggagatcttcagctacggcctgcagccctactacggcatggcccacgaggaggtgatctactacgtgagagacggcaacatcctgagctgccccgagaactgccccgtggagctgtacaacctgatgagactgtgctggagcaagctgcccgccgacagacccagcttcaccagcatccacagaatcctggagagaatgtgcgagagagccgagggcaccgtgagcgtgtag

SEQ ID NO: 157690 - DNA, 2610 bp, Artificial Sequence
  derived and/or modified sequence
atgagagagctggtgaacatccccctggtgcacatcctgaccctggtggccttcagcggcaccgagaagctgcccaaggcccccgtgatcaccacccccctggagaccgtggacgccctggtggaggaggtggccaccttcatgtgcgccgtggagagctacccccagcccgagatcagctggaccagaaacaagatcctgatcaagctgttcgacaccagatacagcatcagagagaacggccagctgctgaccatcctgagcgtggaggacagcgacgacggcatctactgctgcaccgccaacaacggcgtgggcggcgccgtggagagctgcggcgccctgcaggtgaagatgaagcccaagatcaccagaccccccatcaacgtgaagatcatcgagggcctgaaggccgtgctgccctgcaccaccatgggcaaccccaagcccagcgtgagctggatcaagggcgacagccccctgagagagaacagcagaatcgccgtgctggagagcggcagcctgagaatccacaacgtgcagaaggaggacgccggccagtacagatgcgtggccaagaacagcctgggcaccgcctacagcaaggtggtgaagctggaggtggaggtgttcgccagaatcctgagagcccccgagagccacaacgtgaccttcggcagcttcgtgaccctgcactgcaccgccaccggcatccccgtgcccaccatcacctggatcgagaacggcaacgccgtgagcagcggcagcatccaggagagcgtgaaggacagagtgatcgacagcagactgcagctgttcatcaccaagcccggcctgtacacctgcatcgccaccaacaagcacggcgagaagttcagcaccgccaaggccgccgccaccatcagcatcgccgccttcagcaagccccagaaggacaacaagggctactgcgcccagtacagaggcgaggtgtgcaacgccgtgctggccaaggacgccctggtgttcctgaacaccagctacgccgaccccgaggaggcccaggagctgctggtgcacaccgcctggaacgagctgaaggtggtgagccccgtgtgcagacccgccgccgaggccctgctgtgcaaccacatcttccaggagtgcagccccggcgtggtgcccacccccatccccatctgcagagagtactgcctggccgtgaaggagctgttctgcgccaaggagtggctggtgatggaggagaagacccacagaggcctgtacagaagcgagatgcacctgctgagcgtgcccgagtgcagcaagctgcccagcatgcactgggaccccaccgcctgcgccagactgccccacctggactacaacaaggagaacctgaagaccttcccccccatgaccagcagcaagcccagcgtggacatccccaacctgcccagcagcagcagcagcagcttcagcgtgagccccacctacagcatgaccgtgatcatcagcatcatgagcagcttcgccatcttcgtgctgctgaccatcaccaccctgtactgctgcagaagaagaaagcagtggaagaacaagaagagagagagcgccgccgtgaccctgaccaccctgcccagcgagctgctgctggacagactgcaccccaaccccatgtaccagagaatgcccctgctgctgaaccccaagctgctgagcctggagtaccccagaaacaacatcgagtacgtgagagacatcggcgagggcgccttcggcagagtgttccaggccagagcccccggcctgctgccctacgagcccttcaccatggtggccgtgaagatgctgaaggaggaggccagcgccgacatgcaggccgacttccagagagaggccgccctgatggccgagttcgacaaccccaacatcgtgaagctgctgggcgtgtgcgccgtgggcaagcccatgtgcctgctgttcgagtacatggcctacggcgacctgaacgagttcctgagaagcatgagcccccacaccgtgtgcagcctgagccacagcgacctgagcatgagagcccaggtgagcagccccggccccccccccctgagctgcgccgagcagctgtgcatcgccagacaggtggccgccggcatggcctacctgagcgagagaaagttcgtgcacagagacctggccaccagaaactgcctggtgggcgagaacatggtggtgaagatcgccgacttcggcctgagcagaaacatctacagcgccgactactacaaggccaacgagaacgacgccatccccatcagatggatgccccccgagagcatcttctacaacagatacaccaccgagagcgacgtgtgggcctacggcgtggtgctgtgggagatcttcagctacggcctgcagccctactacggcatggcccacgaggaggtgatctactacgtgagagacggcaacatcctgagctgccccgagaactgccccgtggagctgtacaacctgatgagactgtgctggagcaagctgcccgccgacagacccagcttcaccagcatccacagaatcctggagagaatgtgcgagagagccgagggcaccgtgagcgtgtag

SEQ ID NO: 157691 - protein, 255 aa, Artificial Sequence
  derived and/or modified sequence
MDVMDGCQFSPSEYFYDGSCIPSPEGEFGDEFVPRVAAFGAHKAELQGSDEDEHVRAPTGHHQAGHCLMWACKACKRKSTTMDRRKAATMRERRRLKKVNQAFETLKRCTTTNPNQRLPKVEILRNAIRYIESLQELLREQVENYYSLPGQSCSEPTSPTSNCSDGMPECNSPVWSRKSSTFDSIYCPDVSNVYATDKNSLSSLDCLSNIVDRITSSEQPGLPLQDLASLSPVASTDSQPATPGASSSRLIYHVL

SEQ ID NO: 157692 - DNA, 1520 bp, Artificial Sequence
  derived and/or modified sequence
tctgcccttgttaattaccggagcgacagactagggagctccgcccgggatttgcccatcggcggaggcgccaggctcccgtttctccccatccctctcgctgccgtccaggtgcaccgcctgcctctcagcaggatggacgtgatggatggctgccagttctcaccttctgagtacttctacgacggctcctgcataccgtcccccgagggtgaatttggggacgagtttgtgccgcgagtggctgccttcggagcgcacaaagcagagctgcagggctcagatgaggacgagcacgtgcgagcgcctaccggccaccaccaggctggtcactgcctcatgtgggcctgcaaagcctgcaagaggaagtccaccaccatggatcggcggaaggcagccactatgcgcgagcggaggcgcctgaagaaggtcaaccaggctttcgaaaccctcaagaggtgtaccacgaccaaccccaaccagaggctgcccaaggtggagatcctcaggaatgccatccgctacatcgagagcctgcaggagttgctgagagagcaggtggagaactactatagcctgccgggacagagctgctcggagcccaccagccccacctccaactgctctgatggcatgcccgaatgtaacagtcctgtctggtccagaaagagcagtacttttgacagcatctactgtcctgatgtatcaaatgtatatgccacagataaaaactccttatccagcttggattgcttatccaacatagtggaccggatcacctcctcagagcaacctgggttgcctctccaggatctggcttctctctctccagttgccagcaccgattcacagcctgcaactccaggggcttctagttccaggcttatctatcatgtgctatgaactaattttctggtctatatgacttcttccaggagggcctaatacacaggaagaagaaggcttcaaaaagtcccaaaccaagacaacatgtacataaagatttcttttcagttgtaaatttgtaaagattaccttgccactttataagaaagtgtatttaactaaaaagtcatcattgcaaataatactttcttcttctttattattctttgcttagatattaatacatagttccagtaatactatttctgatagggggccattgattgagggtagcttgttgcaatgcttaacttatatatacatatatatatattataaatattgctcatcaaaatgtctctggtgtttagagctttatttttttctttaaaacattaaaacagctgagaatcagttaaatggaattttaaatatatttaactatttcttttctctttaatcctttagttatattgtattaaataaaaatataatactgcctaatgtatatattttgatcttttcttgtaagaaatgtatcttttaaatgtaagcacaaaatagtactttgtggatcatttcaagatataagaaattttggaaattccaccataaataaaattttttactacaag

SEQ ID NO: 157693 - DNA, 768 bp, Artificial Sequence
  derived and/or modified sequence
atggacgtgatggacggctgccagttcagccccagcgagtacttctacgacggcagctgcatccccagccccgagggcgagttcggcgacgagttcgtgcccagagtggccgccttcggcgcccacaaggccgagctgcagggcagcgacgaggacgagcacgtgagagcccccaccggccaccaccaggccggccactgcctgatgtgggcctgcaaggcctgcaagagaaagagcaccaccatggacagaagaaaggccgccaccatgagagagagaagaagactgaagaaggtgaaccaggccttcgagaccctgaagagatgcaccaccaccaaccccaaccagagactgcccaaggtggagatcctgagaaacgccatcagatacatcgagagcctgcaggagctgctgagagagcaggtggagaactactacagcctgcccggccagagctgcagcgagcccaccagccccaccagcaactgcagcgacggcatgcccgagtgcaacagccccgtgtggagcagaaagagcagcaccttcgacagcatctactgccccgacgtgagcaacgtgtacgccaccgacaagaacagcctgagcagcctggactgcctgagcaacatcgtggacagaatcaccagcagcgagcagcccggcctgcccctgcaggacctggccagcctgagccccgtggccagcaccgacagccagcccgccacccccggcgccagcagcagcagactgatctaccacgtgctgtag

SEQ ID NO: 157694 - DNA, 768 bp, Artificial Sequence
  derived and/or modified sequence
atggatgtcatggacggatgccagttttctccctccgaatacttctatgatggatcctgcattccgagccccgaaggggagtttggcgacgagtttgtgccccgggtggctgctttcggggcccataaagccgaactgcagggctccgacgaagacgagcacgttagggctcccacgggacaccatcaggccggccactgcctaatgtgggcttgtaaggcctgtaaacgaaaaagtacaacgatggatagacggaaggccgccaccatgcgggagagacgcaggcttaagaaggtgaatcaagcattcgaaaccctcaaacggtgcacaactacaaacccaaaccagaggctcccaaaggttgaaattttgaggaatgctattcgctacattgagagtttgcaggaactgctgcgggagcaggtggaaaactattatagcctcccagggcagtcctgtagcgagccaacatctcccacatctaattgctccgatggtatgcccgagtgcaactcacccgtatggtccagaaaaagctctacgtttgacagtatctactgccctgatgtgtctaatgtgtacgcaaccgataagaacagcctgtcatctctcgactgtttatctaacattgttgacaggataaccagttccgaacagcctggactccccctccaagacctagcctcgctgtcccctgtggcttctacggactctcaacccgcaactccgggtgcttcatcatctcgtctgatctaccacgtcctgtag

SEQ ID NO: 157695 - DNA, 768 bp, Artificial Sequence
  derived and/or modified sequence
atggatgtgatggatggctgccagttcagccccagcgagtacttctatgatggcagctgcatccccagccctgagggggagtttggagatgaatttgtgccccgggtggccgcctttggagcccacaaggccgagctgcagggcagtgatgaagatgagcacgtgcgggcccccaccggccaccaccaggccggccactgcctgatgtgggcctgcaaggcctgcaagaggaagagcaccaccatggacaggaggaaggccgccaccatgagggagcggcggcggctgaagaaggtgaaccaggcctttgagaccctgaagcgctgcaccaccaccaaccccaaccagaggctgcccaaggtggagatcctgagaaatgccatccgctacatcgagagcctgcaggagctgctgcgggagcaggtggagaactactacagcctgcccggccagagctgcagcgagcccaccagccccaccagcaactgcagtgatggcatgcctgagtgcaacagccctgtgtggagcaggaagagcagcacctttgacagcatctactgcccagatgtgtccaatgtgtatgccacagacaagaacagcctgagcagcctggactgcctgagcaacatcgtggaccgcatcaccagcagcgagcagcccggcctgcccctgcaggacctggccagcctgagccctgtggccagcacagacagccagcctgccacccctggggccagcagcagccgcctcatctaccacgtgctgtag

SEQ ID NO: 157696 - DNA, 768 bp, Artificial Sequence
  derived and/or modified sequence
atggacgtgatggacggctgccagttcagccccagcgagtacttctatgacggctcctgcattccatctccggaaggagagtttggcgacgaatttgtgcccagggtagctgcgtttggagcccataaggcggagttgcaagggtcagatgaggatgaacatgtgagagctcctaccggccatcatcaggccggacattgcttgatgtgggcttgcaaggcgtgtaaaaggaaaagcactactatggataggagaaaggctgccaccatgcgggagcgtaggaggctgaagaaggtaaaccaagcattcgaaaccctaaagcgctgtacaaccacaaatcctaatcagcgtttacccaaggtggagatacttcgcaacgccataaggtatatcgagtccctccaggagctgctccgcgagcaggtcgagaactactacagcctccctggacaatcatgctctgaacctacatcccccacctccaactgcagtgatggaatgcctgagtgcaatagccctgtctggtcaagaaaatcttccacattcgactccatctactgccccgatgtttccaatgtctacgccaccgacaaaaactccttgagctcccttgactgcttatctaatatcgtggacagaataacctccagtgaacagcccgggctccctctgcaagacttggctagcctcagccctgtggccagcacagacagccagcccgccaccccgggggcgtcctctagtaggttaatatatcacgtgctgtag

SEQ ID NO: 157697 - DNA, 768 bp, Artificial Sequence
  derived and/or modified sequence
atggacgtgatggacgggtgtcaattctccccttccgagtatttctatgatgggtcgtgcataccatcacccgagggggagttcggtgatgagtttgtgccacgggtcgccgcattcggagcacacaaggcagaactgcaggggagcgatgaggatgaacatgtaagagcgcctaccggtcatcatcaggctggccattgcctaatgtgggcatgtaaagcatgcaaacggaagtcaacaactatggatcgcagaaaggcggctactatgcgcgagagacgcagactgaagaaggtgaaccaggctttcgagacgcttaagcggtgcactacaactaaccccaatcagcggctacccaaagtagagattctgcgaaatgctattagatacatcgagtccttgcaggaactgctgagggagcaggttgaaaactattatagcctccccggacagtcctgcagcgagcctacgagtcctacctctaactgttctgacgggatgcctgaatgcaattcacccgtttggtcccgcaaatcatccacctttgacagcatctattgtcctgacgtgtcaaacgtatatgccaccgataagaactcgctgagctcgcttgattgcctctctaacatcgtcgatcgcatcacttcaagcgagcagccaggtctcccacttcaggaccttgcatccttgtctcctgtcgcatcaacagattcacagcccgctactcctggggcttctagctccaggctgatctaccacgtgctctag

SEQ ID NO: 157698 - DNA, 1542 bp, Artificial Sequence
  derived and/or modified sequence
acccaggccaacaggcgtctgcccttgttaattaccggagcgacagactagggagctccgcccgggatttgcccatcggcggaggcgccaggctcccgtttctccccatccctctcgctgccgtccaggtgcaccgcctgcctctcagcaggatggacgtgatggatggctgccagttctcaccttctgagtacttctacgacggctcctgcataccgtcccccgagggtgaatttggggacgagtttgtgccgcgagtggctgccttcggagcgcacaaagcagagctgcagggctcagatgaggacgagcacgtgcgagcgcctaccggccaccaccaggctggtcactgcctcatgtgggcctgcaaagcctgcaagaggaagtccaccaccatggatcggcggaaggcagccactatgcgcgagcggaggcgcctgaagaaggtcaaccaggctttcgaaaccctcaagaggtgtaccacgaccaaccccaaccagaggctgcccaaggtggagatcctcaggaatgccatccgctacatcgagagcctgcaggagttgctgagagagcaggtggagaactactatagcctgccgggacagagctgctcggagcccaccagccccacctccaactgctctgatggcatgcccgaatgtaacagtcctgtctggtccagaaagagcagtacttttgacagcatctactgtcctgatgtatcaaatgtatatgccacagataaaaactccttatccagcttggattgcttatccaacatagtggaccggatcacctcctcagagcaacctgggttgcctctccaggatctggcttctctctctccagttgccagcaccgattcacagcctgcaactccaggggcttctagttccaggcttatctatcatgtgctatgaactaattttctggtctatatgacttcttccaggagggcctaatacacaggaagaagaaggcttcaaaaagtcccaaaccaagacaacatgtacataaagatttcttttcagttgtaaatttgtaaagattaccttgccactttataagaaagtgtatttaactaaaaagtcatcattgcaaataatactttcttcttctttattattctttgcttagatattaatacatagttccagtaatactatttctgatagggggccattgattgagggtagcttgttgcaatgcttaacttatatatacatatatatatattataaatattgctcatcaaaatgtctctggtgtttagagctttatttttttctttaaaacattaaaacagctgagaatcagttaaatggaattttaaatatatttaactatttcttttctctttaatcctttagttatattgtattaaataaaaatataatactgcctaatgtatatattttgatcttttcttgtaagaaatgtatcttttaaatgtaagcacaaaatagtactttgtggatcatttcaagatataagaaattttggaaattccaccataaataaaattttttactacaagaaata

SEQ ID NO: 157699 - protein, 420 aa, Artificial Sequence
  derived and/or modified sequence
MMYSPICLTQDEFHPFIEALLPHVRAIAYTWFNLQARKRKYFKKHEKRMSKDEERAVKDELLSEKPEIKQKWASRLLAKLRKDIRQEYREDFVLTVTGKKHPCCVLSNPDQKGKIRRIDCLRQADKVWRLDLVMVILFKGIPLESTDGERLMKSPHCTNPALCVQPHHITVSVKELDLFLAYYVQEQDSGQSGSPSHNDPAKNPPGYLEDSFVKSGVFNVSELVRVSRTPITQGTGVNFPIGEIPSQPYYHDMNSGVNLQRSLSSPPSSKRPKTISIDENMEPSPTGDFYPSPSSPAAGSRTWHERDQDMSSPTTMKKPEKPLFSSASPQDSSPRLSTFPQHHHPGIPGVAHSVISTRTPPPPSPLPFPTQAILPPAPSSYFSHPTIRYPPHLNPQDTLKNYVPSYDPSSPQTSQSWYLG

SEQ ID NO: 157700 - DNA, 8159 bp, Artificial Sequence
  derived and/or modified sequence
cgccttttttgaaaaagcattttaccaccaaccaccaccccaatccaacccacaccgaaccttcgcgcaccccctacaccccaacaacaacaacaactgcaaaatagaaaacaaatccccaaacccaggcgaaaagcagccaacaccggcggcggcggcggcctcggcaagcacggccagcgcgctcggactgcaagagggttaaaagtgtagattggatttcacccctggaaatctagcacgccgagtgaacttgaatctttggctatttaaggaggactgggtttgttgtgaagttgcggtgatccagcgcagagccccgtcctgattgatcgcatcgcggggctcagatgactgtaaaatgaatagatgaaattcttgcttctcgaagattttcttgggcatctcccggaaagtgcgttttaaggcgaagtcatgatgtattctcccatctgtctcactcaggatgaatttcacccattcatcgaggcacttcttccacatgtccgtgcaattgcctatacttggttcaacctgcaggctcgaaaacgcaagtactttaaaaagcatgagaagcgaatgtcaaaggatgaagaaagagcagtcaaagatgagcttctcagtgaaaagcctgaaatcaaacagaagtgggcatccaggctccttgccaaactgcgcaaagatattcgccaggagtatcgagaggactttgtgctcaccgtgactggcaagaagcacccgtgctgtgtcttatccaatcccgaccagaagggtaagattaggagaatcgactgcctgcgacaggcagacaaagtctggcgtctggatctagtcatggtgatcctgttcaaaggcatccccttggaaagtaccgatggagagcggctcatgaaatccccacattgcacaaacccagcactttgtgtccagccacatcatatcacagtatcagttaaggagcttgatttgtttttggcatactacgtgcaggagcaagattctggacaatcaggaagtccaagccacaatgatcctgccaagaatcctccaggttaccttgaggatagttttgtaaaatctggagtcttcaatgtatcagaacttgtaagagtatccagaacgcccataacccagggaactggagtcaacttcccaattggagaaatcccaagccaaccatactatcatgacatgaactcgggggtcaatcttcagaggtctctgtcttctccaccaagcagcaaaagacccaaaactatatccatagatgaaaatatggaaccaagtcctacaggagacttttacccctctccaagttcaccagctgctggaagtcgaacatggcacgaaagagatcaagatatgtcttctccgactactatgaagaagcctgaaaagccattgttcagctctgcatctccacaggattcttccccaagactgagcactttcccccagcaccaccatcccggaatacctggagttgcacacagtgtcatctcaactcgaactccacctccaccttcaccgttgccatttccaacacaagctatccttcctccagccccatcgagctacttttctcatccaacaatcagatatcctccccacctgaatcctcaggatactctgaagaactatgtaccttcttatgacccatccagtccacaaaccagccagtcctggtacctgggctagcttggttcctttccaagtgtcaaataggacacccatcttaccggccaatgtccaaaattacggtttgaacataattggagaacctttccttcaagcagaaacaagcaactgagggaaaaagaaacacaacaatagtttaagaaattttttttttaaataaaaaaaaaggaaaagaggaagactggacaaaacaacacaaaggcagaaaggaaagaaactgaagaaagaagataatagaccagcaattgcagcacttacaatcactaattcccttaaggttgaaactgtaatgacataaaaagggtcgatgatatttcactgatggtagatcgcagcccctgcaacgtagcctttgttacatgaagtccgctgggaaatagatgttctgtctctatgacaatatattttaactgactttctagatgccttaatatttgcatgataagctagttttattggtttagtattcttgttgtttacgcatggaatcactattcctggttatctcaccaacgaaggctaggaggcggcgtcagaggtgctgggtgacagagccatgagccagccattttataagcactctgatttctaaaagttaaaaaaaatatatgaaatctctgtagcctttagttatcagtacagatttattaaatttcggcccttaacccagccttttccagtgtgtaacccagtttgaaatcttaaaaaaagaaaaaatgaaaaaaaaaggaaaaaaagaaaaaaggaaaaaaacagtttgaacacaaaggctctatggaagaaatgcctctatgtaggtgaagtgttctctctgcatgcaacagtaaaaattaatataatattttccccacaaaagaaacacttaacagaggcaagtgcaatttataaatttatatctaaaggggaatcatgattataagtccttcagcccttggactctaaattgaggggattaaaaagaatttaaaataattttgaacgaatttattttcccctcagtttttgagggcattaaaaaggcattaaatcaagacaaatcatgtgcttgagaaaaataaaattaatgaaaacacagcacttatgttggtttagctgcagcctccttggaggtagaatttatttatttaaaattactggttgcatcaagaacccatagggtgtacaaaaggttctataaaatctgcattatagagacaaagaggcaggcaaatccatgtcacaagggtaaagcttacagtttacaaactgggaacgccagggtgtaggatataaaaacgcactcttgagaaaacaaatgtaatcagggtgctgaaaacttgcatggtgctttcagacattagccttgttcaacaaatttcttgtattgacagatccatagtgtgcatgggcagacacattttgcctctatgtctcttaaaattttaattaaaaatactctttccagtaatcctaatttgcacgaagatataatgtccacattacgtgccttgccttgaaatctaaaaaacaaaaaacaaaaaaaaaaaaacaaaaaaatacaacaaagtgacatcactacacttgttttgctgcatttattatcattttaaatctttaccatttttatgacaaaatattttgtactccagacgaagaaaaatgtgtgacatcatggattttttagacagttatacctttatctcacatttataaagcatatcatggctgtgtatagttgccgcttaaaaattgtaatcgaccagcaatattttcagtattttggtgtttttttctattaacctttcatgtttttcatcttccaattaatatttgggggggaggggtttcaaatttatacgaattatgcaataccaagttttgcctatgtaggtagtgcttttagctgtattggttattataggtaagtacacagatttaaaaaaaaaataatgtatgcttttttgtttgtttgtttgttttaattgaccaaagtgggtactgctatttttgcagtgtgatgaggtccttttgtgtactgagagatggacaggggattttttttaatatacatatatatatattctggggtgggtgggaggatttttaacactttgcagtgtagctgtgaagcagtgcaccctgagatgggcctgggctgcaaagcgactgttctgcctactgtgacaaacttcaacttacacaggttcccctctctaacttcccacctgggttgcaagctgaactcattactggttttcataacaacacaatagtaagaacaagcaaacacaacaaattctcctggaggcagacttggcttaaaaaggcagacttggcttggtgatagtttttcttgaaagttccagatccacagtggagagtgagcctgtctcatatttggcaaaaatatttgttgaaatgtccacataggggatgttggatgtttaacacttttgagagtttaacacatgaatattctttctcctagaaaacacattagacctgttggagggagtctcccgtattccttttctgccacttttcgtccccatttcatttcattaatgataggatatgatttacctgtgacttactacttcaaatggatggcagtgcacttggatttttttttaatatccagaagattgaacagagggttgctattgttgaatgtatttggactgatagattaaaatcaaagttcaatttttaaggaacaaaaaagtaaatcctgttttcattttatctccccttttaaaactgagaaccagagcagaagggaaatatagaattttaagcaattaatcttcctgtggatgaattaaacccattagatgctgatgggatttttttaaggaatggtaccttaactatatatttgatttcgtttcccctgagggctagaggctgaatggaggctggttttattttgcctttccctcaccgcccagtcccattgagtgtattcattactagaaggaaaatctttcagaattggtgacacatggtaggctgtcttaaggagtcccctggcccccttcccctaggccatggcctaataaaataaactgtcaattgttctcacagcatatcatttaataatgaatactttagaacaatgcttatgggctggagaattgtatttgattagcccattcagtttgatagcccaaatgctgaacagcacagcgggatcctagcagtgcaagttcaaaagtaagtccaatcatttctgtgatactcgccctggtagcaaacagatcatctcagccaagctcttcatgtatctttgacctattaggtgaacaaatgaacctcacaggacacacagtattttttaaaggcagactcgctctcttttttgccagtgagcagttctagctaaccaagttacacactgtgggtattcctgcctgcctcttgaatacaaaggcctagttcaagtgttgctttttttatttcaaatcaattttttcttctttcctttttgagataaaactattaaaagtactactatatatataaaatctcaaatcaacttttcggcctcctcctcgtgtaccaggaagtatattctgacgaagggccccacttttgcaggtcttgcacgcccctcccttacccagaactgcagagcttcaggatggcgaaggtcacccaagggcatgagtagggagtggtgtctccaaccatcagttccgtggcactgttcagcctttgtgtgctgccctgccacccaccactcacagtgcctctgaagcgtgttacccctggagtgacgtgagcatttgaggcttgtctaaggaaaaaaataaaaggcagtgaaggagactgtacataaagacatggcaaaaatcttaattatagcaatatagttatcgggtaatgttcgggtgggcagctccattaaaaaatatgtgaatgaatctgtgaagctgcaagtagcgagaagagcgaaaggtcttcttaatgaaccgcctaccttgtagacagtaatttgtacactgtatagttttgttaagaattttttttaaattaaaattcccatgtttgtaaagctaactttttaacaattataatggaactatatgttgtttccatttttaaagtaaacaagaatattccttgtttagagactggacttgagttaaaactctccagtctcttaagttatgtattaaaaagaaaatctgtccatgttaggagttatttcacagattcctgtgcttgaaaagcataggatactaatcctttaaaaaagtgtaaatggagaaaagttatattttatgaaggttattttgttgtatttagtattggaaaagttggtttccagagcatttcagaatgtcgaagcaccactgtctttttattagtatatacggcctttagcaaaagtttttgtgattgttacgtgatggtatttaaggttaagtttcacagagcattcaggataggcagaaaactaaaacagtgctatgtctcacataacgtgtcctcagggagcagaatcttggatttgtgacttgtagcttcataaggactcaacgaaagagattgcacagggacatcttcagcggtgtgacagcaggacatgttctttacctagattcaaattctatgtactgtgtgaaatgatgaaggctgcagaaagttatcccatattcagtgtacagtattcatttttaatgaaacaactctacaatattgctggcagataggccccaagcatgacattcaatatagtttacatgttcctgtcaaggtcttttgttaacattaaccagctgcatgctttctggactttaagaaattgggtttctatagaaaactttttttttttttttttttttaatgtgcaggctattcaagttcaatagtaaaagctcaaaaatgaatgttctactccatgctgaaggagctgaaagctgccttcttcatattttgcactttctggtagttcccctgttttttctaattccctaaaattgtgtgggtggagtggagccctgcagttggggggtaacatggaccactgattttgccctttgaccctgcacaatgacctttgcatcagccaaactcattgccatgacaactctttgtactgtgtccgtgccacagatctgttggtcacattgttaatagtaaaggggacaagttggagacggtcaatttttacattttttgttgcaattttttcttcaatggttgtaagtagtttttttttttttttaataataaaagggttcactagttaatactctagaaatatctgtgtgttgcaattcaaatgtatgttgagattgtgaaaagcgcttcagtgccactagcttaccggtacactagactaagcccttgatgacttattgcatgatacagtaccaggaacaacaggtggcctaaatacatgaaaagcagtgtaagctagtgacactaaagccagtcttgtattactgtatttttgacagaatggttttgaaaactgtgctacagggactgatgtggcaaatatatctctttatgcagaaggaagtctttttttttcttttttttttttttaagaagtatggctttttatgcatccttcatcgagggcattgaagttgcatggactgataaaagttgatgcaaaacaagaaagaaacaaacaaaaaaaaaaaaccagcaaaatgtttaccaaaaaactcaaacaaatgagcagtgcctgttcaatttcacagtctctgttgagttcagttgtaaatatgtttcaaatgacattttcttgggaaaaaaaatctctacaacattgtagaatgtgaggggtaactacatcccaggcataggtttctcaaagctgcagtagattatgtcttcatcaagctgttaatttgtgcttatatcatatagaacttttagcatcctgggaagagctgcccccacctcaatgatatttctctgagaacaacttttgtaggactgtgtgtttctttagatacatttagtacaactgtaggtgacgagtagtcagttattgcttgctagctacacaccagggttgatccattttaaaacttttggcattttgtcctcatgggccataaatacagaaccttgtattttaattaaatttttttacaaaaggaggcacatgcacaatctccatgtaacaaacctttagcagtaggatgtattatacgacagttacttaatttctagagttcaggcctctgggatcaaccccagactgggccagaatgttagtgaaggttttattgtgcccggttggaggataacgttctttgggtactttttgtgggttgcaaatgaactcaattgccacaagttttaaactggtgtaaatcaagcttgacttaatgtgattgttactgttatatccagcctatactgctagcagctgctcatactgcagtcaattactggaagcggatatatttcctatgcaaaaactgtttaaacaataaaatgagctatgctacaga

SEQ ID NO: 157701 - DNA, 603 bp, Artificial Sequence
  derived and/or modified sequence
atgatgtacagcccaatttgccttacgcaggatgagtttcatcctttcatcgaggcattgttgccccacgtcagggctatcgcctatacctggtttaacttgcaggccagaaaaagaaaatacttcaagaaacacgagaagcgtatgtctaaggacgaggagcgagcagtcaaggacgaactcttgagtgagaagcctgagatcaaacagaaatgggctagcaggctgctggcaaaactgcggaaggatatacgtcaggagtaccgggaagactttgtcctcacagtcaccggcaaaaagcacccatgctgtgtgttgtctaatcctgatcagaagggaaaaatacgtaggattgactgtctgaggcaggctgataaggtgtggcggttggatctggtcatggtcattctgttcaagggaatcccactggaatccaccgacggcgaacgacttatgaagagcccacactgcaccaatcccgccttgtgcgttcagccacaccacataaccgtttctgtgaaagagctagacctctttctggcctattacgtacaggaacagggcaaaaatttcttctccagtaacaagtgcataaaaatctag

SEQ ID NO: 157702 - DNA, 507 bp, Artificial Sequence
  derived and/or modified sequence
atgaatagcggcgttaatctacagcggtctttgtcatccccccccagttcaaagcggccaaagacgatcagcatcgatgaaaacatggagccttccccaacaggagacttctacccaagcccatccagcccggcagccgggtcacgcacctggcatgagagagatcaggacatgagtagtcccaccaccatgaaaaagccggaaaaaccattgtttagcagcgcatccccacaagactcatcacctagactgtctacattcccccagcaccaccaccctgggattcctggcgtggctcattcggtaatctctactcggactccaccacccccatctccactccctttccctacacaggccatactcccgcccgcaccgagctcctacttcagccatcctacgatcaggtaccccccacacttgaacccccaggacactctgaaaaactacgtaccctcttacgacccctctagcccccagacctcacaatcctggtaccttggctag

SEQ ID NO: 157703 - DNA, 1263 bp, Artificial Sequence
  derived and/or modified sequence
atgatgtactcccccatctgcctgactcaagacgagtttcacccctttattgaagcactgctccctcatgtcagggcaatcgcatatacatggttcaatctacaagccaggaaacgtaagtactttaagaagcatgaaaaacgcatgtccaaggacgaggagagagcagtcaaagacgaactcctctccgaaaagccagaaataaagcagaaatgggcaagtagacttctggcgaagctgcggaaagacatccgccaggagtaccgggaggatttcgtgcttactgttacaggaaaaaaacacccttgctgtgtgctatcgaacccagaccagaagggcaaaataaggagaatcgactgcctcagacaagccgataaggtttggagactggatctggttatggttattctgtttaaagggatccctctcgaaagcacggatggtgaacgcctaatgaagtccccacactgtacgaaccccgccctttgtgtccaaccccaccacatcacagtgtcagtaaaagaactcgatcttttcctagcttactatgtgcaggagcaggacagcggtcagtccggtagtcctagccacaacgatcctgcaaaaaatccccccgggtacctggaggattcttttgtgaagtccggcgtcttcaacgtgagtgagctcgttcgggtgtctcgcacccccattacacagggaactggtgtgaatttccccattggcgagatcccatcacagccttactaccacgatatgaatagcggtgtgaaccttcaacggtcattgtctagcccccctagctctaaaagacctaaaacgatttccattgacgagaacatggagccttcccccactggagatttttatccctctcccagtagtcccgccgcggggtccaggacctggcacgaacgagaccaagatatgtcctccccgactactatgaaaaagccggaaaaacccctgtttagttctgcaagcccccaagacagctctccacggctcagcacattcccccagcaccaccacccaggcatccctggcgtggcccatagtgtgattagcacccgcaccccaccaccccctagccccttacccttcccaacgcaggccatactgcctcctgccccttcctcctatttctcccatcccaccatccgctatccaccacatcttaatccacaggacaccttaaagaactatgtgccatcctatgatcccagttctcctcagacgtcacaaagctggtacctaggctag

SEQ ID NO: 157704 - DNA, 603 bp, Artificial Sequence
  derived and/or modified sequence
atgatgtacagccccatctgcctgacccaggatgagttccaccccttcatcgaggccctgctgccccacgtgcgggccatcgcctacacctggttcaacctgcaggccaggaagaggaagtacttcaagaagcatgagaagaggatgagcaaggatgaggagagagctgtgaaggatgagctgctgtctgagaagccagagatcaagcagaagtgggccagccggctgctggccaagctgaggaaggacatccggcaggagtaccgggaggactttgtgctgactgtgacaggcaagaagcacccctgctgcgtgctgagcaacccagaccagaagggcaagatcagaagaattgactgcctgcggcaggccgacaaggtgtggaggctggacctggtgatggtgatcctcttcaagggcatccccctggagagcacagatggagagcggctgatgaagagcccccactgcaccaacccagccctgtgtgtgcagccccaccacatcaccgtgtctgtgaaggagctggacctcttcctggcctactacgtgcaggagcagggcaagaacttcttcagcagcaacaagtgcatcaagatctag

SEQ ID NO: 157705 - DNA, 507 bp, Artificial Sequence
  derived and/or modified sequence
atgaacagcggcgtgaacctgcagaggagcctgagcagcccccccagcagcaagaggcccaagaccatcagcattgatgagaacatggagcccagccccaccggggacttctaccccagccccagcagccctgctgctggcagcaggacctggcatgagcgggaccaggacatgagcagccccaccaccatgaagaagccagagaagcccctcttcagcagcgccagcccccaggacagcagcccccggctgagcaccttcccccagcaccaccaccctggcatccctggggtggcccacagcgtcatcagcaccaggaccccacctccacccagccccctgcccttccccacccaggccatcctgcccccagcccccagcagctacttcagccaccccaccatccgctacccaccccacctgaacccccaggacaccctgaagaactacgtgcccagctatgaccccagcagcccccagaccagccagagctggtacctgggctag

SEQ ID NO: 157706 - DNA, 1263 bp, Artificial Sequence
  derived and/or modified sequence
atgatgtacagccccatctgcctgacccaggatgagttccaccccttcatcgaggccctgctgccccacgtgcgggccatcgcctacacctggttcaacctgcaggccaggaagaggaagtacttcaagaagcatgagaagaggatgagcaaggatgaggagagagctgtgaaggatgagctgctgtctgagaagccagagatcaagcagaagtgggccagccggctgctggccaagctgaggaaggacatccggcaggagtaccgggaggactttgtgctgactgtgacaggcaagaagcacccctgctgcgtgctgagcaacccagaccagaagggcaagatcagaagaattgactgcctgcggcaggccgacaaggtgtggaggctggacctggtgatggtgatcctcttcaagggcatccccctggagagcacagatggagagcggctgatgaagagcccccactgcaccaacccagccctgtgtgtgcagccccaccacatcaccgtgtctgtgaaggagctggacctcttcctggcctactacgtgcaggagcaggacagcggccagagcggcagccccagccacaatgaccctgccaagaaccccccaggctacctggaggacagctttgtgaagtctggagtcttcaacgtgtctgagctggtgcgggtgtccaggacccccatcacccagggcactggagtgaacttccccatcggggagatccccagccagccctactaccatgacatgaacagcggcgtgaacctgcagaggagcctgagcagcccccccagcagcaagaggcccaagaccatcagcattgatgagaacatggagcccagccccaccggggacttctaccccagccccagcagccctgctgctggcagcaggacctggcatgagcgggaccaggacatgagcagccccaccaccatgaagaagccagagaagcccctcttcagcagcgccagcccccaggacagcagcccccggctgagcaccttcccccagcaccaccaccctggcatccctggggtggcccacagcgtcatcagcaccaggaccccacctccacccagccccctgcccttccccacccaggccatcctgcccccagcccccagcagctacttcagccaccccaccatccgctacccaccccacctgaacccccaggacaccctgaagaactacgtgcccagctatgaccccagcagcccccagaccagccagagctggtacctgggctag

SEQ ID NO: 157707 - DNA, 603 bp, Artificial Sequence
  derived and/or modified sequence
atgatgtacagccccatctgcctgacccaggacgagttccaccccttcattgaggccctgctgccccacgtccgagccatcgcatatacttggttcaacctgcaagctagaaagcggaagtactttaagaagcacgagaaaaggatgagcaaggacgaggaacgcgcagtaaaagacgagctgctcagtgaaaagcctgaaatcaagcaaaaatgggcaagtaggctgctcgccaaactccggaaggatatccggcaggaatatagagaagatttcgtgcttacagtcaccgggaaaaaacacccttgttgcgtgctgagcaatccggaccagaaaggtaaaattagaaggatagattgtcttaggcaggcggataaagtgtggcgactggatctggtcatggtgattctatttaaggggattccccttgagtctaccgacggcgagagacttatgaaaagccctcattgcactaacccagccctgtgcgtgcagccacatcatataaccgtttctgtcaaggagctcgatctattccttgcctattatgtgcaagagcaaggtaagaacttcttttcttctaataaatgcatcaagatctag

SEQ ID NO: 157708 - DNA, 507 bp, Artificial Sequence
  derived and/or modified sequence
atgaacagcggcgtgaacctgcagcggagcctgagcagcccccccagcagcaagaggccaaaaactatttcaatagacgagaacatggaaccaagcccaaccggcgatttttacccttctccttccagcccagctgccgggagccgcacctggcatgaaagagaccaggacatgtcaagtccaactaccatgaagaagcctgagaagccactgttctcaagcgcctccccgcaggattcctccccgcggctgtctacattcccccaacatcatcatcctggtattcccggggtggcccatagtgtcatttccacaaggacgcccccacccccctccccgctgcccttccccacccaggcgatcctgccccccgccccctcaagctacttctcacaccctacaattcggtatcccccccatcttaatccgcaggacactctgaaaaattacgtgccgtcatatgatccatcctcaccacaaacctctcagtcctggtacttgggctag

SEQ ID NO: 157709 - DNA, 1263 bp, Artificial Sequence
  derived and/or modified sequence
atgatgtacagccccatctgcctgacccaggacgagttccaccccttcattgaagcactgttaccccacgttcgcgcgatagcttacacttggtttaatttgcaggctcgcaaacgaaaatatttcaaaaagcacgagaagcgcatgagcaaggatgaggagagggccgtgaaggacgaactgctgagcgagaagccggaaattaaacagaaatgggcctcgcgcttgttggcaaagcttaggaaggacatccgccaggagtaccgcgaggacttcgtgctgaccgttactggaaaaaagcacccttgttgtgtgctgagcaacccggatcagaagggcaaaattcgcagaatcgattgcttgaggcaggcagacaaggtgtggaggctagatctggtgatggtcatcctgtttaaaggcatccccctcgagagcaccgatggcgaaagactgatgaagagcccgcattgtactaatcccgctctgtgcgtgcaaccgcaccacatcacagtgtccgtgaaagagcttgatctcttcctcgcctactatgttcaggagcaagattccggacagagcggctcacctagccataacgacccggctaagaacccacccggttacctggaggacagttttgtgaagagcggagtcttcaacgtgtctgaactggtgagggtgtcccggacgccaataacccagggaactggcgtgaactttccgatcggagagatcccgtcccagccatactaccacgacatgaacagcggggtcaacctccagcggagcctcagctcaccaccctcgtctaaacgaccaaagactatttctatagacgaaaatatggagccctctccaacgggagatttttacccttcacccagcagtcctgccgccggcagccgcacctggcatgaaagagaccaagacatgtcgtcaccgacaactatgaagaaaccggagaagcccctcttttcatctgctagcccgcaggatagttctccccggttgtctacatttcctcagcaccaccatccgggaatcccaggagtcgcccactccgtcatctccaccaggacaccccccccacctagccctctccccttccctacccaagccattctaccacctgcgcccagctcatacttcagccacccaaccatccgttacccaccccatctgaatcctcaggatacgctcaaaaattatgtgccctcgtacgatccatcctctccccagacttcgcaatcgtggtatttggggtag

SEQ ID NO: 157710 - DNA, 1274 bp, Artificial Sequence
  derived and/or modified sequence
gcccccctccccgccttttttgaaaaagcattttaccaccaaccaccaccccaatccaacccacaccgaaccttcgcgcaccccctacaccccaacaacaacaacaactgcaaaatagaaaacaaatccccaaacccaggcgaaaagcagccaacaccggcggcggcggcggcctcggcaagcacggccagcgcgctcggactgcaagagggttaaaagtgtagattggatttcacccctggaaatctagcacgccgagtgaacttgaatctttggctatttaaggaggactgggtttgttgtgaagttgcggtgatccagcgcagagccccgtcctgattgatcgcatcgcggggctcagatgactgtaaaatgaatagatgaaattcttgcttctcgaagattttcttgggcatctcccggaaagtgcgttttaaggcgaagtcatgatgtattctcccatctgtctcactcaggatgaatttcacccattcatcgaggcacttcttccacatgtccgtgcaattgcctatacttggttcaacctgcaggctcgaaaacgcaagtactttaaaaagcatgagaagcgaatgtcaaaggatgaagaaagagcagtcaaagatgagcttctcagtgaaaagcctgaaatcaaacagaagtgggcatccaggctccttgccaaactgcgcaaagatattcgccaggagtatcgagaggactttgtgctcaccgtgactggcaagaagcacccgtgctgtgtcttatccaatcccgaccagaagggtaagattaggagaatcgactgcctgcgacaggcagacaaagtctggcgtctggatctagtcatggtgatcctgttcaaaggcatccccttggaaagtaccgatggagagcggctcatgaaatccccacattgcacaaacccagcactttgtgtccagccacatcatatcacagtatcagttaaggagcttgatttgtttttggcatactacgtgcaggagcaaggtaagaatttcttttcttcaaataaatgcatcaagatatagatgtccttgcattaccaacaatccatagtaaaacaatcattttacaaagccgcataccaaaagtagactgaagtttgagctgtcacagatggtaggtcatttccaaacttggcctggtgggaggaaaaatggcctgcagatagccaggtgacagactgttacctgaggtttgttatataaatgtgggacttaataaactgctatgagctttattattcaaaaaaa

SEQ ID NO: 157711 - DNA, 840 bp, Artificial Sequence
  derived and/or modified sequence
atgaacagcacactgaggaggacacaaaagaagtagacagaatctctgcctctgcttaggagtatgcaatttagttggggcgacaaaacttaaatgctagaaccaataaaagaagattacaaagcaactcgcaaattctggacaatcaggaagtccaagccacaatgatcctgccaagaatcctccaggttaccttgaggatagttttgtaaaatctggagtcttcaatgtatcagaacttgtaagagtatccagaacgcccataacccagggaactggagtcaacttcccaattggagaaatcccaagccaaccatactatcatgacatgaactcgggggtcaatcttcagaggtctctgtcttctccaccaagcagcaaaagacccaaaactatatccatagatgaaaatatggaaccaagtcctacaggagacttttacccctctccaagttcaccagctgctggaagtcgaacatggcacgaaagagatcaagatatgtcttctccgactactatgaagaagcctgaaaagccattgttcagctctgcatctccacaggattcttccccaagactgagcactttcccccagcaccaccatcccggaatacctggagttgcacacagtgtcatctcaactcgaactccacctccaccttcaccgttgccatttccaacacaagctatccttcctccagccccatcgagctacttttctcatccaacaatcagatatcctccccacctgaatcctcaggatactctgaagaactatgtaccttcttatgacccatccagtccacaaaccagccagtcctggtacctgggctagcttgg

SEQ ID NO: 157712 - DNA, 8198 bp, Artificial Sequence
  derived and/or modified sequence
gcccgctcgccctcctgcgccctcccgcgcccccctccccgccttttttgaaaaagcattttaccaccaaccaccaccccaatccaacccacaccgaaccttcgcgcaccccctacaccccaacaacaacaacaactgcaaaatagaaaacaaatccccaaacccaggcgaaaagcagccaacaccggcggcggcggcggcctcggcaagcacggccagcgcgctcggactgcaagagggttaaaagtgtagattggatttcacccctggaaatctagcacgccgagtgaacttgaatctttggctatttaaggaggactgggtttgttgtgaagttgcggtgatccagcgcagagccccgtcctgattgatcgcatcgcggggctcagatgactgtaaaatgaatagatgaaattcttgcttctcgaagattttcttgggcatctcccggaaagtgcgttttaaggcgaagtcatgatgtattctcccatctgtctcactcaggatgaatttcacccattcatcgaggcacttcttccacatgtccgtgcaattgcctatacttggttcaacctgcaggctcgaaaacgcaagtactttaaaaagcatgagaagcgaatgtcaaaggatgaagaaagagcagtcaaagatgagcttctcagtgaaaagcctgaaatcaaacagaagtgggcatccaggctccttgccaaactgcgcaaagatattcgccaggagtatcgagaggactttgtgctcaccgtgactggcaagaagcacccgtgctgtgtcttatccaatcccgaccagaagggtaagattaggagaatcgactgcctgcgacaggcagacaaagtctggcgtctggatctagtcatggtgatcctgttcaaaggcatccccttggaaagtaccgatggagagcggctcatgaaatccccacattgcacaaacccagcactttgtgtccagccacatcatatcacagtatcagttaaggagcttgatttgtttttggcatactacgtgcaggagcaagattctggacaatcaggaagtccaagccacaatgatcctgccaagaatcctccaggttaccttgaggatagttttgtaaaatctggagtcttcaatgtatcagaacttgtaagagtatccagaacgcccataacccagggaactggagtcaacttcccaattggagaaatcccaagccaaccatactatcatgacatgaactcgggggtcaatcttcagaggtctctgtcttctccaccaagcagcaaaagacccaaaactatatccatagatgaaaatatggaaccaagtcctacaggagacttttacccctctccaagttcaccagctgctggaagtcgaacatggcacgaaagagatcaagatatgtcttctccgactactatgaagaagcctgaaaagccattgttcagctctgcatctccacaggattcttccccaagactgagcactttcccccagcaccaccatcccggaatacctggagttgcacacagtgtcatctcaactcgaactccacctccaccttcaccgttgccatttccaacacaagctatccttcctccagccccatcgagctacttttctcatccaacaatcagatatcctccccacctgaatcctcaggatactctgaagaactatgtaccttcttatgacccatccagtccacaaaccagccagtcctggtacctgggctagcttggttcctttccaagtgtcaaataggacacccatcttaccggccaatgtccaaaattacggtttgaacataattggagaacctttccttcaagcagaaacaagcaactgagggaaaaagaaacacaacaatagtttaagaaattttttttttaaataaaaaaaaaggaaaagaggaagactggacaaaacaacacaaaggcagaaaggaaagaaactgaagaaagaagataatagaccagcaattgcagcacttacaatcactaattcccttaaggttgaaactgtaatgacataaaaagggtcgatgatatttcactgatggtagatcgcagcccctgcaacgtagcctttgttacatgaagtccgctgggaaatagatgttctgtctctatgacaatatattttaactgactttctagatgccttaatatttgcatgataagctagttttattggtttagtattcttgttgtttacgcatggaatcactattcctggttatctcaccaacgaaggctaggaggcggcgtcagaggtgctgggtgacagagccatgagccagccattttataagcactctgatttctaaaagttaaaaaaaatatatgaaatctctgtagcctttagttatcagtacagatttattaaatttcggcccttaacccagccttttccagtgtgtaacccagtttgaaatcttaaaaaaagaaaaaatgaaaaaaaaaggaaaaaaagaaaaaaggaaaaaaacagtttgaacacaaaggctctatggaagaaatgcctctatgtaggtgaagtgttctctctgcatgcaacagtaaaaattaatataatattttccccacaaaagaaacacttaacagaggcaagtgcaatttataaatttatatctaaaggggaatcatgattataagtccttcagcccttggactctaaattgaggggattaaaaagaatttaaaataattttgaacgaatttattttcccctcagtttttgagggcattaaaaaggcattaaatcaagacaaatcatgtgcttgagaaaaataaaattaatgaaaacacagcacttatgttggtttagctgcagcctccttggaggtagaatttatttatttaaaattactggttgcatcaagaacccatagggtgtacaaaaggttctataaaatctgcattatagagacaaagaggcaggcaaatccatgtcacaagggtaaagcttacagtttacaaactgggaacgccagggtgtaggatataaaaacgcactcttgagaaaacaaatgtaatcagggtgctgaaaacttgcatggtgctttcagacattagccttgttcaacaaatttcttgtattgacagatccatagtgtgcatgggcagacacattttgcctctatgtctcttaaaattttaattaaaaatactctttccagtaatcctaatttgcacgaagatataatgtccacattacgtgccttgccttgaaatctaaaaaacaaaaaacaaaaaaaaaaaaacaaaaaaatacaacaaagtgacatcactacacttgttttgctgcatttattatcattttaaatctttaccatttttatgacaaaatattttgtactccagacgaagaaaaatgtgtgacatcatggattttttagacagttatacctttatctcacatttataaagcatatcatggctgtgtatagttgccgcttaaaaattgtaatcgaccagcaatattttcagtattttggtgtttttttctattaacctttcatgtttttcatcttccaattaatatttgggggggaggggtttcaaatttatacgaattatgcaataccaagttttgcctatgtaggtagtgcttttagctgtattggttattataggtaagtacacagatttaaaaaaaaaataatgtatgcttttttgtttgtttgtttgttttaattgaccaaagtgggtactgctatttttgcagtgtgatgaggtccttttgtgtactgagagatggacaggggattttttttaatatacatatatatatattctggggtgggtgggaggatttttaacactttgcagtgtagctgtgaagcagtgcaccctgagatgggcctgggctgcaaagcgactgttctgcctactgtgacaaacttcaacttacacaggttcccctctctaacttcccacctgggttgcaagctgaactcattactggttttcataacaacacaatagtaagaacaagcaaacacaacaaattctcctggaggcagacttggcttaaaaaggcagacttggcttggtgatagtttttcttgaaagttccagatccacagtggagagtgagcctgtctcatatttggcaaaaatatttgttgaaatgtccacataggggatgttggatgtttaacacttttgagagtttaacacatgaatattctttctcctagaaaacacattagacctgttggagggagtctcccgtattccttttctgccacttttcgtccccatttcatttcattaatgataggatatgatttacctgtgacttactacttcaaatggatggcagtgcacttggatttttttttaatatccagaagattgaacagagggttgctattgttgaatgtatttggactgatagattaaaatcaaagttcaatttttaaggaacaaaaaagtaaatcctgttttcattttatctccccttttaaaactgagaaccagagcagaagggaaatatagaattttaagcaattaatcttcctgtggatgaattaaacccattagatgctgatgggatttttttaaggaatggtaccttaactatatatttgatttcgtttcccctgagggctagaggctgaatggaggctggttttattttgcctttccctcaccgcccagtcccattgagtgtattcattactagaaggaaaatctttcagaattggtgacacatggtaggctgtcttaaggagtcccctggcccccttcccctaggccatggcctaataaaataaactgtcaattgttctcacagcatatcatttaataatgaatactttagaacaatgcttatgggctggagaattgtatttgattagcccattcagtttgatagcccaaatgctgaacagcacagcgggatcctagcagtgcaagttcaaaagtaagtccaatcatttctgtgatactcgccctggtagcaaacagatcatctcagccaagctcttcatgtatctttgacctattaggtgaacaaatgaacctcacaggacacacagtattttttaaaggcagactcgctctcttttttgccagtgagcagttctagctaaccaagttacacactgtgggtattcctgcctgcctcttgaatacaaaggcctagttcaagtgttgctttttttatttcaaatcaattttttcttctttcctttttgagataaaactattaaaagtactactatatatataaaatctcaaatcaacttttcggcctcctcctcgtgtaccaggaagtatattctgacgaagggccccacttttgcaggtcttgcacgcccctcccttacccagaactgcagagcttcaggatggcgaaggtcacccaagggcatgagtagggagtggtgtctccaaccatcagttccgtggcactgttcagcctttgtgtgctgccctgccacccaccactcacagtgcctctgaagcgtgttacccctggagtgacgtgagcatttgaggcttgtctaaggaaaaaaataaaaggcagtgaaggagactgtacataaagacatggcaaaaatcttaattatagcaatatagttatcgggtaatgttcgggtgggcagctccattaaaaaatatgtgaatgaatctgtgaagctgcaagtagcgagaagagcgaaaggtcttcttaatgaaccgcctaccttgtagacagtaatttgtacactgtatagttttgttaagaattttttttaaattaaaattcccatgtttgtaaagctaactttttaacaattataatggaactatatgttgtttccatttttaaagtaaacaagaatattccttgtttagagactggacttgagttaaaactctccagtctcttaagttatgtattaaaaagaaaatctgtccatgttaggagttatttcacagattcctgtgcttgaaaagcataggatactaatcctttaaaaaagtgtaaatggagaaaagttatattttatgaaggttattttgttgtatttagtattggaaaagttggtttccagagcatttcagaatgtcgaagcaccactgtctttttattagtatatacggcctttagcaaaagtttttgtgattgttacgtgatggtatttaaggttaagtttcacagagcattcaggataggcagaaaactaaaacagtgctatgtctcacataacgtgtcctcagggagcagaatcttggatttgtgacttgtagcttcataaggactcaacgaaagagattgcacagggacatcttcagcggtgtgacagcaggacatgttctttacctagattcaaattctatgtactgtgtgaaatgatgaaggctgcagaaagttatcccatattcagtgtacagtattcatttttaatgaaacaactctacaatattgctggcagataggccccaagcatgacattcaatatagtttacatgttcctgtcaaggtcttttgttaacattaaccagctgcatgctttctggactttaagaaattgggtttctatagaaaactttttttttttttttttttttaatgtgcaggctattcaagttcaatagtaaaagctcaaaaatgaatgttctactccatgctgaaggagctgaaagctgccttcttcatattttgcactttctggtagttcccctgttttttctaattccctaaaattgtgtgggtggagtggagccctgcagttggggggtaacatggaccactgattttgccctttgaccctgcacaatgacctttgcatcagccaaactcattgccatgacaactctttgtactgtgtccgtgccacagatctgttggtcacattgttaatagtaaaggggacaagttggagacggtcaatttttacattttttgttgcaattttttcttcaatggttgtaagtagtttttttttttttttaataataaaagggttcactagttaatactctagaaatatctgtgtgttgcaattcaaatgtatgttgagattgtgaaaagcgcttcagtgccactagcttaccggtacactagactaagcccttgatgacttattgcatgatacagtaccaggaacaacaggtggcctaaatacatgaaaagcagtgtaagctagtgacactaaagccagtcttgtattactgtatttttgacagaatggttttgaaaactgtgctacagggactgatgtggcaaatatatctctttatgcagaaggaagtctttttttttcttttttttttttttaagaagtatggctttttatgcatccttcatcgagggcattgaagttgcatggactgataaaagttgatgcaaaacaagaaagaaacaaacaaaaaaaaaaaaccagcaaaatgtttaccaaaaaactcaaacaaatgagcagtgcctgttcaatttcacagtctctgttgagttcagttgtaaatatgtttcaaatgacattttcttgggaaaaaaaatctctacaacattgtagaatgtgaggggtaactacatcccaggcataggtttctcaaagctgcagtagattatgtcttcatcaagctgttaatttgtgcttatatcatatagaacttttagcatcctgggaagagctgcccccacctcaatgatatttctctgagaacaacttttgtaggactgtgtgtttctttagatacatttagtacaactgtaggtgacgagtagtcagttattgcttgctagctacacaccagggttgatccattttaaaacttttggcattttgtcctcatgggccataaatacagaaccttgtattttaattaaatttttttacaaaaggaggcacatgcacaatctccatgtaacaaacctttagcagtaggatgtattatacgacagttacttaatttctagagttcaggcctctgggatcaaccccagactgggccagaatgttagtgaaggttttattgtgcccggttggaggataacgttctttgggtactttttgtgggttgcaaatgaactcaattgccacaagttttaaactggtgtaaatcaagcttgacttaatgtgattgttactgttatatccagcctatactgctagcagctgctcatactgcagtcaattactggaagcggatatatttcctatgcaaaaactgtttaaacaataaaatgagctatgctacaga

SEQ ID NO: 157713 - DNA, 603 bp, Artificial Sequence
  derived and/or modified sequence
atgatgtattcacccatttgtctgacccaggatgagtttcaccctttcattgaagccctcctacctcacgtgcgggcaattgcgtacacgtggtttaacctccaggcacggaagcgtaaatactttaagaaacatgagaaaagaatgtcaaaagatgaagaacgggcagtgaaggatgaactcctgtccgaaaagcccgagatcaagcagaaatgggcatctcgactgctagccaaattaaggaaagacatccggcaggaataccgggaagactttgttctgactgtgaccggaaaaaaacacccctgctgcgtcctgagcaatcctgatcaaaagggcaaaatccggagaatcgactgtctccggcaagcggataaggtgtggcggctagacttagtgatggttattctgttcaaggggattcctctggagagcaccgacggagagcgtcttatgaagagcccacactgcacaaatccggctttatgtgtccagccccatcatatcaccgtgtctgtaaaggagttagacctgtttttagcctactacgtgcaggagcagggaaaaaacttctttagtagcaacaagtgtatcaagatatag

SEQ ID NO: 157714 - DNA, 507 bp, Artificial Sequence
  derived and/or modified sequence
atgaactcaggggtgaacctgcagcgatctttatcgagccctccgagctctaagagacccaaaactatttcgatcgacgaaaatatggagccatcccccaccggagacttctacccaagcccctcatcgcccgctgctgggtcccggacttggcatgaacgcgatcaggatatgtcatcccccacaaccatgaagaaaccagagaaacccctattctccagcgcttccccacaggactccagtcctcgactctctacctttccacaacaccatcaccccggtatcccgggagttgcacacagcgtgatctctacgagaacgccacccccaccttctcctctgccattccccacacaggctatcctgccaccagcccctagtagttatttctcccacccaactatccgctatccgcctcatctcaacccccaagacacactgaagaactacgtgccttcatacgaccccagctctccccaaacctcgcagtcttggtaccttggctag

SEQ ID NO: 157715 - DNA, 1263 bp, Artificial Sequence
  derived and/or modified sequence
atgatgtattcgcccatatgcctgactcaggatgaattccacccatttatcgaggctttgctgccccatgtcagagcaatcgcatacacctggttcaatttgcaggcgcgtaagaggaagtactttaaaaaacacgagaaacgcatgagcaaggatgaagagagagccgttaaagacgagctcctttcggagaaaccggagattaaacagaaatgggcttctcggctgcttgccaaactgcgaaaggatatccgtcaggaatatagagaggattttgtcctcacagtgacaggcaagaaacatccatgctgcgtgctgagcaacccagatcagaaaggcaaaattcgcagaattgattgtctgcggcaggctgacaaggtctggcggctggatctggtaatggtgattcttttcaaagggatcccacttgagagtaccgacggtgagagattgatgaagtctccacactgcaccaaccccgctttgtgtgtccagccgcatcacattaccgttagcgtgaaggagctggatctgtttctggcctattacgtgcaagaacaggatagcggccaatctggatccccatctcataatgatcccgctaagaatcccccaggttaccttgaggacagtttcgttaagtccggcgtgttcaacgtgagcgagctagtgagagtgtccaggacacccatcacccagggcacaggcgtaaacttccctatcggggagattcctagccaaccatattaccatgatatgaattctggtgtgaacctccagagatccctgagttccccaccgagctccaaaaggcccaaaacaatcagtatcgacgagaatatggagccaagtcctaccggggacttttatccatctccatcatccccagccgcaggttctaggacctggcacgagcgcgaccaggatatgtcatcacctacaacaatgaaaaaaccagagaagcctctgttcagcagcgccagtccacaagactccagccccaggttaagtacttttccccagcatcaccaccctggaataccaggagtggcgcactcagtgatatccacacggacaccccctccaccatctccgctgccgttcccaacccaggccatactccctccagctcctagctcctatttctctcatcccacaattagatatcccccacacctgaacccccaggatacgctgaagaactacgtgccgtcctacgaccctagtagtccccagacttctcagtcttggtatttagggtag

SEQ ID NO: 157716 - DNA, 603 bp, Artificial Sequence
  derived and/or modified sequence
atgatgtacagccccatctgcctgacccaggacgagttccaccccttcatcgaggccctgctgccccacgtgagagccatcgcctacacctggttcaacctgcaggccagaaagagaaagtacttcaagaagcacgagaagagaatgagcaaggacgaggagagagccgtgaaggacgagctgctgagcgagaagcccgagatcaagcagaagtgggccagcagactgctggccaagctgagaaaggacatcagacaggagtacagagaggacttcgtgctgaccgtgaccggcaagaagcacccctgctgcgtgctgagcaaccccgaccagaagggcaagatcagaagaatcgactgcctgagacaggccgacaaggtgtggagactggacctggtgatggtgatcctgttcaagggcatccccctggagagcaccgacggcgagagactgatgaagagcccccactgcaccaaccccgccctgtgcgtgcagccccaccacatcaccgtgagcgtgaaggagctggacctgttcctggcctactacgtgcaggagcagggcaagaacttcttcagcagcaacaagtgcatcaagatctag

SEQ ID NO: 157717 - DNA, 507 bp, Artificial Sequence
  derived and/or modified sequence
atgaacagcggcgtgaacctgcagagaagcctgagcagcccccccagcagcaagagacccaagaccatcagcatcgacgagaacatggagcccagccccaccggcgacttctaccccagccccagcagccccgccgccggcagcagaacctggcacgagagagaccaggacatgagcagccccaccaccatgaagaagcccgagaagcccctgttcagcagcgccagcccccaggacagcagccccagactgagcaccttcccccagcaccaccaccccggcatccccggcgtggcccacagcgtgatcagcaccagaaccccccccccccccagccccctgcccttccccacccaggccatcctgccccccgcccccagcagctacttcagccaccccaccatcagataccccccccacctgaacccccaggacaccctgaagaactacgtgcccagctacgaccccagcagcccccagaccagccagagctggtacctgggctag

SEQ ID NO: 157718 - DNA, 1263 bp, Artificial Sequence
  derived and/or modified sequence
atgatgtacagccccatctgcctgacccaggacgagttccaccccttcatcgaggccctgctgccccacgtgagagccatcgcctacacctggttcaacctgcaggccagaaagagaaagtacttcaagaagcacgagaagagaatgagcaaggacgaggagagagccgtgaaggacgagctgctgagcgagaagcccgagatcaagcagaagtgggccagcagactgctggccaagctgagaaaggacatcagacaggagtacagagaggacttcgtgctgaccgtgaccggcaagaagcacccctgctgcgtgctgagcaaccccgaccagaagggcaagatcagaagaatcgactgcctgagacaggccgacaaggtgtggagactggacctggtgatggtgatcctgttcaagggcatccccctggagagcaccgacggcgagagactgatgaagagcccccactgcaccaaccccgccctgtgcgtgcagccccaccacatcaccgtgagcgtgaaggagctggacctgttcctggcctactacgtgcaggagcaggacagcggccagagcggcagccccagccacaacgaccccgccaagaacccccccggctacctggaggacagcttcgtgaagagcggcgtgttcaacgtgagcgagctggtgagagtgagcagaacccccatcacccagggcaccggcgtgaacttccccatcggcgagatccccagccagccctactaccacgacatgaacagcggcgtgaacctgcagagaagcctgagcagcccccccagcagcaagagacccaagaccatcagcatcgacgagaacatggagcccagccccaccggcgacttctaccccagccccagcagccccgccgccggcagcagaacctggcacgagagagaccaggacatgagcagccccaccaccatgaagaagcccgagaagcccctgttcagcagcgccagcccccaggacagcagccccagactgagcaccttcccccagcaccaccaccccggcatccccggcgtggcccacagcgtgatcagcaccagaaccccccccccccccagccccctgcccttccccacccaggccatcctgccccccgcccccagcagctacttcagccaccccaccatcagataccccccccacctgaacccccaggacaccctgaagaactacgtgcccagctacgaccccagcagcccccagaccagccagagctggtacctgggctag

SEQ ID NO: 157719 - protein, 428 aa, Artificial Sequence
  derived and/or modified sequence
MYSSPLCLTQDEFHPFIEALLPHVRAFAYTWFNLQARKRKYFKKHEKRMSKDEERAVKDELLGEKPEVKQKWASRLLAKLRKDIRPECREDFVLSITGKKAPGCVLSNPDQKGKMRRIDCLRQADKVWRLDLVMVILFKGIPLESTDGERLVKAAQCGHPVLCVQPHHIGVAVKELDLYLAYFVRERDAEQSGSPRTGMGSDQEDSKPITLDTTDFQESFVTSGVFSVTELIQVSRTPVVTGTGPNFSLGELQGHLAYDLNPASTGLRRTLPSTSSSGSKRHKSGSMEEDVDTSPGGDYYTSPSSPTSSSRNWTEDMEGGISSPVKKTEMDKSPFNSPSPQDSPRLSSFTQHHRPVIAVHSGIARSPHPSSALHFPTTSILPQTASTYFPHTAIRYPPHLNPQDPLKDLVSLACDPASQQPGPSWYLG

SEQ ID NO: 157720 - DNA, 2185 bp, Artificial Sequence
  derived and/or modified sequence
aatgactcagtaagttcagcgcgcccgctccggccggccctgcgcctcccgccgcgcccgggatgtattcgtccccgctctgcctcacccaggatgagttccacccgttcatcgaggccctgctgcctcacgtccgcgccttcgcctacacctggttcaacctgcaggcgcggaagcgcaagtacttcaagaagcacgagaagcggatgtcgaaggacgaggagcgtgcggtcaaggacgagctgctgggcgagaagcccgaggtcaagcagaagtgggcgtcgcggctgctggccaagctgcgcaaggacatccggcccgagtgccgcgaggacttcgtgctgagcatcaccggcaagaaggcgccgggctgcgtgctctccaaccccgaccagaagggcaagatgcggcgcatcgactgtctccggcaggcggacaaggtgtggcggctggacctggtcatggtcatcctgttcaagggcatcccgctggagagcaccgacggcgagcgcctggtcaaggctgcgcagtgcggtcacccggtcctgtgcgtgcagccgcaccacattggcgtggccgtcaaggagctggacctctacctggcctacttcgtgcgtgagcgagatgcagagcaaagcggcagtccccggacagggatgggctctgaccaggaggacagcaagcccatcacgctggacacgaccgacttccaggagagctttgtcacctccggcgtgttcagcgtcactgagctcatccaagtgtcccggacacccgtggtgactggaacaggacccaacttctccctgggggagctgcaggggcacctggcatacgacctgaacccagccagcactggcctcagaagaacgctgcccagcacctcctccagtgggagcaagcggcacaaatcgggctcgatggaggaagacgtggacacgagccctggcggcgattactacacttcgcccagctcgcccacgagtagcagccgcaactggacggaggacatggaaggaggcatctcgtccccggtgaagaagacagagatggacaagtcaccattcaacagcccgtccccccaggactctccccgcctctccagcttcacccagcaccaccggcccgtcatcgccgtgcacagcgggatcgcccggagcccacacccgtcctccgctctgcatttccctacgacgtccatcctaccccagacggcctccacctacttcccccacacggccatccgctacccacctcatctcaacccccaggacccgctcaaagatcttgtctcgctggcctgcgacccagccagccagcaacctggaccgtcctggtatctgggatagcaaaggtcttcttccctcgccccttctccatcgtcccaggaatcccagggggcagcacagccggcccccggcccacgttttcggtggaaaattagagtgaacaagaacacccctgccgactcccagcccggccaaaaagacaaaacacatagacgcacacactcaggaggaaaagaaaaaacaaaggcagaagaagaagaagaagaaataaaaacccacccaagcaagaagacaaaaggtaaagacgcaacgtttccaactctcgggacgccaaggccgcaggactggagggccaggccccgccacccccacgggagacccgggacagggcgtcttcctaagttattcatctcctctccgcctgctgctcgggaaggacagacgccggccgcccgcccgcgccccggaggccctggctctgtccggagaccaggtgagcacagcctggagcctgtgcccagggccgacaggcgcgacacccagcaaggccacctctccccgggcccccgcgcctctgccggacacggaccggcccctcagcccccaccgaggacgcagccactggggggaaagggagacacagcggaccccggccgggcagcggagaccgcagaggcgggcagggtggggcaggcgagtggtgtcgcgggggtgcgtggcgcttgcgagccctggccaggggaggaagtgaggcccaggcacctgctgcccctcgagggggccctgcctgccgcggggcctccccacaagcccctcccaaagcgccggccgactcgctgtctcgctggggactctttcagccctcgcgcccgcccgtttgggaggagaagtctcta

SEQ ID NO: 157721 - DNA, 1272 bp, Artificial Sequence
  derived and/or modified sequence
atgtattcctctccgttatgcctaacacaggacgaattccacccttttattgaagccttgctgccgcatgtgagggcctttgcgtatacttggtttaatctgcaggcccgtaaacggaagtacttcaaaaagcatgaaaaaagaatgagcaaggatgaggaaagagctgtgaaggacgagcttctgggtgaaaagccagaggtgaagcagaaatgggcttcccggctcctcgctaagctccggaaggacatccgtccagaatgtcgagaagactttgtgctgtctatcacagggaaaaaagctccgggatgtgtgctttctaatcctgaccagaaggggaagatgagaaggatcgactgcctgcgacaggctgacaaagtatggaggctagacctggtgatggtgatccttttcaagggcattccattagaatcaactgatggtgagaggttagtcaaagccgctcagtgtggacaccctgtactgtgcgtgcagccccatcatattggtgtggcggtaaaggagttggatctgtatttggcctacttcgtgagggagagggacgctgagcagtctgggtccccgcgcactgggatgggtagcgatcaggaggacagcaagcctattactttggacaccaccgactttcaggagtcatttgtaacctcgggcgtgtttagtgtaactgaactaatccaggtttcaagaactccggttgttactggcaccggcccaaacttttcgctcggcgagctgcagggacacctggcatacgatcttaaccccgccagcacaggcttacggaggacactgccctccacttcatcctccggctctaagcggcacaagtctggctccatggaagaggacgtggacacatctcctgggggagattactatacttcaccaagttcccccacgtcatctagcagaaactggaccgaggatatggaaggcgggatctctagccccgttaagaaaacagagatggacaagtcacccttcaactcacccagccctcaggatagcccccggctgtctagtttcactcagcaccaccgccctgtaatcgccgttcacagcggtatagctcgttctcctcacccaagcagcgcgttgcacttccccactacatctatcctgccccaaacagctagcacatacttcccgcacaccgccataagataccccccccatcttaatcctcaggaccctttaaaggatttagtgagtctggcgtgtgatccggcgtcccaacagcccggaccctag

SEQ ID NO: 157722 - DNA, 1287 bp, Artificial Sequence
  derived and/or modified sequence
atgtattcttcccccttgtgccttactcaggatgagttccatccttttatcgaagccttactcccacatgtgcgagcttttgcatacacgtggttcaacctgcaagcccgcaaaaggaaatacttcaaaaagcacgagaaaaggatgtctaaggacgaggagagggccgtgaaagacgagctcctgggggaaaagccagaggtcaagcaaaagtgggccagtcgattgcttgctaagctcaggaaagacatcagacccgagtgccgagaggatttcgtcttgtcaatcacaggcaagaaagctcccggttgtgtcttgagcaatccagaccagaaggggaagatgagaaggattgattgcttacgccaggccgacaaggtttggcggctggatctggttatggtaatcctgttcaaaggcattcccttggagagtacagatggagagaggctcgtgaaggccgcacagtgtggacacccagtgctctgcgtccaaccccatcacatcggggtagccgtcaaggaactggatctgtatctggcctatttcgtgcgggaaagagacgcggagcaatcaggatcacccaggaccgggatgggaagtgaccaggaggatagcaagccgataactctggatacaaccgactttcaggaaagttttgtaacatccggcgtgtttagtgtcacggagctaatacaggttagcagaacccctgtggtcacaggaacaggaccaaatttcagcctgggcgaactgcaggggcacctcgcttacgatcttaaccctgcgtccacaggcctccgacgaaccttgccgagcacatcttcctccggaagcaaaaggcataagagtggcagtatggaggaagatgtggatacatcccccggcggtgattactacacaagcccctcaagtccaacctcaagctctcggaactggactgaagacatggagggcggtatcagctcgccggtgaagaaaactgagatggataaatccccctttaacagccccagtccacaggattcacctcggttgtccagttttacacaacaccataggcccgtaatcgctgtgcattcaggtatcgctcggagccctcatccaagctctgctctccactttcctaccacaagcattctccctcagactgcgtccacatatttccctcatactgcgattcgatatccgccacacctgaatccacaggaccccctgaaagacctggttagcctggcctgcgaccccgcttcccagcagccaggaccctcatggtatctgggctag

SEQ ID NO: 157723 - DNA, 1272 bp, Artificial Sequence
  derived and/or modified sequence
atgtacagcagccccctgtgcctgacccaggatgagttccaccccttcatcgaggccctgctgccccacgtgcgggcctttgcctacacctggttcaacctgcaggccaggaagaggaagtacttcaagaagcatgagaagaggatgagcaaggatgaggagagagctgtgaaggatgagctgctgggggagaagccagaggtgaagcagaagtgggccagccggctgctggccaagctgaggaaggacatccggccagaatgtcgggaggactttgtgctgagcatcaccgggaagaaggcccctggctgtgtgctgagcaacccagaccagaagggcaagatgagaagaattgactgcctgcggcaggccgacaaggtgtggaggctggacctggtgatggtgatcctcttcaagggcatccccctggagagcacagatggagagcggctggtgaaggccgcccagtgtggccaccctgtgctgtgtgtgcagccccaccacatcggcgtggccgtgaaggagctggacctgtacctggcctactttgtgcgggagagagatgctgagcagagcggcagccccaggacaggcatgggcagtgaccaggaggacagcaagcccatcaccctggacaccacagacttccaggagagctttgtgaccagcggggtcttctctgtgacagagctgatccaggtgtccaggacccctgtggtgactggaacaggccccaacttcagcctgggggagctgcagggccacctggcctatgacctgaacccagccagcacaggcctgcggaggaccctgcccagcaccagcagcagcggcagcaagaggcacaagagcggctccatggaggaggatgtggacaccagccctggaggagactactacaccagccccagcagccccaccagcagcagcaggaactggacagaggacatggagggcggcatcagcagccctgtgaagaagacagagatggacaagagccccttcaacagccccagcccccaggacagcccccggctgagcagcttcacccagcaccacaggcctgtgattgctgtgcacagcggcatcgcccggagcccccaccccagcagcgccctgcacttccccaccaccagcatcctgccccagacagccagcacctacttcccccacacagccatccgctacccaccccacctgaacccccaggaccccctgaaggacctggtgtccctggcctgtgaccctgccagccagcagcccggcccctag

SEQ ID NO: 157724 - DNA, 1287 bp, Artificial Sequence
  derived and/or modified sequence
atgtacagcagccccctgtgcctgacccaggatgagttccaccccttcatcgaggccctgctgccccacgtgcgggcctttgcctacacctggttcaacctgcaggccaggaagaggaagtacttcaagaagcatgagaagaggatgagcaaggatgaggagagagctgtgaaggatgagctgctgggggagaagccagaggtgaagcagaagtgggccagccggctgctggccaagctgaggaaggacatccggccagaatgtcgggaggactttgtgctgagcatcaccgggaagaaggcccctggctgtgtgctgagcaacccagaccagaagggcaagatgagaagaattgactgcctgcggcaggccgacaaggtgtggaggctggacctggtgatggtgatcctcttcaagggcatccccctggagagcacagatggagagcggctggtgaaggccgcccagtgtggccaccctgtgctgtgtgtgcagccccaccacatcggcgtggccgtgaaggagctggacctgtacctggcctactttgtgcgggagagagatgctgagcagagcggcagccccaggacaggcatgggcagtgaccaggaggacagcaagcccatcaccctggacaccacagacttccaggagagctttgtgaccagcggggtcttctctgtgacagagctgatccaggtgtccaggacccctgtggtgactggaacaggccccaacttcagcctgggggagctgcagggccacctggcctatgacctgaacccagccagcacaggcctgcggaggaccctgcccagcaccagcagcagcggcagcaagaggcacaagagcggctccatggaggaggatgtggacaccagccctggaggagactactacaccagccccagcagccccaccagcagcagcaggaactggacagaggacatggagggcggcatcagcagccctgtgaagaagacagagatggacaagagccccttcaacagccccagcccccaggacagcccccggctgagcagcttcacccagcaccacaggcctgtgattgctgtgcacagcggcatcgcccggagcccccaccccagcagcgccctgcacttccccaccaccagcatcctgccccagacagccagcacctacttcccccacacagccatccgctacccaccccacctgaacccccaggaccccctgaaggacctggtgtccctggcctgtgaccctgccagccagcagcccggccccagctggtacctgggctag

SEQ ID NO: 157725 - DNA, 1272 bp, Artificial Sequence
  derived and/or modified sequence
atgtacagcagccccctgtgcctgacccaggacgagttccacccctttatcgaggccttactgccccacgtacgtgctttcgcatatacctggtttaacctgcaagcccggaaaagaaaatactttaaaaaacacgaaaaaagaatgtcaaaggacgaagaaagagctgtgaaagatgagttgctgggtgagaagcctgaggttaaacagaagtgggcaagcagactgttagccaagcttcgaaaagacatcaggcccgagtgtcgcgaagacttcgtgttgagcataacaggtaaaaaggccccagggtgcgtcttgtccaatcccgaccaaaagggtaaaatgaggcgaattgactgcctcagacaggccgacaaggtttggcggctggatctcgtaatggtgatcctattcaagggtattcctcttgaatccaccgatggtgagaggctggtgaaggccgcccagtgtggccatcccgttctctgcgtgcaaccacatcacatcggggtcgccgtcaaagagctggatctttacctagcctacttcgtccgggagcgagatgcagaacagtccggcagtccaagaaccggcatggggtctgaccaggaagactctaaacccataacactcgacactacggatttccaggagtctttcgtgacgagcggcgtgttttccgtgacagaactgattcaggtttctcggacaccagttgtgacagggaccggtcccaatttcagtctcggggagcttcagggacacctggcctatgatctcaacccggcaagtacgggtctgcggcgcacgttgccctcgacctccagtagcggcagcaaaaggcataaatccgggagtatggaggaagatgtggacaccagcccgggaggcgactattacacatccccatccagcccaacaagctcttccaggaattggacagaagatatggagggtgggatcagctcacctgttaagaagaccgagatggacaagagtccattcaattcaccgtctcctcaagactcaccacggttatctagctttactcaacaccaccggcctgtgatcgccgtgcattctggaattgcccgaagccctcatccatcttcagctctacacttccctacaacatctatcctcccccagactgctagtacttattttccccacacagccattaggtaccccccccacctcaacccccaggaccctcttaaggatcttgttagcctcgcgtgcgatcctgcaagtcagcagcctggtccctag

SEQ ID NO: 157726 - DNA, 1287 bp, Artificial Sequence
  derived and/or modified sequence
atgtacagcagccccctgtgcctgacccaggacgagttccaccccttcattgaggccctgttgcctcacgtccgggccttcgcttacacatggttcaacttacaggctagaaagagaaaatactttaaaaaacacgagaaacgcatgagcaaggacgaggagcgcgctgtgaaggatgaactgttgggcgaaaaacccgaggtgaagcagaagtgggctagccgcctcttggcaaagctacgaaaagacatccggcccgaatgccgcgaggactttgtgttgagtatcacagggaagaaggccccgggttgcgtcctctccaaccccgaccagaaaggcaagatgaggcgcattgactgtctcaggcaggccgacaaggtgtggcgcctggacctagtcatggtcattctcttcaaaggcatacccttggaaagcaccgacggagagcgcctggtgaaagccgcacagtgcgggcatccggtgctctgtgtgcagccacaccatatcggagtggcagtaaaagaattagatctgtacctggcgtattttgtacgagagcgtgatgccgagcaatcagggtcccctaggaccgggatggggtctgaccaagaagacagtaaacccatcaccctggataccaccgatttccaggagagcttcgtgacttctggggtgtttagcgttaccgagcttattcaggtgtccaggactccagtcgtaacgggcacgggacctaacttttccttgggggaactgcaggggcatctcgcttatgacttgaatccagcatcgactggcttacggagaaccctgccctctaccagttccagcggcagcaaaagacataagagcggatcaatggaagaggatgttgacacttcccccggcggggattactataccagtccttccagtcctacatcatcatcacgcaactggaccgaagacatggaggggggtatctcgagccctgtgaagaaaaccgagatggacaaatccccttttaattccccttcaccgcaggactcaccacgcctcagcagcttcacgcaacaccatcggccagttattgctgttcacagcgggatcgctcggtccccacacccttcttcagcactgcactttcccactacttccattttacctcagactgcatccacttacttcccacataccgctattcgctatcctccccatttaaatccacaggatcctcttaaagatcttgtctcactggcctgcgaccctgcaagccagcagcccgggcccagctggtatctcggctag

SEQ ID NO: 157727 - DNA, 1272 bp, Artificial Sequence
  derived and/or modified sequence
atgtatagttccccgttgtgcctgacccaagacgaattccaccccttcatcgaggcactgcttccccatgtgcgagcgtttgcatacacttggtttaacctgcaggcgcgtaaacgcaagtacttcaagaaacatgagaaacgtatgtcaaaagacgaggagcgggctgtgaaggatgaactgctgggggaaaagcctgaagtgaaacaaaagtgggctagccgcctgctcgccaagttgaggaaagacatccggccagaatgccgggaggatttcgttctgagtattactgggaagaaggccccaggttgtgtcttatctaatcccgatcagaagggaaaaatgcgccgtattgactgcctgcgtcaagcagacaaagtgtggaggctagatctcgtgatggtgattctctttaaaggcatcccactagagagcacagacggagagcgtttggtaaaggccgcacaatgcggtcaccctgttctgtgtgtacagcctcatcatatcggcgtcgcagtgaaggagctggacctgtacctggcctattttgtacgggagagggacgctgaacagagtgggagtccacgcactggaatgggcagcgatcaggaagatagcaaacctattacactagatacgactgacttccaggaaagcttcgtgacttccggtgtattctcagtcacagaactaatccaagtgagtcgaactcccgtggtgacagggaccgggcctaactttagtctgggggagctccaaggccatctcgcttacgatctcaaccctgcgtcaacaggactgagacgcactctacccagtacctcaagcagtggctcaaagagacacaaaagtgggtcgatggaagaggacgtggacacttccccgggaggcgattactacacatcgccctcctctccaacttcaagtagtcgcaactggacggaagacatggaaggagggatctcgtcgcctgtgaaaaagacagagatggataagagtcctttcaactccccatctcctcaagacagtccacgcctgagtagtttcacccagcaccatagacccgtcattgccgtccactcgggtattgccagaagcccccatccatcttccgctctgcattttcctaccacgagcatcctcccccaaaccgcatccacctattttcctcacacggctataagatatccgcctcatctcaatccccaggaccctctgaaggatctcgtttcgctggcctgcgacccagcaagtcagcagcccggaccatag

SEQ ID NO: 157728 - DNA, 1287 bp, Artificial Sequence
  derived and/or modified sequence
atgtactccagtccgttgtgcctgacacaggatgagttccacccattcatcgaggcgctgttaccccacgtgcgagctttcgcttacacctggtttaatttgcaggcccgaaaacggaagtatttcaagaaacacgaaaaacgcatgtccaaggatgaggaacgtgccgtcaaggacgagctgctgggggaaaaacctgaggtaaagcagaagtgggcctcacggctcttagcgaaactcaggaaggacattcgcccagagtgccgcgaagactttgtgttgagcattaccggcaagaaagcaccaggctgcgtactctctaaccctgatcagaagggaaagatgaggcggattgactgcctgcggcaggcagacaaagtctggcggctggacctggtcatggttattttattcaaaggcattcctcttgagtcgacggacggagagagactcgtcaaagccgctcagtgcgggcacccggtgctgtgtgtgcagcctcaccatattggcgtggccgtgaaggaacttgacctttacctcgcttacttcgtgagagagagagatgccgagcagtccgggtcgccacgcaccggaatgggcagcgaccaggaagatagcaagccaatcacactggatacaactgacttccaggaatcgtttgtcacttctggagttttctccgttactgaactcatacaagtgtctaggactcccgtggttaccggcaccggccctaacttctctctgggggaattacaggggcacctggcctatgacctgaacccagcttcaactgggctgcgcaggactctgccaagtacaagctcctccggatccaaacgccacaaaagtggatcgatggaggaagacgttgataccagcccaggcggtgactattatacgtcgccctcgtccccaaccagtagctctaggaactggacggaagatatggaaggagggatcagttctcctgtaaagaaaacagagatggataagtcgccattcaactcgccgagtccgcaggacagcccccgactatcctcttttacgcagcaccaccgtccagtgatagcggtacattccgggatcgctagatcccctcatccctcatctgcattacatttcccaactacaagtattctcccgcaaacagcatccacatattttcctcatactgcaattcggtatcccccacacctgaatccccaggaccctctgaaggaccttgtatcactggcctgcgatcccgcttcccaacagccagggcctagttggtatttgggctag

SEQ ID NO: 157729 - DNA, 1272 bp, Artificial Sequence
  derived and/or modified sequence
atgtacagcagccccctgtgcctgacccaggacgagttccaccccttcatcgaggccctgctgccccacgtgagagccttcgcctacacctggttcaacctgcaggccagaaagagaaagtacttcaagaagcacgagaagagaatgagcaaggacgaggagagagccgtgaaggacgagctgctgggcgagaagcccgaggtgaagcagaagtgggccagcagactgctggccaagctgagaaaggacatcagacccgagtgcagagaggacttcgtgctgagcatcaccggcaagaaggcccccggctgcgtgctgagcaaccccgaccagaagggcaagatgagaagaatcgactgcctgagacaggccgacaaggtgtggagactggacctggtgatggtgatcctgttcaagggcatccccctggagagcaccgacggcgagagactggtgaaggccgcccagtgcggccaccccgtgctgtgcgtgcagccccaccacatcggcgtggccgtgaaggagctggacctgtacctggcctacttcgtgagagagagagacgccgagcagagcggcagccccagaaccggcatgggcagcgaccaggaggacagcaagcccatcaccctggacaccaccgacttccaggagagcttcgtgaccagcggcgtgttcagcgtgaccgagctgatccaggtgagcagaacccccgtggtgaccggcaccggccccaacttcagcctgggcgagctgcagggccacctggcctacgacctgaaccccgccagcaccggcctgagaagaaccctgcccagcaccagcagcagcggcagcaagagacacaagagcggcagcatggaggaggacgtggacaccagccccggcggcgactactacaccagccccagcagccccaccagcagcagcagaaactggaccgaggacatggagggcggcatcagcagccccgtgaagaagaccgagatggacaagagccccttcaacagccccagcccccaggacagccccagactgagcagcttcacccagcaccacagacccgtgatcgccgtgcacagcggcatcgccagaagcccccaccccagcagcgccctgcacttccccaccaccagcatcctgccccagaccgccagcacctacttcccccacaccgccatcagataccccccccacctgaacccccaggaccccctgaaggacctggtgagcctggcctgcgaccccgccagccagcagcccggcccctag

SEQ ID NO: 157730 - DNA, 1287 bp, Artificial Sequence
  derived and/or modified sequence
atgtacagcagccccctgtgcctgacccaggacgagttccaccccttcatcgaggccctgctgccccacgtgagagccttcgcctacacctggttcaacctgcaggccagaaagagaaagtacttcaagaagcacgagaagagaatgagcaaggacgaggagagagccgtgaaggacgagctgctgggcgagaagcccgaggtgaagcagaagtgggccagcagactgctggccaagctgagaaaggacatcagacccgagtgcagagaggacttcgtgctgagcatcaccggcaagaaggcccccggctgcgtgctgagcaaccccgaccagaagggcaagatgagaagaatcgactgcctgagacaggccgacaaggtgtggagactggacctggtgatggtgatcctgttcaagggcatccccctggagagcaccgacggcgagagactggtgaaggccgcccagtgcggccaccccgtgctgtgcgtgcagccccaccacatcggcgtggccgtgaaggagctggacctgtacctggcctacttcgtgagagagagagacgccgagcagagcggcagccccagaaccggcatgggcagcgaccaggaggacagcaagcccatcaccctggacaccaccgacttccaggagagcttcgtgaccagcggcgtgttcagcgtgaccgagctgatccaggtgagcagaacccccgtggtgaccggcaccggccccaacttcagcctgggcgagctgcagggccacctggcctacgacctgaaccccgccagcaccggcctgagaagaaccctgcccagcaccagcagcagcggcagcaagagacacaagagcggcagcatggaggaggacgtggacaccagccccggcggcgactactacaccagccccagcagccccaccagcagcagcagaaactggaccgaggacatggagggcggcatcagcagccccgtgaagaagaccgagatggacaagagccccttcaacagccccagcccccaggacagccccagactgagcagcttcacccagcaccacagacccgtgatcgccgtgcacagcggcatcgccagaagcccccaccccagcagcgccctgcacttccccaccaccagcatcctgccccagaccgccagcacctacttcccccacaccgccatcagataccccccccacctgaacccccaggaccccctgaaggacctggtgagcctggcctgcgaccccgccagccagcagcccggccccagctggtacctgggctag

SEQ ID NO: 157731 - protein, 133 aa, Artificial Sequence
  derived and/or modified sequence
MMLNSDTMELDLPPTHSETESGFSDCGGGAGPDGAGPGGPGGGQARGPEPGEPGRKDLQHLSREERRRRRRATAKYRTAHATRERIRVEAFNLAFAELRKLLPTLPPDKKLSKIEILRLAICYISYLNHVLDV

SEQ ID NO: 157732 - DNA, 2594 bp, Artificial Sequence
  derived and/or modified sequence
gtgtgtgtctgagggtgtgtgtgtgagtgtggctggccccagtacctggccaagcccaccacttccacctgggccctacacccccacaatgtgtacccctcttatctgccctggagcctgtacagccatgccacgctacccctgagagtctagaaagctggtcactaactttgcagacggatgagccttgagcacccagaggagactggggctgtcaacgctgccccttgtcctgccggcttggatcccctgacagggtccttctaggcttcagactggcaccctgaccatggaaccctgaagtggcagtgacttctagagctcagtggcagaccccacgacccttcctcccccttcctccccctcccaccaccagctttcaagctcccagagggaggggtggggaggggatcctgatctcacagggcagggggcttccatcatgatgctcaactcagacaccatggagctggacctgccgcccacccactcagagactgagtcgggcttcagtgactgtgggggcggggcgggccctgatggtgccgggcctgggggtccgggagggggccaggcccgaggcccagagccgggagagcctggccggaaagacctgcagcatctgagccgcgaggagcgccggcgccggcgccgcgccacagccaagtaccgcacggcccacgccacgcgagaacgcatccgcgtggaagccttcaacctggccttcgccgagctgcgcaagctgctgcctacgctgccccccgacaagaagctctccaagattgagattctgcgcctggccatctgctatatctcctacctgaaccacgtgctggacgtctgaactcagcctgtctcccacctcccgggcctctctggggcccctttccaccgctcactgcttagaaaggccgcatcctccccgagcccttataccttggcatggagtcccaaaggccctgggcacaggcagagagcccaccggctggtcatgagggcctcttcctttctctgacccaggcacctcgagggctattctcctgggttccttccggggtttattgctgaggcccagctgtgcagaattgtttgctagtgtggttggtatggaatccttgctggctttactaagccagccacacttggagtctgcccccaagctctctcactgaatgctgcctcttctacccctatgtccaaattttcagccaccacagacctcagctgtgtatcctatctgttctagcttctcctgcccctggtggggatgggctgtcagaattgcaagggaggaaggctggggttagagtggggagtgggcttcttcctccaagatctcagtctctcagtgcttggcagaggggtgaggccctggggaggcaggggttggtgccctgactcctgtgaggggaatctcagtagctgggaattatggaaaaactcttcctgtttctgtccatcttgttcctgtggcttagcacatacagacctcagatcttacttggtagtgagtgccttgccctctttgagctatttggctacttccctgtccctctgactcctactgtcccaattttctccctccctgtgtgtcactagagaaaaaaaaaaacaaaaacctagattccggattaggggatgacatcccaaacagcccggagtatttgcagaaggctcaggcaacgagtgggccacatctcacttctgcttcctcatctcagcccactctgaaaatgtgcagcaccctcactggttcctccccccaacgcaaggaggatgcccaattgttgccctctgaaaatgcacagttctcctggccctaggacttacttattacatttttttctctttccttgagctgcctttggcaagggaagagacccccaactctgcgcccctactccatgctgctgatccccacctgcgcactatagctcagggtcagcagtggaatgaagggccttagaacctgcatagaagaaatgaactcactgcatttctgtgctccctcctccctcgcaccaaactcctagctctacaagtatatttatttatttatttatttattcatctatttatttacttatttatttatttataaatattgctatttattgccgagttgtgcactttggggtagagtgaggggctcccagcagctctagctgggtctctcttgcttcctccctgcttacgcctttccttttcttgctccttcttcaactcctggtgtgtgtgagcatgccctttgcttgccacaccatatcctttccccagatccacctgtcctgacactctagtcctccaggatagtgctcctcccccagctccagggctcctggatgtccttcctcaactccctccacccctagacaatcctacctggtcccatctgcctcttttctctccccagcctgccctgtgacccttgcctcttcctgatactcccaagagcaggccccaggggtctgtgtcacatatctctgtgtgattccttctggttgcatccccaatttcatacaaaaagaaaaataaaagtgacctcgttctagcaccaggaaaaaaaaaaaaaaaaaaaaaaaaaaaaaaaaaaa

SEQ ID NO: 157733 - DNA, 402 bp, Artificial Sequence
  derived and/or modified sequence
atgatgctcaattcggacacaatggaactcgacttgcctccaactcactcggagaccgaatctggcttctctgactgtggtgggggggccggacctgatggcgccggccctggcgggcccggaggcgggcaggcccggggtcctgaaccgggcgagccagggagaaaggacctgcagcacttgtcccgcgaggagcggagaaggagaagaagggctaccgctaagtaccgcacggcccacgccactagggaacggattcgtgttgaggctttcaatttagccttcgccgagcttaggaagctactgcctacattgcctcctgataagaaactgagcaagatcgagattctgcgactggctatctgctatatttcataccttaatcatgtgcttgatgtttag

SEQ ID NO: 157734 - DNA, 402 bp, Artificial Sequence
  derived and/or modified sequence
atgatgctgaacagcgacaccatggagctggacctgccccccacccacagcgagacagaaagtggcttcagtgactgtggcggcggggccggcccagatggagctggccctgggggccctgggggcggccaggcccggggccctgagcccggggagcccggcaggaaggacctgcagcacctgagccgggaggagaggagaagaagaagaagagccacagccaagtacagaacagcccacgccacccgggagcgcatccgggtggaggccttcaacctggcctttgctgagctgaggaagctgctgcccaccctgcccccagacaagaagctgagcaagattgagatcctgcggctggccatctgctacatctcctacctgaaccacgtgctggatgtgtag

SEQ ID NO: 157735 - DNA, 402 bp, Artificial Sequence
  derived and/or modified sequence
atgatgctgaacagcgacaccatggagctggacctgccccccacccacagcgagaccgaatcaggcttctctgattgcggagggggcgctggcccagatggcgccggccccggcgggcctggcgggggccaggcacgagggccggagcccggagagccaggacggaaggatctgcagcatctgtcccgggaagagcgaaggagacgacggagggctaccgcaaaatatcggacagcgcatgcaactcgcgaacggatccgagttgaggcattcaacctcgcatttgccgagttgagaaaactgctgccaacgttgcctccagataagaagctctctaagatagagattctcaggctggctatttgctacatttcataccttaatcacgttctggacgtatag

SEQ ID NO: 157736 - DNA, 2563 bp, Artificial Sequence
  derived and/or modified sequence
aggtgtgtgtgtctgagggtgtgtgtgtgagtgtggctggccccagtacctggccaagcccaccacttccacctgggccctacacccccacaatgtgtacccctcttatctgccctggagcctgtacagccatgccacgctacccctgagagtctagaaagctggtcactaactttgcagacggatgagccttgagcacccagaggagactggggctgtcaacgctgccccttgtcctgccggcttggatcccctgacagggtccttctaggcttcagactggcaccctgaccatggaaccctgaagtggcagtgacttctagagctcagtggcagaccccacgacccttcctcccccttcctccccctcccaccaccagctttcaagctcccagagggaggggtggggaggggatcctgatctcacagggcagggggcttccatcatgatgctcaactcagacaccatggagctggacctgccgcccacccactcagagactgagtcgggcttcagtgactgtgggggcggggcgggccctgatggtgccgggcctgggggtccgggagggggccaggcccgaggcccagagccgggagagcctggccggaaagacctgcagcatctgagccgcgaggagcgccggcgccggcgccgcgccacagccaagtaccgcacggcccacgccacgcgagaacgcatccgcgtggaagccttcaacctggccttcgccgagctgcgcaagctgctgcctacgctgccccccgacaagaagctctccaagattgagattctgcgcctggccatctgctatatctcctacctgaaccacgtgctggacgtctgaactcagcctgtctcccacctcccgggcctctctggggcccctttccaccgctcactgcttagaaaggccgcatcctccccgagcccttataccttggcatggagtcccaaaggccctgggcacaggcagagagcccaccggctggtcatgagggcctcttcctttctctgacccaggcacctcgagggctattctcctgggttccttccggggtttattgctgaggcccagctgtgcagaattgtttgctagtgtggttggtatggaatccttgctggctttactaagccagccacacttggagtctgcccccaagctctctcactgaatgctgcctcttctacccctatgtccaaattttcagccaccacagacctcagctgtgtatcctatctgttctagcttctcctgcccctggtggggatgggctgtcagaattgcaagggaggaaggctggggttagagtggggagtgggcttcttcctccaagatctcagtctctcagtgcttggcagaggggtgaggccctggggaggcaggggttggtgccctgactcctgtgaggggaatctcagtagctgggaattatggaaaaactcttcctgtttctgtccatcttgttcctgtggcttagcacatacagacctcagatcttacttggtagtgagtgccttgccctctttgagctatttggctacttccctgtccctctgactcctactgtcccaattttctccctccctgtgtgtcactagagaaaaaaaaaaacaaaaacctagattccggattaggggatgacatcccaaacagcccggagtatttgcagaaggctcaggcaacgagtgggccacatctcacttctgcttcctcatctcagcccactctgaaaatgtgcagcaccctcactggttcctccccccaacgcaaggaggatgcccaattgttgccctctgaaaatgcacagttctcctggccctaggacttacttattacatttttttctctttccttgagctgcctttggcaagggaagagacccccaactctgcgcccctactccatgctgctgatccccacctgcgcactatagctcagggtcagcagtggaatgaagggccttagaacctgcatagaagaaatgaactcactgcatttctgtgctccctcctccctcgcaccaaactcctagctctacaagtatatttatttatttatttatttattcatctatttatttacttatttatttatttataaatattgctatttattgccgagttgtgcactttggggtagagtgaggggctcccagcagctctagctgggtctctcttgcttcctccctgcttacgcctttccttttcttgctccttcttcaactcctggtgtgtgtgagcatgccctttgcttgccacaccatatcctttccccagatccacctgtcctgacactctagtcctccaggatagtgctcctcccccagctccagggctcctggatgtccttcctcaactccctccacccctagacaatcctacctggtcccatctgcctcttttctctccccagcctgccctgtgacccttgcctcttcctgatactcccaagagcaggccccaggggtctgtgtcacatatctctgtgtgattccttctggttgcatccccaatttcatacaaaaagaaaaataaaagtgacctcgttctagcaccagg

SEQ ID NO: 157737 - DNA, 402 bp, Artificial Sequence
  derived and/or modified sequence
atgatgctgaatagtgacaccatggagttagacctaccgcctactcacagcgaaacagaaagcggattctccgattgtggtggaggcgctgggcctgacggggcaggaccgggaggaccgggtggcggtcaagcaagaggtccagaaccaggcgaacccggtcgaaaggacctccagcacctatcacgggaggaacggaggcggagacgcagagccactgctaaatatcgcacggcacacgctactagggagagaatccgcgtggaggcatttaacttagcttttgccgaactgaggaagctgctgcccacactccctcctgataagaagctttcaaagattgagattctaaggctcgctatctgttacatatcatacctgaaccacgtgcttgatgtttag

SEQ ID NO: 157738 - DNA, 402 bp, Artificial Sequence
  derived and/or modified sequence
atgatgctgaacagcgacaccatggagctggacctgccccccacccacagcgagaccgagagcggcttcagcgactgcggcggcggcgccggccccgacggcgccggccccggcggccccggcggcggccaggccagaggccccgagcccggcgagcccggcagaaaggacctgcagcacctgagcagagaggagagaagaagaagaagaagagccaccgccaagtacagaaccgcccacgccaccagagagagaatcagagtggaggccttcaacctggccttcgccgagctgagaaagctgctgcccaccctgccccccgacaagaagctgagcaagatcgagatcctgagactggccatctgctacatcagctacctgaaccacgtgctggacgtgtag

SEQ ID NO: 157739 - DNA, 984 bp, Artificial Sequence
  derived and/or modified sequence
atgttgggatttattacaaggcctccgcataggttcctaagcctgttatgtccaggtctgcgaatccctcagctctctgtgttatgcgctcaacctcgaccaagggccatggcgatctcgtcatcctcttgcgaactcccgcttgttgccgtgtgtcaggtgaccagcactcccgacaagcaacagaacttcaaaacgtgcgccgagctggtgcgcgaggcggcacgccttggtgcatgtctggcctttcttccagaagcgttcgacttcattgccagggatccagcagaaacactccacttaagcgaacccctgggaggtaaattactggaggaatacacgcaactggcacgcgagtgcggcctgtggcttagtctgggtggttttcacgagcggggccaagactgggagcagactcagaaaatttacaattgccacgtcctgctcaattcaaagggcgctgttgtcgctacatacaggaaaacacacctctgcgacgtggagatccccggccagggacccatgtgtgagagcaattctaccatgcccggcccaagccttgaatcccccgtctccacccctgcgggtaagatcggactcgccgtgtgctacgacatgcggtttcctgagctctccctcgccctggcccaggccggtgccgagatcctgacctacccaagcgcatttgggagtattaccggacctgctcattgggaagttctcctgagggccagggctatcgagactcagtgctacgtagtggctgcagcacagtgcgggcgtcaccatgagaaacgagcctcatacggacatagcatggtggtggacccttgggggacagttgtggcccggtgctctgagggccctggtctgtgccttgcaagaatcgatctgaactatctgcggcaactccgccggcatctccctgtgtttcagcatcggagaccagacctctacggtaacctcggacatccactgtcttag

SEQ ID NO: 157740 - DNA, 984 bp, Artificial Sequence
  derived and/or modified sequence
atgctgggcttcatcacccggcccccccaccgcttcctgagcctgctgtgccccggcctgcgcatcccccagctgtctgtgctgtgtgcccagccccggccccgggccatggccatcagcagcagcagctgtgagctgcccctggtggccgtgtgccaggtgaccagcaccccagacaagcagcagaacttcaagacctgtgccgagctggtgcgggaggccgcccggctgggcgcctgcctggccttcctgcctgaggcctttgacttcatcgcccgggaccctgctgagaccctgcacctgtctgagcccctgggcggcaagctgctggaggagtacacccagctggccagagaatgtggcctgtggctgagcctgggcggcttccacgagcggggccaggactgggagcagacccagaagatctacaactgccacgtgctgctgaacagcaaaggagctgtggtggccacctacaggaagacccacctgtgtgatgtggagatccctggccagggccccatgtgtgagagcaacagcaccatgcctggccccagcctggagagccctgtgtccaccccagctgggaagattggcctggccgtgtgctatgacatgagatttcctgagctgagcctggccctggcccaggccggggctgagatcctgacctaccccagcgccttcggcagcatcactggacctgcccactgggaggtgctgctgcgggcccgggccatcgagacccagtgctacgtggtggccgccgcccagtgtggccgccaccacgagaagagggccagctatggccacagcatggtggtggacccctggggcaccgtggtggcccgctgcagcgagggccctggcctgtgcctggccagaattgacctgaactacctgcggcagctgcggcggcacctgcctgtgttccagcaccggcggccagacctgtatggcaacctgggccaccccctgtcctag

SEQ ID NO: 157741 - DNA, 984 bp, Artificial Sequence
  derived and/or modified sequence
atgctgggcttcatcacccggcccccccaccggttcctgagcctgctctgccccggcctgagaatacctcagctcagcgtcctctgtgcacagcctagaccacgggctatggcgatctcttcctcgagttgtgagcttccactcgttgctgtgtgccaagtaactagcactcccgacaagcagcagaatttcaagacatgtgccgagctggttcgcgaagccgctaggctaggtgcctgccttgcatttctgccggaagcctttgattttattgcacgggaccctgctgaaacactccaccttagcgaacccctcggagggaagctcctagaagaatacactcagctggccagggaatgcggcctgtggctgagtctcggcggttttcacgaacgaggacaggactgggagcagacccaaaaaatttacaattgccatgtgcttctcaatagcaagggggcagtggtagccacatatcggaagactcacctttgtgatgtggagatccctggtcagggcccaatgtgcgagagcaacagcaccatgcctggacctagcctcgagagccctgtgagtacccccgccggcaagataggcctggcagtatgctatgatatgcgtttcccagagttgtcacttgcactagcgcaggccggtgccgagatcctcacatacccttctgcctttggatccattacggggccagctcactgggaggtgttgcttcgcgcaagggccattgagacccagtgctacgtggtagctgctgcccagtgcggaaggcatcacgagaaacgcgcaagttacggccattccatggtggtggacccatggggcacggtggtggctcgatgttccgagggaccagggctgtgcctggcacgcatcgacctgaactatctccgtcaactccgcaggcacctgcccgtgtttcaacacagacgacctgatctttatggaaatctcgggcatccattgtcttag

SEQ ID NO: 157742 - DNA, 984 bp, Artificial Sequence
  derived and/or modified sequence
atgctcggcttcatcacgaggccgccacaccggtttctgtctcttttgtgcccgggattacgcattccccagctcagtgtgctctgtgcacaacctaggcctcgcgctatggccatatcctcaagttcctgtgaactgccactggttgcggtatgtcaggtcacatcgacgcctgataagcagcagaactttaagacctgcgcagagttggtgcgggaagccgcacgcttgggagcatgtctggcgtttctgccagaggctttcgactttatagcccgagatccagccgaaaccctgcatctctctgagcccctggggggtaagctgcttgaggaatatactcaactagcacgcgagtgtgggttgtggctatcgctgggcggatttcatgagagggggcaggactgggagcagacacagaagatttataactgtcatgtgctgttgaacagtaaaggtgccgtggtggcaacctacaggaagactcatttgtgcgatgtggagattccgggtcaaggcccaatgtgtgagagcaattcaacaatgccgggtccaagtcttgaaagccctgtgtctacccccgctggcaagattggtctggccgtgtgctacgacatgaggttcccggagttgtccctggccttggctcaggccggagccgaaatactcacatacccatccgccttcggtagcataacaggacctgcccactgggaagtcctcttgcgcgctcgggctatcgagacccagtgctacgtcgtggccgctgcgcagtgcgggagacaccacgagaagcgtgcctcctatgggcacagcatggtggtcgatccatggggaacggttgtggcccgttgcagcgagggacctggcctgtgtctcgctcggatagatctgaactatctccgacagcttaggagacacctccccgtgttccagcacagaaggcccgatctgtatgggaatctgggtcaccctctctcatag

SEQ ID NO: 157743 - DNA, 984 bp, Artificial Sequence
  derived and/or modified sequence
atgctgggcttcatcaccagacccccccacagattcctgagcctgctgtgccccggcctgagaatcccccagctgagcgtgctgtgcgcccagcccagacccagagccatggccatcagcagcagcagctgcgagctgcccctggtggccgtgtgccaggtgaccagcacccccgacaagcagcagaacttcaagacctgcgccgagctggtgagagaggccgccagactgggcgcctgcctggccttcctgcccgaggccttcgacttcatcgccagagaccccgccgagaccctgcacctgagcgagcccctgggcggcaagctgctggaggagtacacccagctggccagagagtgcggcctgtggctgagcctgggcggcttccacgagagaggccaggactgggagcagacccagaagatctacaactgccacgtgctgctgaacagcaagggcgccgtggtggccacctacagaaagacccacctgtgcgacgtggagatccccggccagggccccatgtgcgagagcaacagcaccatgcccggccccagcctggagagccccgtgagcacccccgccggcaagatcggcctggccgtgtgctacgacatgagattccccgagctgagcctggccctggcccaggccggcgccgagatcctgacctaccccagcgccttcggcagcatcaccggccccgcccactgggaggtgctgctgagagccagagccatcgagacccagtgctacgtggtggccgccgcccagtgcggcagacaccacgagaagagagccagctacggccacagcatggtggtggacccctggggcaccgtggtggccagatgcagcgagggccccggcctgtgcctggccagaatcgacctgaactacctgagacagctgagaagacacctgcccgtgttccagcacagaagacccgacctgtacggcaacctgggccaccccctgagctag

SEQ ID NO: 157744 - protein, 165 aa, Artificial Sequence
  derived and/or modified sequence
MELCRSLALLGGSLGLMFCLIALSTDFWFEAVGPTHSAHSGLWPTGHGDIISGYIHVTQTFSIMAVLWALVSVSFLVLSCFPSLFPPGHGPLVSTTAAFAAAISMVVAMAVYTSERWDQPPHPQIQTFFSWSFYLGWVSAILLLCTGALSLGAHCGGPRPGYETL

SEQ ID NO: 157745 - DNA, 826 bp, Artificial Sequence
  derived and/or modified sequence
tcatgtgacaaagcgcaggacccctcactgccccaactgcttgctgttctctctttcttgggctctaaggacccaggagtctgggtgcacagcctccttctctctgagattcaagagtctgatcagcagcctcttcctcctccaggacccagaagccctgagcttatccccatggagctctgccggtccctggccctgctggggggctccctgggcctgatgttctgcctgattgctttgagcaccgatttctggtttgaggctgtgggtcccacccactcagctcactcgggcctctggccaacagggcatggggacatcatatcaggctacatccacgtgacgcagaccttcagcattatggctgttctgtgggccctggtgtccgtgagcttcctggtcctgtcctgcttcccctcactgttccccccaggccacggcccgcttgtctcaaccaccgcagcctttgctgcagccatctccatggtggtggccatggcggtgtacaccagcgagcggtgggaccagcctccacacccccagatccagaccttcttctcctggtccttctacctgggctgggtctcagctatcctcttgctctgtacaggtgccctgagcctgggtgctcactgtggcggtccccgtcctggctatgaaaccttgtgagcagaaggcaagagcggcaagatgagttttgagcgttgtattccaaaggcctcatctggagcctcgggaaagtctggtcccacatctgcccgcccttccagcccttccccagcccctcctcttgtttcttcattcattcaacaaaatttggctggaa

SEQ ID NO: 157746 - DNA, 498 bp, Artificial Sequence
  derived and/or modified sequence
atggagctctgcaggagcctggctttgttaggcgggtcactcgggctcatgttctgcctgatcgctctttccaccgacttttggtttgaggccgttggccccacccacagcgcccactccggactgtggccgaccggtcacggagatatcatcagtggctacatccatgtgacacagaccttcagcatcatggcagtgctgtgggcgcttgtatccgtctccttcctggtgttaagttgttttcccagcctgtttccaccaggccatgggcccctagtgtccactacggccgcttttgcagctgccatctcaatggtcgtcgctatggcagtctatacctccgaacggtgggaccagcctccccacccccagatccagaccttcttctcttggtcattttatcttggctgggtcagcgccatactgttgctttgcactggagctctgtcccttggagctcattgcgggggtccacggccgggatacgagacactttag

SEQ ID NO: 157747 - DNA, 498 bp, Artificial Sequence
  derived and/or modified sequence
atggagctgtgccgcagcctggccctgctgggcggcagcctgggcctgatgttctgcctgattgccctgagcacagacttctggtttgaagctgtgggccccacccacagcgcccacagcggcctgtggcccactggacatggagacatcatcagcggctacatccacgtgacccagaccttcagcatcatggctgtgctgtgggccctggtgtctgtgtccttcctggtgctgagctgcttccccagcctcttccccccaggccacggccccctggtgtccaccacagctgcctttgctgctgccatctccatggtggtggccatggctgtgtacaccagcgagcgctgggaccagcccccccacccccagatccagaccttcttctcctggagcttctacctgggctgggtgtctgccatcctgctgctgtgcaccggggccctgagcctgggcgcccactgcggcggcccccggcccggctatgagaccctgtag

SEQ ID NO: 157748 - DNA, 498 bp, Artificial Sequence
  derived and/or modified sequence
atggagctgtgccggagcctggccctgctgggcggcagcctgggccttatgttttgtctcattgcgctgtccaccgacttctggttcgaagctgtgggcccaacccacagtgctcacagcgggttgtggcccaccggtcacggagacatcattagtggctacattcacgtgacccaaaccttcagtattatggcagtcctgtgggccctcgtgagcgtgagctttcttgtcctgtcatgcttcccttctcttttcccacctgggcatggacccctggtgtccactacagctgcgtttgcggcagcaattagcatggtggttgcaatggcagtctacaccagcgagagatgggaccagcctccccacccccagatccagacatttttcagttggtccttctacttggggtgggtgtccgcaattctcctgctgtgtactggggctctatctttgggggctcactgcgggggcccacggccaggctacgaaacgctctag

SEQ ID NO: 157749 - DNA, 498 bp, Artificial Sequence
  derived and/or modified sequence
atggaactatgcaggagtttggcgctgctgggaggtagtttgggcctgatgttctgcctcatcgctctgagtaccgatttctggttcgaggcagtgggacccacccactcagcccacagcgggctctggccaaccggccatggcgacattatttcagggtatatccatgttacacaaaccttttccatcatggccgtgctttgggctctagtttccgtatcttttttggtgctgagctgcttcccctccctgtttcctcctggccatgggccactggtgtcaactaccgcagctttcgcagccgctatctccatggtcgttgcaatggccgtgtatacctccgaacgctgggatcagccaccgcatcctcagatccagactttcttctcttggagcttctatctgggctgggtatcggccattcttctgctatgtaccggcgcactctcccttggggcacattgtggcggacctagacctggatatgagactctgtag

SEQ ID NO: 157750 - DNA, 498 bp, Artificial Sequence
  derived and/or modified sequence
atggagctgtgcagaagcctggccctgctgggcggcagcctgggcctgatgttctgcctgatcgccctgagcaccgacttctggttcgaggccgtgggccccacccacagcgcccacagcggcctgtggcccaccggccacggcgacatcatcagcggctacatccacgtgacccagaccttcagcatcatggccgtgctgtgggccctggtgagcgtgagcttcctggtgctgagctgcttccccagcctgttcccccccggccacggccccctggtgagcaccaccgccgccttcgccgccgccatcagcatggtggtggccatggccgtgtacaccagcgagagatgggaccagcccccccacccccagatccagaccttcttcagctggagcttctacctgggctgggtgagcgccatcctgctgctgtgcaccggcgccctgagcctgggcgcccactgcggcggccccagacccggctacgagaccctgtag

SEQ ID NO: 157751 - protein, 207 aa, Artificial Sequence
  derived and/or modified sequence
MVATCLQVVGFVTSFVGWIGVIVTTSTNDWVVTCGYTIPTCRKLDELGSKGLWADCVMATGLYHCKPLVDILILPGYVQACRALMIAASVLGLPAILLLLTVLPCIRMGQEPGVAKYRRAQLAGVLLILLALCALVATIWFPVCAHRETTIVSFGYSLYAGWIGAVLCLVGGCVILCCAGDAQAFGENRFYYTAGSSSPTHAKSAHV

SEQ ID NO: 157752 - protein, 165 aa, Artificial Sequence
  derived and/or modified sequence
MVATCLQVVGFVTSFVGWIGVIVTTSTNDWVVTCGYTIPTCRKLDELGSKGLWADCVMATGLYHCKPLVDILILPGYVQACRALMIAASVLGLPAILLLLTVLPCIRMGQEPGVAKYRRAQLAGVLLILLGCQLLWAKTESSLHSQHLVQFKQKYLEDFSYLQGD

SEQ ID NO: 157753 - DNA, 624 bp, Artificial Sequence
  derived and/or modified sequence
atggtcgctacatgcctgcaagtggttggctttgttacaagctttgttggttggatcggcgtaatcgtcaccacctctacaaatgattgggtggtcacgtgcggttatactataccgacttgtcggaaactggatgaactgggcagcaagggtctttgggcggattgcgttatggccacaggactgtaccattgcaagccactggtcgacattcttattctcccgggttacgtccaggcctgccgcgcactcatgatcgctgcctctgtgctggggctgcccgctatcctgctgttgctcacagtgctgccctgcatccggatgggccaagaacctggcgtggctaagtatcggcgcgcccagttggccggagttctcctgatcctactcgccttgtgcgcactggtggctacgatctggttccctgtttgcgcacatcgtgaaacaaccattgtctcatttgggtactctctgtacgccgggtggattggagctgtgctctgcctcgtcggaggatgcgtaattctgtgttgcgccggggacgctcaggctttcggcgagaaccgtttttattatacggcgggatctagttcccccacgcacgccaagagcgcgcatgtctag

SEQ ID NO: 157754 - DNA, 498 bp, Artificial Sequence
  derived and/or modified sequence
atggtggctacatgcctgcaggtggtgggattcgttactagctttgttggctggatcggcgtgattgtgaccacgagtactaacgactgggttgtgacttgtggatacacaatccccacatgccgcaaactggacgagctgggatctaaggggctctgggctgactgcgtaatggccactggcctctaccactgtaaaccactggtggacatcctcatcctgcccggctatgtgcaggcctgtcgtgctttaatgatcgccgcaagcgttttgggcttaccagccattttattactcctaaccgtgcttccatgcatacggatgggacaggaacccggagtcgcaaaataccgccgcgctcaattggccggtgttctcctcatcctgctggggtgtcagttgctgtgggccaagacagaatcaagccttcattctcaacacctcgtacaattcaaacagaaatatctagaggactttagctatctgcagggcgattag

SEQ ID NO: 157755 - DNA, 498 bp, Artificial Sequence
  derived and/or modified sequence
atggtggctacttgcctgcaggtagtgggcttcgtcacaagcttcgtgggctggattggcgttatcgtcactaccagcacaaacgactgggtggtgacttgcggttacacaatcccaacctgcaggaagctcgatgaactgggaagcaagggtctgtgggccgactgcgttatggccaccggactgtaccattgtaaacctttggtcgacatcctgatcctgcccggatatgtgcaggcttgccgggccctgatgatcgccgcatcagtgctgggcctccccgcaatcttgctgctgctgacagtgttgccttgcattagaatggggcaagagcctggtgtggcaaaatatagaagggctcagctcgctggtgtcctgctgatcctgctgggatgccagctcctctgggctaaaactgagtcgagcctacattcgcagcacttggtgcaattcaagcagaagtaccttgaagacttctcgtacctccaaggggactag

SEQ ID NO: 157756 - DNA, 624 bp, Artificial Sequence
  derived and/or modified sequence
atggtggccacctgcctgcaggtggtgggctttgtgaccagctttgtgggctggattggagtcatcgtgaccaccagcaccaatgactgggtggtgacctgtggctacaccatccccacctgcaggaagctggatgagctgggcagcaagggcctgtgggccgactgtgtgatggccaccggcctgtaccactgcaagcccctggtggacatcctgatcctgcccggctacgtgcaggcctgccgggccctgatgattgctgcctctgtgctgggcctgcctgccatcctgctgctgctgactgtgctgccctgcatccgcatgggccaggagcccggggtggccaagtaccgccgggcccagctggccggcgtgctgctgatcctgctggccctgtgtgccctggtggccaccatctggttccctgtgtgtgcccaccgggagaccaccatcgtgtcctttggctacagcctgtatgccggctggattggagctgtgctgtgcctggtgggcggctgtgtgatcctgtgctgtgctggagatgcccaggcctttggagaaaatcgcttctactacacagctggcagcagcagccccacccacgccaagagcgcccacgtgtag

SEQ ID NO: 157757 - DNA, 498 bp, Artificial Sequence
  derived and/or modified sequence
atggtggccacctgcctgcaggtggtgggctttgtgaccagctttgtgggctggattggagtcatcgtgaccaccagcaccaatgactgggtggtgacctgtggctacaccatccccacctgcaggaagctggatgagctgggcagcaagggcctgtgggccgactgtgtgatggccaccggcctgtaccactgcaagcccctggtggacatcctgatcctgcccggctacgtgcaggcctgccgggccctgatgattgctgcctctgtgctgggcctgcctgccatcctgctgctgctgactgtgctgccctgcatccgcatgggccaggagcccggggtggccaagtaccgccgggcccagctggccggcgtgctgctgatcctgctgggctgccagctgctgtgggccaagacagagagcagcctgcacagccagcacctggtgcagttcaagcagaagtacctggaggacttctcctacctgcagggcgactag

SEQ ID NO: 157758 - DNA, 624 bp, Artificial Sequence
  derived and/or modified sequence
atggtggccacctgcctgcaggtggtgggcttcgtgaccagcttcgtggggtggattggagttatcgtgaccacttccaccaatgactgggtagtgacctgcggctataccatcccaacctgtcgcaagctggatgagttgggaagcaagggactatgggctgactgcgtaatggccacagggctttatcactgtaagcccctggtggacattctgatccttcctggatacgtccaagcatgcagggccttaatgatcgcagcttcagtgctggggctgcccgccatcctgttgctgcttacagtactcccctgcatcaggatgggacaggagcccggggtcgccaaatatcgaagagcccaactggccggagtgctcctgattctgttagcattgtgcgctctggtggcaacgatttggtttccggtttgcgcccaccgggagaccaccatcgttagcttcggatacagcctgtatgcaggatggatcggagccgttctttgcctggtaggtggctgtgttatcttatgttgcgccggtgatgcacaagccttcggtgaaaacagattttattacacagccggttcctcttcacctacacatgctaaaagtgcccacgtgtag

SEQ ID NO: 157759 - DNA, 498 bp, Artificial Sequence
  derived and/or modified sequence
atggtggccacctgcctgcaggtggtgggcttcgtgaccagcttcgttggctggatcggcgtcattgtgacaactagcacaaacgactgggtcgttacttgcggttacactatccccacttgccggaagctggatgaactaggctccaaaggactgtgggccgactgtgtgatggccacaggattgtaccattgtaagcccctggtcgacatacttatcttacccggctacgtccaagcctgtagggcattgatgatagcagccagcgtcctcggcctacctgcaattctgttacttttaaccgtccttccgtgtatccggatgggccaggaaccaggagtcgctaagtaccgcagagcccagctagcaggtgtacttctaatcctcctgggctgtcagctgctgtgggcgaaaactgagagctccctgcatagccagcacctcgtacagttcaaacagaagtatcttgaagattttagttatctgcagggagattag

SEQ ID NO: 157760 - DNA, 498 bp, Artificial Sequence
  derived and/or modified sequence
atggtggccacctgcctgcaggtggtgggcttcgtgaccagcttcgtcggctggatcggcgtgattgtgaccaccagcaccaatgattgggtggttacatgcggatataccattcctacgtgccgcaaactggacgagttaggctccaagggactctgggccgattgcgtgatggcaaccgggctgtaccactgcaagcctcttgttgatattttgatcttgcccggatatgtgcaggcctgccgcgccctgatgatagcagcgtctgtcttgggactgcctgctattctgctgcttttaactgtgctgccttgtattagaatgggacaagaacctggggtggcgaagtaccgccgcgcacagttggcgggcgttctgcttatcctcctaggctgtcagctgttgtgggcaaaaaccgaatccagtctgcattctcagcaccttgtgcagttcaagcagaagtacctcgaggattttagctacctccagggcgattag

SEQ ID NO: 157761 - DNA, 624 bp, Artificial Sequence
  derived and/or modified sequence
atggtcgcaacttgtctgcaagtggtggggttcgtgacctcctttgtggggtggattggggtcatagtcacgactagtaccaacgactgggtggtgacatgcgggtatactatccctacctgccgaaagttggacgaactgggttcgaagggcctatgggctgactgtgttatggccactggcctttaccactgcaaacccttggtggacatcttaattctgcctgggtacgtgcaggcatgccgggctttgatgatcgctgctagcgtgctaggtttaccagccatccttcttctcctgactgttcttccttgtatcagaatgggtcaggaaccgggagtagctaaatatcggagggcacagctcgccggtgtgctgctgatccttctcgctctgtgtgctctggtagccactatttggtttcctgtgtgtgcccacagagaaacgaccatcgtgtcattcgggtattcactttacgcgggttggatcggtgcagtgctgtgcctggtgggaggctgcgttatcctgtgctgcgcaggtgatgcccaggcctttggtgagaatcgcttttattacaccgccggttcgtccagccctacgcacgctaagagcgcacacgtctag

SEQ ID NO: 157762 - DNA, 498 bp, Artificial Sequence
  derived and/or modified sequence
atggtggcaacatgcctacaagtggtggggtttgtgactagcttcgtgggctggatcggggtaatcgtaacaacaagtacaaacgattgggtcgtaacatgtggatatactatccccacctgccggaagctagatgagcttgggtcaaaaggcctctgggcagattgcgttatggcaaccgggctttaccattgcaaaccactggttgacatccttatcttaccaggctacgtgcaggcgtgcagggccctgatgatagccgcttccgtcttgggactaccggctatactgctcttgctgaccgtgctcccctgcattcgcatgggccaggagcccggagttgccaagtaccgcagggcgcagttggctggagtgcttctgattctgttgggatgtcagctcctgtgggcaaagacagagagtagcctgcactcacagcacctggtccaatttaagcaaaaatacttggaagatttcagttacctgcaaggggactag

SEQ ID NO: 157763 - DNA, 498 bp, Artificial Sequence
  derived and/or modified sequence
atggtggccacttgtttacaagttgtgggcttcgtgaccagctttgtgggttggatcggtgtgatcgtgacaacgtcgactaatgattgggtggtaacatgtgggtatacaatccctacctgtcgcaagctggacgagcttggaagtaaaggactgtgggcggactgcgtcatggctacaggcctgtatcactgcaaaccgctggtggacattctgatactaccgggatacgttcaggcatgtcgcgctctgatgatcgccgcttcggtattgggtctccccgctatactgctattactgacagtcctcccttgtattcgaatgggacaagagcccggagtggcgaagtatcgtcgggcacagctggccggtgttctgctcatacttctgggctgtcaactcctgtgggccaaaactgagtcttctctccatagccagcacttagttcagtttaagcagaagtatctagaggacttttcttatctgcagggcgattag

SEQ ID NO: 157764 - DNA, 624 bp, Artificial Sequence
  derived and/or modified sequence
atggtggcgacctgcctccaggtcgtggggtttgtgacaagttttgttggttggataggtgtgattgttacaacatcaacaaacgattgggtagtcacatgcgggtacacgatccccacttgtagaaaacttgacgaactggggtcaaagggcctctgggccgactgcgtgatggctactggcctctatcattgcaaacctctagtggatatcctgattctccccggttatgttcaggcctgtagagccctcatgatagctgccagtgtcctgggcttaccagcaatcctcctgttacttactgtgttaccatgcattagaatgggtcaggagcccggcgtggctaagtaccgcagagcccagctcgctggggtgctccttattctacttgctctgtgtgcccttgtcgcaaccatctggttcccggtatgtgctcatagagagacaacaatagttagttttggatatagcctttacgctgggtggatcggcgcggtactttgtctcgtcggcggctgtgttatcctgtgttgcgccggtgatgcacaggcctttggagaaaaccggttttattacaccgccggatcatcgtcacccacccacgctaaaagtgcacacgtctag

SEQ ID NO: 157765 - DNA, 624 bp, Artificial Sequence
  derived and/or modified sequence
atggtcgcgacctgcctccaagtcgtggggtttgtgacctctttcgtcgggtggatcggagtgattgtgaccacctctacgaacgactgggtggtgacatgcggctacaccatcccaacgtgtaggaagcttgatgaattggggtctaagggattatgggccgactgcgtgatggcaactgggttgtaccactgtaagccactggtcgatatcctcatcctacctggctacgttcaagcttgcagagccttaatgatcgctgcatctgtgctagggttgcctgctattctccttcttttgacagttctgccttgcatcagaatgggccaggagccaggagtcgctaaataccgccgcgcacagctcgcgggagtgcttttgattctgctcgccctttgcgcccttgtagctacaatctggttccccgtttgtgcccaccgtgaaacaacgatcgtcagttttggctatagcctatacgccggctggataggtgcagtcctctgcctcgtcggtggctgcgtgatcctgtgttgtgcaggtgatgcgcaggcgtttggtgagaatcgcttctactataccgccggatcatcctcacccacacatgccaaatctgctcacgtatag

SEQ ID NO: 157766 - DNA, 2169 bp, Artificial Sequence
  derived and/or modified sequence
agcagcgctgctgtccccgccgtgcgcccttcgccgctgagctcgcagcctccggcgcccacctccacctccagtgtcccgcctcgggccgtcgccctccagcggctcgcgagcgtgggagacgtacctgggcaggcactgtccagcccaggcccaggcacagccgtgaggggcgaggcacggggacatcctggcggccaccatggtggccacgtgcctgcaggtggtgggcttcgtcacgagcttcgtgggctggatcggggtcatcgtgaccacctccaccaatgactgggtggtgacctgcggctacaccatccccacctgccgcaagctggatgagctgggctccaaggggctgtgggccgactgcgtcatggccacggggctgtaccactgcaagcccctggtggacatcctcatcctgccgggctacgtgcaggcctgccgcgccctgatgattgctgcctcggtcctgggtctgccggccattttactgctgctgactgttcttccctgcatccggatgggccaggagcccggtgtggctaagtacaggcgggcccagctggctggtgttttgctcattctgctggctctctgcgcccttgttgccaccatctggttccctgtgtgcgcccaccgtgagaccaccatcgtgagctttggctactccctgtatgcaggctggattggtgctgtgctgtgcctcgtgggtggctgtgtcatcctctgctgcgctggagatgcccaggcctttggtgaaaaccgtttctactacactgcgggctctagctccccgactcatgcgaagagtgcccacgtataagagggctgcccggctgcccacagaggtgctgtagatgctgggcccagggccctaggtttgctcgtcacagtgtggggaagcccattcctctgccaggctctaaagccaaaggtctagaaaagcatcctgtctggcattttgtagtcttaacttctccccatttcccccatcttttggttgccttaaaagaaatctctagctcagataatgcccagacatttttttcccttggtgttgcccctattagctcttttcttgggcattcttttgctgtttattaaaaatatattatatatattttgtttctttaaatttcaaatgttttgcaaacatcactgagttaggtgggggtggggaagagaaatacaagatacttttttttttttttttttttttttttttttaaatagggcctcactctgttgctcaggctggagtgcggtggtgtgatctcggctcatgtagcctcaacctccccggctcaagtgatcctcctgcctcagcctcccaagtagctgggactacaggcgttcactactacacccagctaatttttaagttttttatagagatgagggctccctatgttgcccaggttggtctcgaactcctggactcaaagtatcctcccgcctcggcctcccaaagtgttgggattataggagtgagccaccacaccggccaagatgcttttcaaactgatacagatgacaatgggagcctcataaagatggcttttgtttcttcccttcaaggtcatttacttgtacgagacagaaaaagatagcattggggacatgggatgggggagggagggcaatagtggaacgaactttccatgggaaactttcccttttgtaagttgagggccaggggtagggatattttttagtttgtgattttacatttatctgtacatactttttcaagattgatcatttttataaccatggttttcctgaaatcctcaattcatcaatatgaaggaaatgaaccacatagactttatgcaataaataacagtgcaagtgagtataactctaactgatgttccacaaaacatttttgatttcaggtttgtatgatgtagtttttaatcgtacattttcatatgcttcaaactaacacatttttaaagctttcccccacttttctctctatttgtattgttagccatcttgaagtgatgttgtttaacataaattgtactgttgaatttggctttacgggtgtaaacactgatggtatatcagtatctgagaccccaaactctccaaatactgatggtgcattttattcttgaagtgaaatctgtgcaataaaataacagactgtctgcaaaa

SEQ ID NO: 157767 - DNA, 498 bp, Artificial Sequence
  derived and/or modified sequence
atggtggccacgtgcctgcaggtggtgggcttcgtcacgagcttcgtgggctggatcggggtcatcgtgaccacctccaccaatgactgggtggtgacctgcggctacaccatccccacctgccgcaagctggatgagctgggctccaaggggctgtgggccgactgcgtcatggccacggggctgtaccactgcaagcccctggtggacatcctcatcctgccgggctacgtgcaggcctgccgcgccctgatgattgctgcctcggtcctgggtctgccggccattttactgctgctgactgttcttccctgcatccggatgggccaggagcccggtgtggctaagtacaggcgggcccagctggctggtgttttgctcattctgctgggctgtcagcttctttgggcaaagactgagtcatctctgcattctcagcacctggtgcaatttaagcagaaatatcttgaagatttttcgtatcttcagggagattag

SEQ ID NO: 157768 - DNA, 1139 bp, Artificial Sequence
  derived and/or modified sequence
agcgctgctgtccccgccgtgcgcccttcgccgctgagctcgcagcctccggcgcccacctccacctccagtgtcccgcctcgggccgtcgccctccagcggctcgcgagcgtgggagacgtacctgggcaggcactgtccagcccaggcccaggcacagccgtgaggggcgaggcacggggacatcctggcggccaccatggtggccacgtgcctgcaggtggtgggcttcgtcacgagcttcgtgggctggatcggggtcatcgtgaccacctccaccaatgactgggtggtgacctgcggctacaccatccccacctgccgcaagctggatgagctgggctccaaggggctgtgggccgactgcgtcatggccacggggctgtaccactgcaagcccctggtggacatcctcatcctgccgggctacgtgcaggcctgccgcgccctgatgattgctgcctcggtcctgggtctgccggccattttactgctgctgactgttcttccctgcatccggatgggccaggagcccggtgtggctaagtacaggcgggcccagctggctggtgttttgctcattctgctgggctgtcagcttctttgggcaaagactgagtcatctctgcattctcagcacctggtgcaatttaagcagaaatatcttgaagatttttcgtatcttcagggagattaggaatgggaatggaatgggaacgccaatgcaggaaggatgagaagtctgcagatgcctccaaggagtccgaaaccaagtccgaagtcaacgacaagcaatgatggcgatggcgatcctagttaataaaaaggggggagatgtgggctgcaagccacccaggtgccgaggcaagagaccgaggacatgagctgttccagtataataaaatataaaacaagaatagttataccagatatagatcttagatatgattatatatgaatataattaatcattagtttgtggcaattactctttattccaatattataataatcctcgctctataatcataacctaggaaaaaccaggccatacagagataggagctgaggggacatagtgaggagtgaccagaagacaagagtgcgagccttctgttatgcccagacagggccaccag

SEQ ID NO: 157769 - DNA, 624 bp, Artificial Sequence
  derived and/or modified sequence
atggtggccacctgcctgcaggtggtgggcttcgtgaccagcttcgtgggctggatcggcgtgatcgtgaccaccagcaccaacgactgggtggtgacctgcggctacaccatccccacctgcagaaagctggacgagctgggcagcaagggcctgtgggccgactgcgtgatggccaccggcctgtaccactgcaagcccctggtggacatcctgatcctgcccggctacgtgcaggcctgcagagccctgatgatcgccgccagcgtgctgggcctgcccgccatcctgctgctgctgaccgtgctgccctgcatcagaatgggccaggagcccggcgtggccaagtacagaagagcccagctggccggcgtgctgctgatcctgctggccctgtgcgccctggtggccaccatctggttccccgtgtgcgcccacagagagaccaccatcgtgagcttcggctacagcctgtacgccggctggatcggcgccgtgctgtgcctggtgggcggctgcgtgatcctgtgctgcgccggcgacgcccaggccttcggcgagaacagattctactacaccgccggcagcagcagccccacccacgccaagagcgcccacgtgtag

SEQ ID NO: 157770 - DNA, 498 bp, Artificial Sequence
  derived and/or modified sequence
atggtggccacctgcctgcaggtggtgggcttcgtgaccagcttcgtgggctggatcggcgtgatcgtgaccaccagcaccaacgactgggtggtgacctgcggctacaccatccccacctgcagaaagctggacgagctgggcagcaagggcctgtgggccgactgcgtgatggccaccggcctgtaccactgcaagcccctggtggacatcctgatcctgcccggctacgtgcaggcctgcagagccctgatgatcgccgccagcgtgctgggcctgcccgccatcctgctgctgctgaccgtgctgccctgcatcagaatgggccaggagcccggcgtggccaagtacagaagagcccagctggccggcgtgctgctgatcctgctgggctgccagctgctgtgggccaagaccgagagcagcctgcacagccagcacctggtgcagttcaagcagaagtacctggaggacttcagctacctgcagggcgactag

SEQ ID NO: 157771 - protein, 443 aa, Artificial Sequence
  derived and/or modified sequence
MATAASNHYSLLTSSASIVHAEPPGGMQQGAGGYREAQSLVQGDYGALQSNGHPLSHAHQWITALSHGGGGGGGGGGGGGGGGGGGGGDGSPWSTSPLGQPDIKPSVVVQQGGRGDELHGPGALQQQHQQQQQQQQQQQQQQQQQQQQQRPPHLVHHAANHHPGPGAWRSAAAAAHLPPSMGASNGGLLYSQPSFTVNGMLGAGGQPAGLHHHGLRDAHDEPHHADHHPHPHSHPHQQPPPPPPPQGPPGHPGAHHDPHSDEDTPTSDDLEQFAKQFKQRRIKLGFTQADVGLALGTLYGNVFSQTTICRFEALQLSFKNMCKLKPLLNKWLEEADSSSGSPTSIDKIAAQGRKRKKRTSIEVSVKGALESHFLKCPKPSAQEITSLADSLQLEKEVVRVWFCNRRQKEKRMTPPGGTLPGAEDVYGGSRDTPPHHGVQTPVQ

SEQ ID NO: 157772 - protein, 376 aa, Artificial Sequence
  derived and/or modified sequence
MATAASNHYSLLTSSASIVHAEPPGGMQQGAGGYREAQSLVQGDYGALQSNGHPLSHAHQWITALSHGGDGSPWSTSPLGQPDIKPSVVVQQGGRGDELHGPGALQQQHQQQQQQQQQQQQQQQQQQQQQRPPHLVHHAANHHPGPGAWRSAAAAAHLPPSMGASNGGLLYSQPPPPPQGPPGHPGAHHDPHSDEDTPTSDDLEQFAKQFKQRRIKLGFTQADVGLALGTLYGNVFSQTTICRFEALQLSFKNMCKLKPLLNKWLEEADSSSGSPTSIDKIAAQGRKRKKRTSIEVSVKGALESHFLKCPKPSAQEITSLADSLQLEKEVVRVWFCNRRQKEKRMTPPGGTLPGAEDVYGGSRDTPPHHGVQTPVQ

SEQ ID NO: 157773 - DNA, 4172 bp, Artificial Sequence
  derived and/or modified sequence
agtaatagcaggagcagcaacagaaggcgtcggagcgggcgtcggagctgcccgctgtgggagagagaggagacagaaagagcgagcgaggagagggagcccgaggcgaaaaagtaactgtcaaatgcgcggctcctttaaccggagcgctcagtccggctccgagagtcatggcgaccgcagcgtctaaccactacagcctgctcacctccagcgcctccatcgtgcacgccgagccgcccggcggcatgcagcagggcgcggggggctaccgcgaagcgcagagcctggtgcagggcgactacggcgctctgcagagcaacggacacccgctcagccacgctcaccagtggatcaccgcgctgtcccacggcggcggcggcgggggcggtggcggcggcggggggggcgggggcggcggcgggggcggcggcgacggctccccgtggtccaccagccccctgggccagccggacatcaagccctcggtggtggtgcagcagggcggccgcggagacgagctgcacgggccaggcgccctgcagcagcagcatcagcagcagcaacagcaacagcagcagcaacagcagcaacagcagcagcagcagcagcaacagcggccgccgcatctggtgcaccacgccgctaaccaccacccgggacccggggcatggcggagcgcggcggctgcagcgcacctcccaccctccatgggagcgtccaacggcggcttgctctactcgcagcccagcttcacggtgaacggcatgctgggcgccggcgggcagccggccgggctgcaccaccacggcctgcgggacgcgcacgacgagccacaccatgccgaccaccacccgcacccgcactcgcacccacaccagcagccgccgcccccgccgcccccgcagggtccgcctggccacccaggcgcgcaccacgacccgcactcggacgaggacacgccgacctcggacgacctggagcagttcgccaagcagttcaagcagcggcggatcaaactgggatttacccaagcggacgtggggctggctctgggcaccctgtatggcaacgtgttctcgcagaccaccatctgcaggtttgaggccctgcagctgagcttcaagaacatgtgcaagctgaagcctttgttgaacaagtggttggaggaggcggactcgtcctcgggcagccccacgagcatagacaagatcgcagcgcaagggcgcaagcggaaaaagcggacctccatcgaggtgagcgtcaagggggctctggagagccatttcctcaaatgccccaagccctcggcccaggagatcacctccctcgcggacagcttacagctggagaaggaggtggtgagagtttggttttgtaacaggagacagaaagagaaaaggatgacccctcccggagggactctgccgggcgccgaggatgtgtacggggggagtagggacactccaccacaccacggggtgcagacgcccgtccagtgaactcgagctgggggaggggcagagcgcggggctccccctccccttcggtccttggccctttcccggccctcttgttccctctctaacttctgattgttcttttatttttaattattatttccccgtcccttaaaaagacaaaaaaaataaggcaaaaggaaagcaactaagacactggactatcctttaaaggtagcaggtgtaatgatgtgttttgacctttgcaggcgagtaaccaggcaatggagtggagtgtctcctggagagagtgaggagagtgtgtgatagctagaaagagagagagacagagagatggcaagcactgagataaatacctggcaaaactaaataaattaccaaaaaggaaaaaaaatccaccaaaccatgataaacacaaaatgcagcttcctgatgcttagagttggcacatgctgctgtgtttatttattgtggattcccatcaggaaagaggaaaaaatacacatgttctttcatataggcaaaatttaaccacataaatttgcactgcaagaaaattgaagtttacgtgaacaaattcatgagcatattttctctttctccccaccgttaatttgggagttgccgttttgggggattttgttttgctttgctttattcatcggagagagttgaagccagctcttggccactctccatttctaatgttcttgtgttgccccttcttcgtactgtttgtgaactttggttaccttcacattccccttacgagggtgtaacatctatttgttcctcttaccaaagcaaaaggattggcttcatacaaaatagacaattctctgatttcaggaaatgtgcatggtctacccgctttatcgaaggcaagaatccggtttggaatataaaaataagcattggttgttcttaccagccacaaagtaaacttcattttcaggcagtgtttctgggggaggttatggagggaagaaaaaagaaaaatcgatagtgagtgactgattgcttcattttatcaggcgggcccattgtgaaagagctcaggggaaatgtggaggttaaatatatttccagagttgtccagcagaaagaaagtggcactttgaagagaactagggaagtacatatcttcagatatccctatatagttctctaccttcagttttagtaacaattatgaagaattatttgtgctgacagcagcagttaaactttgtttctctaatagctttttttttacataaaaaaagacccaggaacttaatagtgtatgcataagactgtgttttttagcacacagatacccacagcatacactgacgatctccacgcagtagacaggttttgtcttcactagctcatttgtttatcaagtcatatttagggtcccacaccctcttttcctgtaatttattgcagaatacaccactttgacttggacagctttctgccccctctttcactaaggaaggcaaatgaagtgaaaaaaaaaaatgccattttcaatccttcctttctcccctttgttaatagttttaagtgaatttttgaccttatcttaatggaaaacggttaactccaaacacaaaagactctactggaaagtgtaggtgaaaaaacttgtaactgtattgaaaataaataccattaaactgtgatcagttaaaatttaaaagaaaaatcagcacaaaagggcgctaaaagggaaaacactttttattaatcttaaaagtttgggggtttttttccagttaggtattagataaatttttattttaaaaaatgaaagtctcactaccataaaattatggttcagcatcagattagcattgcactcagtagtctttaaggttttaggaaatatgctttatattgtcttttcaaacacctgtgattgtttcattttccatgtttttgcaagataaatggtgacttataatgggcatatttatttgcctgtatttcatttcccccaatgaatgtcacaaggagatgggcacggagctgcttcgggtgcatcacgctgctcgttcctgaggtatgggaactggcctttagtgaagctatccagagcagggcaaatagccactggtaaagggaggaaatgaatttccagatacttattaccaagtaggtaaggtcagaagctggagttcagagaatgtgtctacagcttctctgactcttataggtttactaagatgaaagttaccactgaaccttaccactatgtatatatgtttaatatctgtcttttgaaatgcagaaatagtttaaatgtttctttgtctatttttctttttttttaatgctacccagggaaatattttcatatcatttttaagtggcctgcctcaatgtatatttatttcttttgaaacaaaaaggttctggaaactgtttttctgtagctttaaatgaataggtgagcaaaatctatatgggatgtaatttttttgttcagtctcttaaaaaatactttgttttggtacatttggttgtgcttgtggggaaaataaaaacgcagagatccttatatatttatgttaaagtaatattttattatctacataaaacagaaatgcacaataaaaaaaaaaaaaaaaaaaaaaaaaaaaaaaaaaaaaaaaaaaaaaaaaaaaaaaaaaaaaaaaaaaaaaaaaaaaaaaaaaaaaa

SEQ ID NO: 157774 - DNA, 1332 bp, Artificial Sequence
  derived and/or modified sequence
atggcaacagcggcctccaatcattactctttgctgaccagttctgccagcatcgtgcacgctgaaccacctggcggtatgcagcagggtgcaggggggtaccgcgaagcacagtctctcgtacagggagactacggcgctctgcagtccaacggccaccctttgagtcatgctcaccagtggatcacagccctgtcccacggcgggggtggtggtggtggaggcggaggcggtggaggaggaggcggaggtggaggcgggggcgatggatccccttggagcacttcccccttaggtcaacccgatatcaaaccctcggtcgtggtccagcagggagggcgaggggacgaactgcatgggcctggcgcattgcagcagcagcaccagcagcagcagcaacagcagcagcaacagcagcagcagcagcaacaacagcagcaacagcagaggcccccacatctggtgcaccacgcagctaaccatcatcccggtccgggcgcatggaggtccgcagcggccgccgcgcaccttccaccgtctatgggcgcctcgaatgggggattgttgtatagtcagccaagcttcaccgtgaatgggatgctgggtgccggaggccagccggccggcctgcaccaccatggactccgagacgctcacgacgagccccaccacgcagaccatcatccgcatccccattcgcatccccaccaacaacctccaccaccgcccccccctcaagggcctcccggccatcccggggcccatcacgatccacatagtgatgaggatactcctacaagtgacgacttggaacagttcgcaaaacagtttaagcagcgtagaattaagctgggctttactcaagcggacgtgggccttgcgttgggaaccctctatggtaatgtcttttcgcagactacgatctgccggttcgaggctctgcaactgtctttcaagaatatgtgcaagctgaaacctttgctgaacaaatggttggaggaggccgattccagttcaggctcacctaccagcatcgacaagatagctgcccaaggaagaaaaagaaaaaaaaggacatctatcgaggtgtctgtgaagggggcactggaaagtcactttctgaagtgtccaaaaccttcggctcaggagataacaagcctagccgactcgctccagctggaaaaggaggtcgtgcgtgtgtggttttgcaacagacgccagaaagaaaagaggatgaccccccctgggggcactctgccaggtgcagaggacgtgtacggcggctcacgagatacacccccacatcacggcgtgcagacacccgtgcagtag

SEQ ID NO: 157775 - DNA, 1131 bp, Artificial Sequence
  derived and/or modified sequence
atggctaccgctgcatccaaccactatagcctcctgacctcatccgcctcgatcgtccacgctgagccccccggcggaatgcagcagggcgccggaggctatcgcgaagctcagtcacttgttcagggcgattacggcgccctgcaatcaaacggacatccattatcgcatgcccaccagtggattaccgctttgtcacacggtggggacgggagcccttggtcaacatccccccttggccagcccgatatcaaaccgagcgtggtggtgcagcagggggggaggggtgacgagctgcatggacccggcgccctgcaacagcagcatcagcagcaacagcagcagcagcagcagcagcagcagcagcagcagcagcaacagcagcagcagagacccccacacctggtgcatcacgccgctaaccaccatcctggaccaggtgcctggcgttctgcagccgcggcagcgcatctgccgccttccatgggcgcatcaaacggaggcctcctttacagtcagcctccacctcccccccagggacctcctgggcaccccggagctcatcatgatcctcattccgacgaagatacccccacttcggatgatttggagcagtttgcaaagcagttcaagcagaggcgtatcaagttaggatttacccaagccgacgtgggcctggcgctcggtacgctgtacgggaatgtgtttagccaaaccaccatttgccgcttcgaggcactgcagctcagcttcaagaatatgtgtaagctcaaacctctgctgaacaagtggctggaagaagctgattcaagcagcgggagccctacaagtattgacaagatcgccgcccaaggccggaagcggaaaaaacgcacctccattgaggtgagtgtgaagggtgcccttgagtcacactttctgaaatgtcccaagccatcagctcaggagataacttcccttgccgacagtttgcagttggaaaaagaggtggtgcgtgtgtggttctgcaaccggagacagaaggaaaaaagaatgacaccccccggcgggacactgccgggagccgaggacgtttatgggggtagccgggataccccgccacaccacggagtacagactcctgttcaatag

SEQ ID NO: 157776 - DNA, 1332 bp, Artificial Sequence
  derived and/or modified sequence
atggccacagctgccagcaaccactacagcctgctgaccagcagcgccagcatcgtgcatgctgagcccccaggcggcatgcagcagggcgccggcggctaccgggaggcccagagcctggtgcagggcgactatggagccctgcagagcaatggccaccccctgagccacgcccaccagtggatcacagccctgagccatggaggcggcggcggcggcggcggcggcggcggcggcggcggcggcggcggcggcggcggcggagatggcagcccctggagcaccagccccctgggccagcctgacatcaagcccagcgtggtggtgcagcagggcggcagaggagatgagctgcacggccctggggccctgcagcagcagcaccagcagcagcagcagcagcagcagcagcagcagcagcagcagcagcagcagcagcagcagcagaggcctccccacctggtgcaccacgccgccaaccaccaccctggccctggggcctggaggtctgctgctgctgctgcccacctgccccccagcatgggcgccagcaatggaggcctgctgtacagccagcccagcttcaccgtgaatggcatgctgggcgccggcggccagcctgctggcctgcaccaccacggcctgagagatgcccatgatgagccccaccacgccgaccaccacccccacccccacagccacccccaccagcagcccccacctcctcctccaccccagggccccccaggccaccctggggcccaccacgacccccacagtgatgaggacacccccaccagtgatgacctggagcagtttgccaagcagttcaagcagaggcgcatcaagctgggcttcacccaggctgatgtgggcctggccctgggcaccctgtatggaaatgtgttcagccagaccaccatctgccgctttgaggccctgcagctgtccttcaagaacatgtgcaagctgaagcccctgctgaacaagtggctggaggaggccgacagcagcagcggcagccccaccagcattgacaagattgctgcccagggcaggaagaggaagaagaggaccagcattgaggtgtctgtgaagggggccctggagagccacttcctgaagtgccccaagcccagcgcccaggagatcaccagcctggccgacagcctgcagctggagaaggaggtggtgcgggtgtggttctgcaacagacggcagaaggagaagaggatgaccccacctgggggcaccctgcccggggctgaagatgtgtatggaggcagccgggacaccccaccccaccacggcgtgcagacccctgtgcagtag

SEQ ID NO: 157777 - DNA, 1131 bp, Artificial Sequence
  derived and/or modified sequence
atggccacagctgccagcaaccactacagcctgctgaccagcagcgccagcatcgtgcatgctgagcccccaggcggcatgcagcagggcgccggcggctaccgggaggcccagagcctggtgcagggcgactatggagccctgcagagcaatggccaccccctgagccacgcccaccagtggatcacagccctgagccatggaggagatggcagcccctggagcaccagccccctgggccagcctgacatcaagcccagcgtggtggtgcagcagggcggcagaggagatgagctgcacggccctggggccctgcagcagcagcaccagcagcagcagcagcagcagcagcagcagcagcagcagcagcagcagcagcagcagcagcagaggcctccccacctggtgcaccacgccgccaaccaccaccctggccctggggcctggaggtctgctgctgctgctgcccacctgcccccatccatgggcgccagcaatggaggcctgctgtacagccagcccccacctccaccccagggccccccaggccaccctggggcccaccacgacccccacagtgatgaggacacccccaccagtgatgacctggagcagtttgccaagcagttcaagcagaggcgcatcaagctgggcttcacccaggctgatgtgggcctggccctgggcaccctgtatggaaatgtgttcagccagaccaccatctgccgctttgaggccctgcagctgtccttcaagaacatgtgcaagctgaagcccctgctgaacaagtggctggaggaggccgacagcagcagcggcagccccaccagcattgacaagattgctgcccagggcaggaagaggaagaagaggaccagcattgaggtgtctgtgaagggggccctggagagccacttcctgaagtgccccaagcccagcgcccaggagatcaccagcctggccgacagcctgcagctggagaaggaggtggtgcgggtgtggttctgcaacagacggcagaaggagaagaggatgaccccacctgggggcaccctgcctggagcagaagatgtgtatggaggcagccgggacaccccaccccaccacggcgtgcagacccctgtgcagtag

SEQ ID NO: 157778 - DNA, 1332 bp, Artificial Sequence
  derived and/or modified sequence
atggccaccgccgccagcaaccactacagcctgctgaccagcagcgcatccattgtacacgctgaaccccctggtggaatgcagcaaggtgctggaggctatcgggaggcgcaatctctggtccagggcgattacggcgcacttcagagcaatggacacccactttctcatgcgcaccagtggataaccgcattaagccatggaggcggcggtggcggaggggggggaggaggtggaggtgggggcgggggtggtggggggggtgatggaagtccttggagtacctcaccattgggacagcctgatataaagcccagcgttgtcgtccagcagggggggcgaggtgatgaactgcacggacccggggccctgcagcagcaacaccagcagcagcagcagcagcagcagcagcagcaacagcagcagcagcagcagcagcagcaacaacggcccccgcatctcgtccaccatgccgctaaccaccaccccgggcctggtgcctggaggtccgcagccgccgctgcacacctccccccttccatgggcgctagcaatggtggtttattgtactcacagccgagctttactgtaaatgggatgctgggtgcaggaggtcaacctgctggactgcaccaccatggattacgggatgctcacgacgaaccacaccatgccgaccatcacccgcacccgcattctcatccccaccagcaacctcctccgccccctcctcctcagggaccaccaggtcaccccggagcccatcacgacccccatagcgacgaggacacaccaacctccgacgatttagagcagttcgctaagcagtttaaacaacgccggattaaactgggcttcacacaggccgacgtcggcctggccctgggcacgctttacggcaacgttttttcccagactacaatttgcagattcgaagccctgcagctgtccttcaagaatatgtgcaagttgaagcctctgttgaataaatggttggaggaggcagatagttcctcagggtccccgacttctatcgataagatagccgcccagggacgcaaacgaaagaagcgtacttccattgaagtttccgtaaagggggccctcgagtcacatttcctcaaatgtcccaagcccagtgcccaggaaattactagtttagcggatagcctccagttggagaaggaagttgtgagggtgtggttttgtaaccgacgccagaaagagaagaggatgacacctcccggtggcaccctgcccggggccgaggacgtgtacggaggatcaagagatactccaccacatcatggggttcagaccccagtgcagtag

SEQ ID NO: 157779 - DNA, 1131 bp, Artificial Sequence
  derived and/or modified sequence
atggccaccgccgccagcaaccactacagcctgctgaccagcagcgccagcattgtgcacgcagagccccccgggggaatgcagcagggtgccggcggctatcgcgaagcacagagcctggtgcaaggggactacggcgctctgcagtccaacgggcatccattatcccacgcccatcaatggatcacagctttaagccacgggggggacggctcaccttggtctacctctccattggggcagccagacattaaaccgagcgtggttgttcagcagggcggtcggggggatgaactgcatgggccaggggcccttcagcagcagcaccagcagcaacagcaacaacagcaacaacagcagcagcagcaacagcagcaacagcagcaacaacgaccgccccacctggtgcaccacgctgccaatcaccatccaggtcccggtgcttggcgctccgcggcagcagctgcccacctgccgccttccatgggtgctagcaatggtggtttactctactcccaacccccaccaccccctcagggcccaccgggtcacccaggagctcaccatgaccctcactccgatgaggacactccaacctcagacgatttagagcagttcgcgaaacaattcaagcaacgccgcataaagctggggttcacccaggccgacgtgggactagcactgggaactctttatggaaacgtgttcagccagacgactatctgtcgtttcgaggcgttacagctgtcctttaaaaatatgtgcaagctcaaaccacttcttaataaatggcttgaagaagccgactctagctctggatcaccgacatcaatagacaagatcgccgcccagggccggaagcgtaagaaaagaaccagcattgaagtgagtgtcaagggggccctggagagccacttcttaaagtgtcctaagccaagcgcccaagaaatcacgagcctggcagactctttgcagctggagaaggaagtagttagggtctggttttgcaatcggcgccagaaggagaagagaatgacgccaccgggagggacccttccaggcgcagaagacgtgtacggagggagcagggacacacccccgcaccacggtgtgcagacccctgtgcaatag

SEQ ID NO: 157780 - DNA, 4081 bp, Artificial Sequence
  derived and/or modified sequence
agtaatagcaggagcagcaacagaaggcgtcggagcgggcgtcggagctgcccgctgtgggagagagaggagacagaaagagcgagcgaggagagggagcccgaggcgaaaaagtaactgtcaaatgcgcggctcctttaaccggagcgctcagtccggctccgagagtcatggcgaccgcagcgtctaaccactacagcctgctcacctccagcgcctccatcgtgcacgccgagccgcccggcggcatgcagcagggcgcggggggctaccgcgaagcgcagagcctggtgcagggcgactacggcgctctgcagagcaacggacacccgctcagccacgctcaccagtggatcaccgcgctgtcccacggcggcggcggcgggggcggtggcggcggcggggggggcgggggcggcggcgggggcggcggcgacggctccccgtggtccaccagccccctgggccagccggacatcaagccctcggtggtggtgcagcagggcggccgcggagacgagctgcacgggccaggcgccctgcagcagcagcatcagcagcagcaacagcaacagcagcagcaacagcagcaacagcagcagcagcagcagcaacagcggccgccgcatctggtgcaccacgccgctaaccaccacccgggacccggggcatggcggagcgcggcggctgcagcgcacctcccaccctccatgggagcgtccaacggcggcttgctctactcgcagcccagcttcacggtgaacggcatgctgggcgccggcgggcagccggccggtctgcaccaccacggcctgcgggacgcgcacgacgagccacaccatgccgaccaccacccgcacccgcactcgcacccacaccagcagccgccgcccccgccgcccccgcagggtccgcctggccacccaggcgcgcaccacgacccgcactcggacgaggacacgccgacctcggacgacctggagcagttcgccaagcagttcaagcagcggcggatcaaactgggatttacccaagcggacgtggggctggctctgggcaccctgtatggcaacgtgttctcgcagaccaccatctgcaggtttgaggccctgcagctgagcttcaagaacatgtgcaagctgaagcctttgttgaacaagtggttggaggaggcggactcgtcctcgggcagccccacgagcatagacaagatcgcagcgcaagggcgcaagcggaaaaagcggacctccatcgaggtgagcgtcaagggggctctggagagccatttcctcaaatgccccaagccctcggcccaggagatcacctccctcgcggacagcttacagctggagaaggaggtggtgagagtttggttttgtaacaggagacagaaagagaaaaggatgacccctcccggagggactctgccgggcgccgaggatgtgtacggggggagtagggacactccaccacaccacggggtgcagacgcccgtccagtgaactcgagctgggggaggggcagagcgcggggctccccctccccttcggtccttggccctttcccggccctcttgttccctctctaacttctgattgttcttttatttttaattattatttccccgtcccttaaaaagacaaaaaaaataaggcaaaaggaaagcaactaagacactggactatcctttaaaggtagcaggtgtaatgatgtgttttgacctttgcaggcgagtaaccaggcaatggagtggagtgtctcctggagagagtgaggagagtgtgtgatagctagaaagagagagagacagagagatggcaagcactgagataaatacctggcaaaactaaataaattaccaaaaaggaaaaaaaatccaccaaaccatgataaacacaaaatgcagcttcctgatgcttagagttggcacatgctgctgtgtttatttattgtggattcccatcaggaaagaggaaaaaatacacatgttctttcatataggcaaaatttaaccacataaatttgcactgcaagaaaattgaagtttacgtgaacaaattcatgagcatattttctctttctccccaccgttaatttgggagttgccgttttgggggattttgttttgctttgctttattcatcggagagagttgaagccagctcttggccactctccatttctaatgttcttgtgttgccccttcttcgtactgtttgtgaactttggttaccttcacattccccttacgagggtgtaacatctatttgttcctcttaccaaagcaaaaggattggcttcatacaaaatagacaattctctgatttcaggaaatgtgcatggtctacccgctttatcgaaggcaagaatccggtttggaatataaaaataagcattggttgttcttaccagccacaaagtaaacttcattttcaggcagtgtttctgggggaggttatggagggaagaaaaaagaaaaatcgatagtgagtgactgattgcttcattttatcaggcgggcccattgtgaaagagctcaggggaaatgtggaggttaaatatatttccagagttgtccagcagaaagaaagtggcactttgaagagaactagggaagtacatatcttcagatatccctatatagttctctaccttcagttttagtaacaattatgaagaattatttgtgctgacagcagcagttaaactttgtttctctaatagctttttttttacataaaaaaagacccaggaacttaatagtgtatgcataagactgtgttttttagcacacagatacccacagcatacactgacgatctccacgcagtagacaggttttgtcttcactagctcatttgtttatcaagtcatatttagggtcccacaccctcttttcctgtaatttattgcagaatacaccactttgacttggacagctttctgccccctctttcactaaggaaggcaaatgaagtgaaaaaaaaaaatgccattttcaatccttcctttctcccctttgttaatagttttaagtgaatttttgaccttatcttaatggaaaacggttaactccaaacacaaaagactctactggaaagtgtaggtgaaaaaacttgtaactgtattgaaaataaataccattaaactgtgatcagttaaaatttaaaagaaaaatcagcacaaaagggcgctaaaagggaaaacactttttattaatcttaaaagtttgggggtttttttccagttaggtattagataaatttttattttaaaaaatgaaagtctcactaccataaaattatggttcagcatcagattagcattgcactcagtagtctttaaggttttaggaaatatgctttatattgtcttttcaaacacctgtgattgtttcattttccatgtttttgcaagataaatggtgacttataatgggcatatttatttgcctgtatttcatttcccccaatgaatgtcacaaggagatgggcacggagctgcttcgggtgcatcacgctgctcgttcctgaggtatgggaactggcctttagtgaagctatccagagcagggcaaatagccactggtaaagggaggaaatgaatttccagatacttattaccaagtaggtaaggtcagaagctggagttcagagaatgtgtctacagcttctctgactcttataggtttactaagatgaaagttaccactgaaccttaccactatgtatatatgtttaatatctgtcttttgaaatgcagaaatagtttaaatgtttctttgtctatttttctttttttttaatgctacccagggaaatattttcatatcatttttaagtggcctgcctcaatgtatatttatttcttttgaaacaaaaaggttctggaaactgtttttctgtagctttaaatgaataggtgagcaaaatctatatgggatgtaatttttttgttcagtctcttaaaaaatactttgttttggtacatttggttgtgcttgtggggaaaataaaaacgcagagatccttatatatttatgttaaagtaatattttattatctacataaaacagaaatgc

SEQ ID NO: 157781 - DNA, 1131 bp, Artificial Sequence
  derived and/or modified sequence
atggcgaccgcagcgtctaaccactacagcctgctcacctccagcgcctccatcgtgcacgccgagccgcccggcggcatgcagcagggcgcggggggctaccgcgaagcgcagagcctggtgcagggcgactacggcgctctgcagagcaacggacacccgctcagccacgctcaccagtggatcaccgcgctgtcccacggcggcgacggctccccgtggtccaccagccccctgggccagccggacatcaagccctcggtggtggtgcagcagggcggccgcggagacgagctgcacgggccaggcgccctgcagcagcagcatcagcagcagcaacagcaacagcagcagcaacagcagcaacagcagcagcagcagcagcaacagcggccgccgcatctggtgcaccacgccgctaaccaccacccgggacccggggcatggcggagcgcggcggctgcagcgcacctcccaccctccatgggagcgtccaacggcggcttgctctactcgcagcccccgccgcccccgcagggtccgcctggccacccaggcgcgcaccacgacccgcactcggacgaggacacgccgacctcggacgacctggagcagttcgccaagcagttcaagcagcggcggatcaaactgggatttacccaagcggacgtggggctggctctgggcaccctgtatggcaacgtgttctcgcagaccaccatctgcaggtttgaggccctgcagctgagcttcaagaacatgtgcaagctgaagcctttgttgaacaagtggttggaggaggcggactcgtcctcgggcagccccacgagcatagacaagatcgcagcgcaagggcgcaagcggaaaaagcggacctccatcgaggtgagcgtcaagggggctctggagagccatttcctcaaatgccccaagccctcggcccaggagatcacctccctcgcggacagcttacagctggagaaggaggtggtgagagtttggttttgtaacaggagacagaaagagaaaaggatgacccctcccggagggactctgccgggcgccgaggatgtgtacggggggagtagggacactccaccacaccacggggtgcagacgcccgtccagtga

SEQ ID NO: 157782 - DNA, 1332 bp, Artificial Sequence
  derived and/or modified sequence
atggcgacggctgctagtaatcattactcactccttactagctccgcgtcaatcgtacatgcagaaccacccggaggaatgcagcagggagccggagggtacagggaagcccagagcctcgtacagggagactacggcgcattgcagtcaaacggccacccattatctcacgctcatcaatggattacggccctgtcacatggtggcggagggggtggcggaggcggaggcggtggaggcggagggggaggcggaggagggggtgacggcagtccttggtctaccagtccactgggtcagcccgacattaagccatcagtcgtggtgcagcaaggcggaagaggggatgagttgcacggccctggcgcactgcaacagcagcatcaacaacaacagcagcagcagcaacagcagcagcaacaacagcagcagcagcagcaacagcagcgaccgccacatctcgttcaccacgcagctaaccaccaccccggtcctggtgcctggagaagcgccgcagccgcagcgcaccttccgccttccatgggcgctagtaacggtggattgctctattcgcagccctcctttactgtgaatggcatgctgggcgcaggagggcagccggcaggcctacaccatcacgggctacgcgacgcccacgacgaaccccatcatgctgaccaccatcctcacccacattcacacccacatcaacaaccaccccctccccctccgcctcagggtcctcctggtcaccccggagcccaccatgacccgcactccgatgaggatacccccacctctgatgaccttgaacagttcgccaagcagttcaagcagagaagaataaagctgggtttcactcaagctgacgtggggttagcactcggaacactctatgggaatgttttctcccagacgacaatatgcaggttcgaggccttgcagttgagtttcaagaatatgtgcaaactcaaacccctgcttaacaaatggctcgaagaggctgattccagtagtggcagcccaacctcaattgacaagattgctgcacaagggcgtaagcgcaaaaagcgcactagcatcgaagtcagcgttaagggggcactggaaagtcatttcctcaaatgccctaaaccctctgctcaggagatcacctctctcgcagactcgctgcagctcgagaaggaagtcgtgcgagtttggttctgtaataggagacaaaaggagaaacgtatgacgcctcccggtggcactctccccggagccgaggatgtctatggagggtctcgggatactcctccacatcatggcgttcagacaccagtccagtag

SEQ ID NO: 157783 - DNA, 1131 bp, Artificial Sequence
  derived and/or modified sequence
atggcgacagcggcaagcaaccattacagcctgttgacatccagcgcatccatcgtgcacgccgaaccccctggcggtatgcaacaaggtgctggaggctatagggaggcccagtcgctcgtgcaaggtgactacggggcactgcagagcaatggccatcccctgtcacacgcccatcagtggatcaccgctctcagccacggtggagatgggtccccttggtctaccagccccctaggccagccagatataaagccttccgttgttgttcagcaaggtgggagaggcgacgagctccacggacccggagctctccaacagcaacatcagcaacaacagcagcagcagcaacaacaacagcagcagcagcagcaacagcaacagcaacagaggccaccacatttggttcaccacgccgcaaatcatcacccaggtcccggagcttggcgaagcgccgctgccgctgcacacttgcctccaagcatgggcgcatctaacggaggccttctttactctcagccacctccacctccacaaggaccacctggacaccccggagctcatcatgaccctcactcagatgaggacaccccaacatccgatgacctggagcagttcgcaaagcaattcaaacagcggcgaattaagctcggctttacacaggccgacgtaggtctggccctgggcactctgtatggaaatgtgttttctcagacaacgatttgcagatttgaggctctgcagctatcatttaaaaacatgtgtaaactcaagccactcttgaataagtggcttgaggaagcggactcatctagcggatcacctacctctatcgataaaatcgctgcccaaggcaggaaacgcaaaaagcggaccagcattgaagtctccgtgaaaggagccctggagtcacacttcctgaaatgccctaaacccagtgcccaggagatcacatctcttgccgactctttgcaacttgagaaggaggttgtcagggtgtggttctgcaacaggcgccagaaggagaaaagaatgactcctccagggggaactttgcctggcgcagaagacgtttacggaggttcccgggatacgcctcctcatcacggcgtgcagaccccagtgcagtag

SEQ ID NO: 157784 - DNA, 1332 bp, Artificial Sequence
  derived and/or modified sequence
atggccaccgccgccagcaaccactacagcctgctgaccagcagcgccagcatcgtgcacgccgagccccccggcggcatgcagcagggcgccggcggctacagagaggcccagagcctggtgcagggcgactacggcgccctgcagagcaacggccaccccctgagccacgcccaccagtggatcaccgccctgagccacggcggcggcggcggcggcggcggcggcggcggcggcggcggcggcggcggcggcggcggcggcgacggcagcccctggagcaccagccccctgggccagcccgacatcaagcccagcgtggtggtgcagcagggcggcagaggcgacgagctgcacggccccggcgccctgcagcagcagcaccagcagcagcagcagcagcagcagcagcagcagcagcagcagcagcagcagcagcagcagcagagacccccccacctggtgcaccacgccgccaaccaccaccccggccccggcgcctggagaagcgccgccgccgccgcccacctgccccccagcatgggcgccagcaacggcggcctgctgtacagccagcccagcttcaccgtgaacggcatgctgggcgccggcggccagcccgccggcctgcaccaccacggcctgagagacgcccacgacgagccccaccacgccgaccaccacccccacccccacagccacccccaccagcagccccccccccccccccccccccagggcccccccggccaccccggcgcccaccacgacccccacagcgacgaggacacccccaccagcgacgacctggagcagttcgccaagcagttcaagcagagaagaatcaagctgggcttcacccaggccgacgtgggcctggccctgggcaccctgtacggcaacgtgttcagccagaccaccatctgcagattcgaggccctgcagctgagcttcaagaacatgtgcaagctgaagcccctgctgaacaagtggctggaggaggccgacagcagcagcggcagccccaccagcatcgacaagatcgccgcccagggcagaaagagaaagaagagaaccagcatcgaggtgagcgtgaagggcgccctggagagccacttcctgaagtgccccaagcccagcgcccaggagatcaccagcctggccgacagcctgcagctggagaaggaggtggtgagagtgtggttctgcaacagaagacagaaggagaagagaatgaccccccccggcggcaccctgcccggcgccgaggacgtgtacggcggcagcagagacacccccccccaccacggcgtgcagacccccgtgcagtag

SEQ ID NO: 157785 - DNA, 1131 bp, Artificial Sequence
  derived and/or modified sequence
atggccaccgccgccagcaaccactacagcctgctgaccagcagcgccagcatcgtgcacgccgagccccccggcggcatgcagcagggcgccggcggctacagagaggcccagagcctggtgcagggcgactacggcgccctgcagagcaacggccaccccctgagccacgcccaccagtggatcaccgccctgagccacggcggcgacggcagcccctggagcaccagccccctgggccagcccgacatcaagcccagcgtggtggtgcagcagggcggcagaggcgacgagctgcacggccccggcgccctgcagcagcagcaccagcagcagcagcagcagcagcagcagcagcagcagcagcagcagcagcagcagcagcagcagagacccccccacctggtgcaccacgccgccaaccaccaccccggccccggcgcctggagaagcgccgccgccgccgcccacctgccccccagcatgggcgccagcaacggcggcctgctgtacagccagccccccccccccccccagggcccccccggccaccccggcgcccaccacgacccccacagcgacgaggacacccccaccagcgacgacctggagcagttcgccaagcagttcaagcagagaagaatcaagctgggcttcacccaggccgacgtgggcctggccctgggcaccctgtacggcaacgtgttcagccagaccaccatctgcagattcgaggccctgcagctgagcttcaagaacatgtgcaagctgaagcccctgctgaacaagtggctggaggaggccgacagcagcagcggcagccccaccagcatcgacaagatcgccgcccagggcagaaagagaaagaagagaaccagcatcgaggtgagcgtgaagggcgccctggagagccacttcctgaagtgccccaagcccagcgcccaggagatcaccagcctggccgacagcctgcagctggagaaggaggtggtgagagtgtggttctgcaacagaagacagaaggagaagagaatgaccccccccggcggcaccctgcccggcgccgaggacgtgtacggcggcagcagagacacccccccccaccacggcgtgcagacccccgtgcagtag

SEQ ID NO: 157786 - protein, 512 aa, Artificial Sequence
  derived and/or modified sequence
MSGRRFHLSTTDRVIKAVPFPPTQRLTFKEVFENGKPKVDVLKNHLVKEGRLEEEVALKIINDGAAILRQEKTMIEVDAPITVCGDIHGQFFDLMKLFEVGGSPSNTRYLFLGDYVDRGYFSIECVLYLWSLKINHPKTLFLLRGNHECRHLTDYFTFKQECRIKYSEQVYDACMETFDCLPLAALLNQQFLCVHGGMSPEITSLDDIRKLDRFTEPPAFGPVCDLLWSDPSEDYGNEKTLEHYTHNTVRGCSYFYSYPAVCEFLQNNNLLSIIRAHEAQDAGYRMYRKSQATGFPSLITIFSAPNYLDVYNNKAAVLKYENNVMNIRQFNCSPHPYWLPNFMDVFTWSLPFVGEKVTEMLVNVLNICSDDELISDDEAEGSTTVRKEIIRNKIRAIGKMARVFSILRQESESVLTLKGLTPTGTLPLGVLSGGKQTIETATVEAVEAREAIRGFSLQHKIRSFEEARGLDRINERMPPRKDSIHAGGPMKSVTSAHSHAAHRSDQGKKAHS

SEQ ID NO: 157787 - DNA, 1539 bp, Artificial Sequence
  derived and/or modified sequence
atgagcggcagaagattccacctgagcaccaccgacagagtgatcaaggccgtgcccttcccccccacccagagactgaccttcaaggaggtgttcgagaacggcaagcccaaggtggacgtgctgaagaaccacctggtgaaggagggcagactggaggaggaggtggccctgaagatcatcaacgacggcgccgccatcctgagacaggagaagaccatgatcgaggtggacgcccccatcaccgtgtgcggcgacatccacggccagttcttcgacctgatgaagctgttcgaggtgggcggcagccccagcaacaccagatacctgttcctgggcgactacgtggacagaggctacttcagcatcgagtgcgtgctgtacctgtggagcctgaagatcaaccaccccaagaccctgttcctgctgagaggcaaccacgagtgcagacacctgaccgactacttcaccttcaagcaggagtgcagaatcaagtacagcgagcaggtgtacgacgcctgcatggagaccttcgactgcctgcccctggccgccctgctgaaccagcagttcctgtgcgtgcacggcggcatgagccccgagatcaccagcctggacgacatcagaaagctggacagattcaccgagccccccgccttcggccccgtgtgcgacctgctgtggagcgaccccagcgaggactacggcaacgagaagaccctggagcactacacccacaacaccgtgagaggctgcagctacttctacagctaccccgccgtgtgcgagttcctgcagaacaacaacctgctgagcatcatcagagcccacgaggcccaggacgccggctacagaatgtacagaaagagccaggccaccggcttccccagcctgatcaccatcttcagcgcccccaactacctggacgtgtacaacaacaaggccgccgtgctgaagtacgagaacaacgtgatgaacatcagacagttcaactgcagcccccacccctactggctgcccaacttcatggacgtgttcacctggagcctgcccttcgtgggcgagaaggtgaccgagatgctggtgaacgtgctgaacatctgcagcgacgacgagctgatcagcgacgacgaggccgagggcagcaccaccgtgagaaaggagatcatcagaaacaagatcagagccatcggcaagatggccagagtgttcagcatcctgagacaggagagcgagagcgtgctgaccctgaagggcctgacccccaccggcaccctgcccctgggcgtgctgagcggcggcaagcagaccatcgagaccgccaccgtggaggccgtggaggccagagaggccatcagaggcttcagcctgcagcacaagatcagaagcttcgaggaggccagaggcctggacagaatcaacgagagaatgccccccagaaaggacagcatccacgccggcggccccatgaagagcgtgaccagcgcccacagccacgccgcccacagaagcgaccagggcaagaaggcccacagctag

SEQ ID NO: 157788 - DNA, 1539 bp, Artificial Sequence
  derived and/or modified sequence
atgtcaggtcgaagatttcacttatcaacaacagatcgcgtcatcaaggcggtgccctttcccccgacgcagcgactcacctttaaagaggtctttgaaaacgggaagcctaaagtggatgtgctgaagaaccacctggttaaggagggcagactggaggaagaggtagccctgaagattatcaacgacggagctgcaatcctccgtcaggagaaaaccatgatcgaggtggatgcgccaattacagtctgcggggatatccacgggcagttcttcgacctgatgaaactgttcgaagtgggcggctcccctagcaacacccgatatctttttctgggcgactatgtagaccgaggctacttcagtatcgagtgtgtactttatctgtggtctttaaagatcaaccaccccaagacgctttttcttctccggggtaatcacgagtgcagacatcttactgattactttacctttaaacaggagtgccgcataaaatactcggagcaagtgtatgacgcttgtatggagaccttcgactgcctcccactggcagcactccttaaccaacaattcctgtgtgtgcatggcggcatgtctccagagatcaccagcctcgacgatattaggaagttggatcggttcaccgagccccctgcttttggacctgtctgtgacctgctctggtcagaccctagcgaggactacggaaacgagaaaacactcgagcattacactcataatacagtgcgcggatgctcctatttctactcataccccgcggtgtgtgagttcctccagaataacaacttactcagcatcatcagggctcatgaggcccaggatgcgggataccgcatgtatcgaaaaagtcaggccaccggatttcccagcctcatcactatctttagcgcccctaattacctagacgtttacaacaataaggctgctgtgttgaaatacgaaaataatgtcatgaacatcagacaattcaattgtagcccgcacccttattggctcccaaacttcatggatgtgtttacctggtcccttccttttgtcggcgagaaagtgaccgaaatgttggttaacgtccttaacatctgctccgatgacgagttaatctcggacgatgaggccgagggatccacaacagtgcggaaagaaatcatccgaaataaaattcgggcaattggcaagatggcccgggtgtttagtatccttcgacaggagtccgagtcagtgttgaccctgaagggactgactccaaccggaactctccccttgggagtcctgagtggcgggaagcaaaccattgaaacagccacggtagaggcagtggaggcccgggaagcaattagaggctttagcttgcagcacaagatccggtccttcgaagaggcccgaggcctggaccgcataaacgagcgcatgccgccccgcaaagattcaatacatgcaggtggaccaatgaagtccgtcactagcgcacactcacacgctgctcataggtccgaccagggaaagaaggcccatagttag

SEQ ID NO: 157789 - DNA, 1539 bp, Artificial Sequence
  derived and/or modified sequence
atgagcggccgccgcttccacctgagcaccacagacagagtcatcaaggctgtgcccttcccccccacccagaggctgaccttcaaggaggtgtttgaaaatggcaagcccaaggtggatgtgctgaagaaccacctggtgaaggagggccgcctggaggaggaggtggccctgaagatcatcaatgatggagctgccatcctgcggcaggagaagaccatgattgaggtggatgcccccatcaccgtgtgtggggacatccacggccagttctttgacctgatgaagctgtttgaggtgggcggcagccccagcaacacccgctacctgttcctgggggactatgtggaccggggctacttcagcattgaatgtgtgctgtacctgtggagcctgaagatcaaccaccccaagaccctcttcctgctgcggggcaaccacgagtgccgccacctgacagactacttcaccttcaagcaggagtgccgcatcaagtacagcgagcaggtgtatgatgcctgcatggagacctttgactgcctgcccctggccgccctgctgaaccagcagttcctgtgtgtgcatggaggcatgagccctgagatcaccagcctggatgacatcaggaagctggaccgcttcacagagcccccagccttcggccctgtgtgtgacctgctgtggagcgaccccagtgaagattatggaaatgagaagaccctggagcactacacccacaacacagtgcggggctgcagctacttctacagctacccagctgtgtgtgagttcctgcagaacaacaacctgctgagcatcatccgggcccacgaggcccaggatgctggctacaggatgtacaggaagagccaggccaccggcttccccagcctcatcaccatcttcagcgcccccaactacctggatgtgtacaacaacaaggctgctgtgctgaagtatgaaaataatgtgatgaacatccggcagttcaactgcagcccccacccctactggctgcccaacttcatggatgtgttcacctggagcctgccctttgtgggggagaaggtgacagagatgctggtgaatgtgctgaacatctgcagtgatgatgagctgatcagtgatgatgaagctgagggcagcaccaccgtgaggaaggagatcatccggaacaagatccgggccatcggcaagatggcccgggtcttcagcatcctgcggcaggagagcgagagcgtgctgaccctgaagggcctgacccccaccggcaccctgcccctgggcgtgctgagcggcggcaagcagaccatcgagacagccaccgtggaggccgtggaggcccgggaggccatccggggcttcagcctgcagcacaagatccgcagctttgaggaggcccggggcctggaccgcatcaatgaaagaatgccacccaggaaggacagcatccacgccggcggccccatgaagtctgtgaccagcgcccacagccacgccgcccacagaagtgaccagggcaagaaggcccacagctag

SEQ ID NO: 157790 - DNA, 1539 bp, Artificial Sequence
  derived and/or modified sequence
atgagcggccggcggttccacctgagcaccaccgaccgggtgatcaaggccgttcccttccctcccacccaacgcttaacgttcaaggaggtgttcgagaacgggaagcccaaggtagacgtgctcaaaaaccatctggttaaggaggggaggctggaagaagaggtggcacttaagatcataaacgacggtgcggcaatactgcggcaggagaaaaccatgattgaagtggatgcccccattactgtgtgcggagatattcatggccaattttttgatttgatgaaactgtttgaggtgggtggatccccgtcaaacactcgctacttatttctcggcgattacgtagaccgaggctactttagcattgagtgcgtattgtacttgtggtctctcaagattaaccacccaaagaccctcttcttgctgcggggcaaccatgagtgtcgtcacctcacggattattttacattcaagcaggagtgccgaataaagtatagcgaacaggtatatgacgcttgtatggagacatttgattgtctgccactcgcagccctgctgaatcagcagttcttgtgtgtccatggcggaatgtctccagaaattacttcactcgacgacatacgcaagctagataggttcaccgagccaccagccttcgggcctgtttgcgatttactgtggagcgacccaagcgaagattatggtaatgaaaagacactggaacactatacccacaacactgtccggggttgtagttacttttactcctacccagctgtgtgcgaattcctgcagaacaacaacctgctgtccatcattagagctcacgaggcccaggacgcagggtatcggatgtataggaaatcccaggctacaggcttccccagcctgattactatattctccgccccgaactacttggacgtctataacaataaggcagcggtgctcaaatatgaaaacaacgtcatgaacatccggcaatttaactgtagtcctcacccatattggctcccaaattttatggatgtttttacctggagcttaccgttcgtgggagagaaagtgactgagatgctcgtgaacgtgttgaacatttgttctgatgatgagctcatctcagacgacgaagctgaggggtctaccaccgtgcggaaagagatcatccgaaataaaatcagggccattggaaaaatggctagggtgttctctatcctccgccaggaaagcgagtctgtgttaacactaaaaggactgacccctactggaacactccccctcggcgtcctcagcggcggtaagcagacgatcgaaactgccaccgttgaggcggtcgaagcgagggaggcgataagaggctttagtctgcaacacaagatcaggagtttcgaagaagcacgggggcttgaccggatcaatgaaagaatgccgcctagaaaggactctatccatgccggcggccctatgaagtctgtgacatccgcccattctcacgcggcacatagaagcgatcaggggaagaaggctcatagttag

SEQ ID NO: 157791 - DNA, 1539 bp, Artificial Sequence
  derived and/or modified sequence
atgtccgggcgtcgtttccacctgagcaccactgaccgggtgattaaagcagtgccgtttcctccaacacagagactgaccttcaaagaggtcttcgagaatgggaagcccaaagtagatgtcctgaaaaaccatctcgttaaggagggcaggctcgaggaagaggtcgccctgaagattatcaatgatggagcagcaatactgcgccaagagaagacaatgatcgaagttgatgcccctattactgtctgtggagatattcatggacagttcttcgacctaatgaagctttttgaggtcggtggttcccccagcaatacccgctacttatttcttggcgattacgtggacaggggttatttctcaattgaatgtgtgctgtacttatggtctctgaaaattaatcacccaaaaaccctgttcctgcttcgagggaaccacgaatgccgccacttgaccgattacttcacctttaaacaggagtgccgcattaagtactcagagcaggtgtacgacgcatgcatggagaccttcgattgtctacccctcgctgcactgctcaaccagcaatttctgtgcgttcacggtggaatgagcccagaaatcacatccctggacgacatcagaaagctggatcggtttactgaaccaccagccttcggccctgtgtgtgacctactgtggtccgacccgtctgaggattacgggaatgagaagacattggagcactacacacacaacaccgtacgcggatgttcttatttctactcttatcctgcggtttgcgaatttctgcagaataataacttgctgagcatcattcgtgcccacgaggcacaggatgccggatataggatgtatagaaagtcacaggccaccgggttccctagcctaatcacaattttcagcgcacctaattatctggacgtgtataataataaagcagcagtactcaaatacgagaataacgtcatgaacatacgccagttcaactgcagccctcacccttactggttacccaatttcatggatgttttcacttggagtctgccattcgtgggtgagaaagtcacggagatgctcgtgaacgtcttgaacatatgttcggatgatgagctgataagtgacgacgaggcggaagggagcactaccgttcgaaaagaaattatccggaataagatccgcgcaattggtaagatggcacgcgtgttcagcatcttgcggcaggagagtgagtcggtgttaacactcaaaggactcacgcctactggaaccctgcccctgggcgtcctgtcaggtggaaagcagaccatcgaaactgctaccgttgaagccgtcgaggctagagaagctataaggggattctctttacagcataaaatcaggtccttcgaggaagcgaggggtcttgatagaattaacgaacggatgccgccacggaaagatagcatccatgccggaggacccatgaagagcgtgacaagcgcgcactcccacgctgcccaccgatccgatcaggggaagaaagctcatagttag

SEQ ID NO: 157792 - DNA, 2189 bp, Artificial Sequence
  derived and/or modified sequence
cacgagggcccgggccgcgagcagccgcggccgtcccggtcgccacccttagcagcggtcgcggtcggtgccgaagcggtgttccccgccttagccgctggcgcctcccaagagagcggccggtgggccctcgtcctgtcagtggcgtcggaggccggcgctgcggtggccgcgcccttctggtgctcggacaccgctgaggagccggggccgggcacggctggctgacggctccgggcagctaaggctgcccgaggagaaggcggcggccgcggcgtaggcgcacgtccggcgggctcctggagcctggaggaggccgaggggaccatgtccgggaggcgcttccacctctccaccaccgaccgcgtcatcaaagctgtcccctttcctccaacccaacggcttactttcaaggaagtatttgagaatgggaaacctaaagttgatgttttaaaaaaccatttggtaaaggaaggacgactggaagaggaagtagccttaaagataatcaatgatggggctgccatcctgaggcaagagaagactatgatagaagtagatgctccaatcacagtatgtggtgatattcatggacaattctttgacctaatgaagttatttgaagttggaggatcacctagtaacacacgctacctctttctgggtgactatgtggacagaggctatttcagtatagagtgtgtgctgtatttatggagtttaaagattaatcatcccaaaacattgtttctgcttcggggaaatcatgaatgcaggcatcttacagactatttcaccttcaaacaggaatgtcgaatcaaatattcggaacaggtgtatgatgcctgtatggagacatttgactgtcttcctcttgctgccctcttaaaccagcagtttctctgtgtacatggaggaatgtcacctgaaattacttctttagatgacattaggaaattagacaggtttacggaacctcccgcctttggacctgtgtgtgacctgctttggtctgatccctcagaggattatggcaatgagaagaccttggagcactatacccacaacactgtccgagggtgctcttatttctacagttaccctgcagtttgtgaatttttgcagaacaataatttactatcaattatcagagcccatgaagcccaagatgctgggtatcgaatgtacaggaagagccaagccacaggctttccatcacttattacaattttctctgcccccaattacctagatgtctataacaataaagctgctgtgttgaaatatgaaaacaatgtcatgaatatcaggcagtttaactgttctccacacccctactggcttccaaactttatggatgttttcacatggtctttgccttttgttggggaaaaagtcacagagatgctggtaaatgtgctcaacatatgctctgatgacgaactgatttctgatgatgaagcagaaggaagcactacagttcgtaaggagatcatcaggaataagatcagagccattgggaagatggcacgggtcttttcaattcttcggcaagaaagtgagagtgtgctgactctcaagggcctgactcccacaggcacactccctctgggcgtcctctcaggaggcaagcagactatcgagacagccacagtagaagcggtagaggcccgggaagccatcagagggttctcgcttcagcacaagatccggagttttgaagaagcgcgaggtctggaccgaattaatgagcgaatgccaccccgaaaggatagcatacacgctggtgggccaatgaaatctgtaacctcagcacactcacatgctgcgcacaggagcgaccaagggaagaaagcccattcatgacttagagtcctgccgtggctcaggtggatctaaaactcaagaacaaattctatttatttattattggaaaatgaaaagcaactcaaaacaacttcaacgtggaggtgcatttataattcagtctgcatttattctgtaaaaaggtggctgttttataaattcttttaatttatgttcaatatatataaaaagtgcatctgttttgtttttcccttttttctccataattttaagaaatgaatctgattgttgtcaacacatttgtgaagtcttgtgctataaaggggaacttcccctaataaaagggccttggaaacctcaaa

SEQ ID NO: 157793 - protein, 433 aa, Artificial Sequence
  derived and/or modified sequence
MVWKVAVFLSVALGIGAVPIDDPEDGGKHWVVIVAGSNGWYNYRHQADACHAYQIIHRNGIPDEQIVVMMYDDIAYSEDNPTPGIVINRPNGTDVYQGVPKDYTGEDVTPQNFLAVLRGDAEAVKGIGSGKVLKSGPQDHVFIYFTDHGSTGILVFPNEDLHVKDLNETIHYMYKHKMYRKMVFYIEACESGSMMNHLPDNINVYATTAANPRESSYACYYDEKRSTYLGDWYSVNWMEDSDVEDLTKETLHKQYHLVKSHTNTSHVMQYGNKTISTMKVMQFQGMKRKASSPVPLPPVTHLDLTPSPDVPLTIMKRKLMNTNDLEESRQLTEEIQRHLDARHLIEKSVRKIVSLLAASEAEVEQLLSERAPLTGHSCYPEALLHFRTHCFNWHSPTYEYALRHLYVLVNLCEKPYPLHRIKLSMDHVCLGHY

SEQ ID NO: 157794 - protein, 398 aa, Artificial Sequence
  derived and/or modified sequence
MVWKVAVFLSVALGIGAVPIDDPEDGGKHWVVIVAGSNGWYNYRHQADACHAYQIIHRNGIPDEQIVVMMYDVTPQNFLAVLRGDAEAVKGIGSGKVLKSGPQDHVFIYFTDHGSTGILVFPNEDLHVKDLNETIHYMYKHKMYRKMVFYIEACESGSMMNHLPDNINVYATTAANPRESSYACYYDEKRSTYLGDWYSVNWMEDSDVEDLTKETLHKQYHLVKSHTNTSHVMQYGNKTISTMKVMQFQGMKRKASSPVPLPPVTHLDLTPSPDVPLTIMKRKLMNTNDLEESRQLTEEIQRHLDARHLIEKSVRKIVSLLAASEAEVEQLLSERAPLTGHSCYPEALLHFRTHCFNWHSPTYEYALRHLYVLVNLCEKPYPLHRIKLSMDHVCLGHY

SEQ ID NO: 157795 - protein, 410 aa, Artificial Sequence
  derived and/or modified sequence
MVWKVAVFLSVAGSNGWYNYRHQADACHAYQIIHRNGIPDEQIVVMMYDDIAYSEDNPTPGIVINRPNGTDVYQGVPKDYTGEDVTPQNFLAVLRGDAEAVKGIGSGKVLKSGPQDHVFIYFTDHGSTGILVFPNEDLHVKDLNETIHYMYKHKMYRKMVFYIEACESGSMMNHLPDNINVYATTAANPRESSYACYYDEKRSTYLGDWYSVNWMEDSDVEDLTKETLHKQYHLVKSHTNTSHVMQYGNKTISTMKVMQFQGMKRKASSPVPLPPVTHLDLTPSPDVPLTIMKRKLMNTNDLEESRQLTEEIQRHLDARHLIEKSVRKIVSLLAASEAEVEQLLSERAPLTGHSCYPEALLHFRTHCFNWHSPTYEYALRHLYVLVNLCEKPYPLHRIKLSMDHVCLGHY

SEQ ID NO: 157796 - DNA, 1302 bp, Artificial Sequence
  derived and/or modified sequence
atggtgtggaaagtagcagtgtttttgtcggtagccctaggcatcggagccgttcccattgatgaccccgaggacggcggaaaacactgggtggtgatagtagctggttctaacggctggtacaactaccgtcaccaggccgacgcctgccacgcttaccagatcatccatcggaacggcattccggacgaacaaatcgtcgtaatgatgtatgatgacatcgcttactcggaagataacccaacaccaggtatcgtaattaatcgccccaacgggacggatgtatatcaaggagtgccaaaggattacactggcgaggacgttacaccgcagaatttcctggccgtgttgagaggcgacgcggaggcagtcaagggcataggctctggaaaggtattgaagtctgggcctcaggatcatgtgtttatctacttcacagatcacgggagcaccggaattctggtcttccctaatgaggacctgcatgtcaaggatttgaatgaaacaattcactacatgtataagcacaagatgtacagaaagatggttttttacattgaagcctgcgaatctgggtctatgatgaaccacttgccagataacattaatgtgtacgcaacgaccgctgctaaccccagggaaagtagctatgcttgttattacgacgaaaagaggtccacctacctcggggattggtatagcgtgaactggatggaggactcagatgtagaggacctcaccaaagaaaccctgcacaaacagtaccacctggtcaagtctcacacaaatacttcacatgtcatgcagtatggcaacaagaccatctccactatgaaggtgatgcagtttcaggggatgaagcggaaggcgagcagccccgtacccctgccacctgtgacacacctggatttgaccccctcacccgacgttcccctcacgattatgaagcgtaaactgatgaatactaatgacctcgaagagtcaagacagttgacagaggaaattcagagacaccttgacgcccggcacctgatagagaagagtgttcgcaaaatcgtttccctgctcgcagcaagcgaagctgaggtggaacaactcctgagtgagagagcccctctgacgggccacagctgttaccctgaggcattgctccattttcggacacactgcttcaactggcacagtccaacgtacgagtacgctctgcgacatttgtatgtgttggtgaatctctgcgagaaaccatatcccctccacaggatcaagttgagtatggatcacgtctgtctcggtcactactag

SEQ ID NO: 157797 - DNA, 1302 bp, Artificial Sequence
  derived and/or modified sequence
atggtctggaaagtggccgtgttcctgtctgttgcgttggggattggcgctgtgcctattgacgatcctgaggacggcggcaagcactgggtggtgatcgtggctggctctaatggctggtacaattatcgtcaccaagcagacgcctgccacgcataccagataattcaccggaatggtattccagatgagcagatcgtggtcatgatgtacgatgatattgcatactcggaagataatcccactccgggaattgtaataaacagaccgaacggcaccgatgtgtaccagggggttccgaaggattacactggtgaagacgtgaccccgcagaatttcctggccgtgttgaggggagatgcagaggcagtgaaaggcattggctccgggaaagtgcttaagtcaggccctcaggatcatgtctttatctactttaccgaccatggcagcacgggaatcctggtgttcccaaacgaggacctccacgtgaaagatctgaatgagacaatccattatatgtacaaacataagatgtatcgcaaaatggtgttctacattgaagcttgtgagagcgggtccatgatgaaccatctgccagacaatatcaatgtgtacgcaaccacggccgcaaaccccagagagagttcttacgcgtgttattacgatgaaaagaggagtacgtatctcggcgattggtattccgtgaattggatggaagattccgacgtggaggacctgacaaaggagactctgcataaacagtaccacctcgtgaaaagccatactaacacctcccacgttatgcaatacgggaataaaacaatcagcaccatgaaggtaatgcaatttcaagggatgaagaggaaagcatctagtccagtgccactccctcccgttacccatctggatctgaccccaagtcccgatgtgccacttactatcatgaaaagaaagcttatgaacacaaacgaccttgaggagtcacgtcaacttacagaagaaatccagcgccatcttgatgctcgccacctcatcgaaaaatctgtacgaaaaatcgtttcactattagcagcatctgaggcggaggtggagcaactcctttcagagagggctccactaaccgggcacagctgctatcctgaagcactgctccactttcgcacacattgctttaattggcattcccccacgtatgagtacgccctccgtcatttgtatgtactggtgaacctatgtgagaaaccctatcccctgcaccgaatcaaattaagtatggatcacgtttgtctgggccactactag

SEQ ID NO: 157798 - DNA, 1197 bp, Artificial Sequence
  derived and/or modified sequence
atggtgtggaaggtcgcggtgttcctcagcgtcgcactcggtatcggcgccgtgccaatcgatgaccccgaagacggaggcaaacactgggtcgtgattgtggcaggtagcaacggctggtataactataggcatcaagcggacgcctgtcacgcctatcagatcatacatagaaatggtataccagatgaacaaatcgtggttatgatgtatgacgtcacaccccagaactttctggccgtgctcaggggcgatgctgaggcggtgaaaggcataggttctggcaaagtactgaaatccggaccccaagatcacgtgttcatttactttaccgaccacgggtccaccggcatcctggtcttccctaatgaagatctccatgtgaaggatctgaatgaaacaattcactatatgtataaacacaagatgtacaggaagatggttttttacattgaggcctgtgagagtggatctatgatgaaccatctccccgacaatattaatgtgtatgcgacaacggccgctaacccgcgggaatccagctacgcctgttattacgacgagaagcggtctacctatttgggggactggtactctgtgaattggatggaggacagcgacgtggaggacctgactaaagaaacgctgcataaacagtaccatttagtgaagagccataccaacaccagccatgtcatgcagtatggcaataagacaatctcaacaatgaaggtgatgcagttccaggggatgaaacgtaaagcttcctcacccgttccacttcctcctgtgacgcatctcgatttgacaccatcaccagatgtgcctctgacaatcatgaagaggaagctgatgaacaccaacgatctggaggaaagtagacagctgaccgaggagattcaacgacatcttgacgcccgccatctcatcgaaaaaagcgtgaggaagatagtttccctcttggcagccagcgaggcagaggtggagcaactcctgtccgaaagggcgcccctgacaggtcacagctgctatcccgaagccctgctgcactttagaactcactgttttaattggcactcccctacctatgagtacgcgctacgccatctttatgtccttgtgaacctgtgtgaaaaaccataccctctacacaggatcaagctaagcatggaccacgtctgtttgggacattactag

SEQ ID NO: 157799 - DNA, 1233 bp, Artificial Sequence
  derived and/or modified sequence
atggtctggaaggttgctgtcttcctcagcgtcgctggcagcaacggctggtataattacagacaccaggccgacgcctgccatgcctaccagatcatccaccggaatggcatccccgatgaacaaatcgtggtcatgatgtatgacgatatcgcatatagtgaggacaatcctacccccggtatagtcattaatagacctaatggcacagacgtttaccaaggtgtcccaaaggattacactggcgaggacgtgacgccacaaaattttcttgcggtgttgaggggggacgccgaggccgtcaagggtatcggatccggaaaagttctgaagtctgggcctcaggatcatgtcttcatttattttaccgatcatggcagtactggaatcctggtgttcccaaatgaagacctgcacgttaaggatcttaacgaaacaattcattacatgtacaagcataagatgtataggaaaatggtcttctatatcgaggcatgcgagtctggatccatgatgaatcatctgcctgataatatcaacgtttatgccactaccgcggcaaacccccgtgagagcagctacgcctgctactatgatgagaaacggtccacttatttaggtgactggtacagcgtaaactggatggaggacagcgacgtcgaggatttaaccaaggagacactgcacaaacagtatcatcttgtgaagtcccacacaaatacctctcatgtgatgcagtatgggaacaagaccatcagtacaatgaaagtcatgcagttccagggcatgaaaagaaaagcgagctctcccgtacccttacctccggtcacccaccttgatttaaccccgtctcctgacgtgcctctgactatcatgaagaggaagctcatgaataccaatgacctcgaggaaagccgtcagctgaccgaggagattcagcgacacctggacgcacgtcatctgatcgagaagtccgtcaggaagattgtctcgcttctcgcagcctcagaggcagaggtggagcaactactgtccgagcgcgcacctttgacagggcacagttgttacccagaagccctgctgcattttcggacacattgtttcaactggcactcaccgacctatgagtatgccttacgtcacttatacgttttggtcaatttatgtgagaagccttacccgcttcacaggattaagttgtcaatggatcatgtttgtctgggccattactag

SEQ ID NO: 157800 - DNA, 60 bp, Artificial Sequence
  derived and/or modified sequence
atggtgtggaaggtggccgtctttctaagtgtggcactcggtatcggggctgtgccttag

SEQ ID NO: 157801 - DNA, 1302 bp, Artificial Sequence
  derived and/or modified sequence
atggtgtggaaggtggccgtgttcctgtctgtggccctgggcattggagctgtgcccattgatgatcctgaagatggcggcaagcactgggtggtgattgtggccggcagcaatggctggtacaactaccgccaccaggctgatgcctgccacgcctaccagatcatccacagaaatggcatcccagatgagcagatcgtggtgatgatgtatgatgacatcgcctacagcgaggacaaccccaccccaggcatcgtcatcaaccggcccaatggaacagatgtgtaccagggcgtgcccaaggactacaccggggaggatgtgaccccccagaacttcctggccgtgctgcggggagatgctgaggccgtgaagggcatcggcagcggcaaggtgctgaagagcggcccccaggaccacgtgttcatctacttcacagaccacggcagcacaggcatcctggtgttccccaatgaagacctgcacgtgaaggacctgaatgagaccatccactacatgtacaagcacaagatgtacaggaagatggtgttctacatcgaggcctgtgagagcggctccatgatgaaccacctgcctgacaacatcaacgtgtatgccaccacagctgccaacccccgggagagcagctatgcctgctactatgatgagaagaggagcacctacctgggggactggtacagcgtgaactggatggaggacagtgatgtggaggacctgaccaaggagaccctgcacaagcagtaccacctggtgaagagccacaccaacaccagccacgtgatgcagtatggcaacaagaccatcagcaccatgaaggtgatgcagttccagggcatgaagaggaaggccagcagccctgtgcccctgccccctgtgacccacctggacctgacccccagcccagatgtgcccctgaccatcatgaagaggaagctgatgaacaccaatgacctggaggagagccggcagctgacagaggagatccagaggcacctggatgcccggcacctgattgagaagtctgtgaggaagatcgtgtccctgctggccgccagcgaggccgaggtggagcagctgctgtctgagcgggcccccctgaccggccacagctgctacccagaggccctgctgcacttccgcacccactgcttcaactggcacagccccacctatgaatatgccctgcggcacctgtatgtgctggtgaacctgtgtgagaagccctaccccctgcaccgcatcaagctgtccatggaccacgtgtgcctgggccactactag

SEQ ID NO: 157802 - DNA, 1197 bp, Artificial Sequence
  derived and/or modified sequence
atggtgtggaaggtggccgtgttcctgtctgtggccctgggcattggagctgtgcccattgatgatcctgaagatggcggcaagcactgggtggtgattgtggccggcagcaatggctggtacaactaccgccaccaggctgatgcctgccacgcctaccagatcatccacagaaatggcatcccagatgagcagatcgtggtgatgatgtatgatgtgaccccccagaacttcctggccgtgctgcggggagatgctgaggccgtgaagggcatcggcagcggcaaggtgctgaagagcggcccccaggaccacgtgttcatctacttcacagaccacggcagcacaggcatcctggtgttccccaatgaagacctgcacgtgaaggacctgaatgagaccatccactacatgtacaagcacaagatgtacaggaagatggtgttctacatcgaggcctgtgagagcggctccatgatgaaccacctgcctgacaacatcaacgtgtatgccaccacagctgccaacccccgggagagcagctatgcctgctactatgatgagaagaggagcacctacctgggggactggtacagcgtgaactggatggaggacagtgatgtggaggacctgaccaaggagaccctgcacaagcagtaccacctggtgaagagccacaccaacaccagccacgtgatgcagtatggcaacaagaccatcagcaccatgaaggtgatgcagttccagggcatgaagaggaaggccagcagccctgtgcccctgccccctgtgacccacctggacctgacccccagcccagatgtgcccctgaccatcatgaagaggaagctgatgaacaccaatgacctggaggagagccggcagctgacagaggagatccagaggcacctggatgcccggcacctgattgagaagtctgtgaggaagatcgtgtccctgctggccgccagcgaggccgaggtggagcagctgctgtctgagcgggcccccctgaccggccacagctgctacccagaggccctgctgcacttccgcacccactgcttcaactggcacagccccacctatgaatatgccctgcggcacctgtatgtgctggtgaacctgtgtgagaagccctaccccctgcaccgcatcaagctgtccatggaccacgtgtgcctgggccactactag

SEQ ID NO: 157803 - DNA, 1233 bp, Artificial Sequence
  derived and/or modified sequence
atggtgtggaaggtggccgtgttcctgtctgtggccggcagcaatggctggtacaactaccgccaccaggctgatgcctgccacgcctaccagatcatccacagaaatggcatcccagatgagcagatcgtggtgatgatgtatgatgacatcgcctacagcgaggacaaccccaccccaggcatcgtcatcaaccggcccaacggcacagatgtgtaccagggcgtgcccaaggactacacaggagaagatgtgaccccccagaacttcctggccgtgctgcggggagatgctgaggccgtgaagggcatcggcagcggcaaggtgctgaagagcggcccccaggaccacgtgttcatctacttcacagaccacggcagcacaggcatcctggtgttccccaatgaagacctgcacgtgaaggacctgaatgagaccatccactacatgtacaagcacaagatgtacaggaagatggtgttctacatcgaggcctgtgagagcggctccatgatgaaccacctgcctgacaacatcaacgtgtatgccaccacagctgccaacccccgggagagcagctatgcctgctactatgatgagaagaggagcacctacctgggggactggtacagcgtgaactggatggaggacagtgatgtggaggacctgaccaaggagaccctgcacaagcagtaccacctggtgaagagccacaccaacaccagccacgtgatgcagtatggcaacaagaccatcagcaccatgaaggtgatgcagttccagggcatgaagaggaaggccagcagccctgtgcccctgccccctgtgacccacctggacctgacccccagcccagatgtgcccctgaccatcatgaagaggaagctgatgaacaccaatgacctggaggagagccggcagctgacagaggagatccagaggcacctggatgcccggcacctgattgagaagtctgtgaggaagatcgtgtccctgctggccgccagcgaggccgaggtggagcagctgctgtctgagcgggcccccctgaccggccacagctgctacccagaggccctgctgcacttccgcacccactgcttcaactggcacagccccacctatgaatatgccctgcggcacctgtatgtgctggtgaacctgtgtgagaagccctaccccctgcaccgcatcaagctgtccatggaccacgtgtgcctgggccactactag

SEQ ID NO: 157804 - DNA, 60 bp, Artificial Sequence
  derived and/or modified sequence
atggtgtggaaggtggccgtgttcctgtctgtggccctgggcattggagctgtgccctag

SEQ ID NO: 157805 - DNA, 2055 bp, Artificial Sequence
  derived and/or modified sequence
agatgccacgccccatagctccaccagtcaccgcggcacagtggcccttaagcgaggagcggcggcgcccgcagcaatcacagcagtgccgacgtcgtgggtgtttggtgtgaggctgcgagccgccgcgagttctcacggtcccgccggcgccaccaccgcggtcactcaccgccgccgccgccaccactgccaccacggtcgcctgccacaggtgtctgcaattgaactccaaggtgcagaatggtttggaaagtagctgtattcctcagtgtggccctgggcattggtgccgttcctatagatgatcctgaagatggaggcaagcactgggtggtgatcgtggcaggttcaaatggctggtataattataggcaccaggcagacgcgtgccatgcctaccagatcattcaccgcaatgggattcctgacgaacagatcgttgtgatgatgtacgatgacattgcttactctgaagacaatcccactccaggaattgtgatcaacaggcccaatggcacagatgtctatcagggagtcccgaaggactacactggagaggatgttaccccacaaaatttccttgctgtgttgagaggcgatgcagaagcagtgaagggcataggatccggcaaagtcctgaagagtggcccccaggatcacgtgttcatttacttcactgaccatggatctactggaatactggtttttcccaatgaagatcttcatgtaaaggacctgaatgagaccatccattacatgtacaaacacaaaatgtaccgaaagatggtgttctacattgaagcctgtgagtctgggtccatgatgaaccacctgccggataacatcaatgtttatgcaactactgctgccaaccccagagagtcgtcctacgcctgttactatgatgagaagaggtccacgtacctgggggactggtacagcgtcaactggatggaagattcggacgtggaagatctgactaaagagaccctgcacaagcagtaccacctggtaaaatcgcacaccaacaccagccacgtcatgcagtatggaaacaaaacaatctccaccatgaaagtgatgcagtttcagggtatgaaacgcaaagccagttctcccgtccccctacctccagtcacacaccttgacctcacccccagccctgatgtgcctctcaccatcatgaaaaggaaactgatgaacaccaatgatctggaggagtccaggcagctcacggaggagatccagcggcatctggatgccaggcacctcattgagaagtcagtgcgtaagatcgtctccttgctggcagcgtccgaggctgaggtggagcagctcctgtccgagagagccccgctcacggggcacagctgctacccagaggccctgctgcacttccggacccactgcttcaactggcactcccccacgtacgagtatgcgttgagacatttgtacgtgctggtcaacctttgtgagaagccgtatccgcttcacaggataaaattgtccatggaccacgtgtgccttggtcactactgaagagctgcctcctggaagcttttccaagtgtgagcgccccaccgactgtgtgctgatcagagactggagaggtggagtgagaagtctccgctgctcgggccctcctggggagcccccgctccagggctcgctccaggaccttcttcacaagatgacttgctcgctgttacctgcttccccagtcttttctgaaaaactacaaattagggtgggaaaagctctgtattgagaagggtcatatttgctttctaggaggtttgttgttttgcctgttagttttgaggagcaggaagctcatgggggcttctgtagcccctctcaaaaggagtctttattctgagaatttgaagctgaaacctctttaaatcttcagaatgattttattgaagagggccgcaagccccaaatggaaaactgtttttagaaaatatgatgatttttgattgcttttgtatttaattctgcaggtgttcaagtcttaaaaaataaagatttataacagaacccaaa

SEQ ID NO: 157806 - DNA, 2115 bp, Artificial Sequence
  derived and/or modified sequence
ccagtcaccgcggcacagtggcccttaagcgaggagcggcggcgcccgcagcaatcacagcagtgccgacgtcgtgggtgtttggtgtgaggctgcgagccgccgcgagttctcacggtcccgccggcgccaccaccgcggtcactcaccgccgccgccgccaccactgccaccacggtcgcctgccacagggtcttactctgttgcccaggctggagtgcagtggcacaatcttggctcactgcaacctctgcctcccgggttcaagcaattctcctgcctcagcctcccgagtagctgggattacaggtgtctgcaattgaactccaaggtgcagaatggtttggaaagtagctgtattcctcagtgtggccctgggcattggtgccgttcctatagatgatcctgaagatggaggcaagcactgggtggtgatcgtggcaggttcaaatggctggtataattataggcaccaggcagacgcgtgccatgcctaccagatcattcaccgcaatgggattcctgacgaacagatcgttgtgatgatgtacgatgacattgcttactctgaagacaatcccactccaggaattgtgatcaacaggcccaatggcacagatgtctatcagggagtcccgaaggactacactggagaggatgttaccccacaaaatttccttgctgtgttgagaggcgatgcagaagcagtgaagggcataggatccggcaaagtcctgaagagtggcccccaggatcacgtgttcatttacttcactgaccatggatctactggaatactggtttttcccaatgaagatcttcatgtaaaggacctgaatgagaccatccattacatgtacaaacacaaaatgtaccgaaagatggtgttctacattgaagcctgtgagtctgggtccatgatgaaccacctgccggataacatcaatgtttatgcaactactgctgccaaccccagagagtcgtcctacgcctgttactatgatgagaagaggtccacgtacctgggggactggtacagcgtcaactggatggaagattcggacgtggaagatctgactaaagagaccctgcacaagcagtaccacctggtaaaatcgcacaccaacaccagccacgtcatgcagtatggaaacaaaacaatctccaccatgaaagtgatgcagtttcagggtatgaaacgcaaagccagttctcccgtccccctacctccagtcacacaccttgacctcacccccagccctgatgtgcctctcaccatcatgaaaaggaaactgatgaacaccaatgatctggaggagtccaggcagctcacggaggagatccagcggcatctggatgccaggcacctcattgagaagtcagtgcgtaagatcgtctccttgctggcagcgtccgaggctgaggtggagcagctcctgtccgagagagccccgctcacggggcacagctgctacccagaggccctgctgcacttccggacccactgcttcaactggcactcccccacgtacgagtatgcgttgagacatttgtacgtgctggtcaacctttgtgagaagccgtatccgcttcacaggataaaattgtccatggaccacgtgtgccttggtcactactgaagagctgcctcctggaagcttttccaagtgtgagcgccccaccgactgtgtgctgatcagagactggagaggtggagtgagaagtctccgctgctcgggccctcctggggagcccccgctccagggctcgctccaggaccttcttcacaagatgacttgctcgctgttacctgcttccccagtcttttctgaaaaactacaaattagggtgggaaaagctctgtattgagaagggtcatatttgctttctaggaggtttgttgttttgcctgttagttttgaggagcaggaagctcatgggggcttctgtagcccctctcaaaaggagtctttattctgagaatttgaagctgaaacctctttaaatcttcagaatgattttattgaagagggccgcaagccccaaatggaaaactgtttttagaaaatatgatgatttttgattgcttttgtatttaattctgcaggtgttcaa

SEQ ID NO: 157807 - DNA, 1464 bp, Artificial Sequence
  derived and/or modified sequence
aatcacagcagtgccgacgtcgtgggtgtttggtgtgaggctgcgagccgccgcgagttctcacggtcccgccggcgccaccaccgcggtcactcaccgccgccgccgccaccactgccaccacggtcgcctgccacaggtgtctgcaattgaactccaaggtgcagaatggtttggaaagtagctgtattcctcagtgtggccctgggcattggtgccgttcctatagatgatcctgaagatggaggcaagcactgggtggtgatcgtggcaggttcaaatggctggtataattataggcaccaggcagacgcgtgccatgcctaccagatcattcaccgcaatgggattcctgacgaacagatcgttgtgatgatgtacgatgttaccccacaaaatttccttgctgtgttgagaggcgatgcagaagcagtgaagggcataggatccggcaaagtcctgaagagtggcccccaggatcacgtgttcatttacttcactgaccatggatctactggaatactggtttttcccaatgaagatcttcatgtaaaggacctgaatgagaccatccattacatgtacaaacacaaaatgtaccgaaagatggtgttctacattgaagcctgtgagtctgggtccatgatgaaccacctgccggataacatcaatgtttatgcaactactgctgccaaccccagagagtcgtcctacgcctgttactatgatgagaagaggtccacgtacctgggggactggtacagcgtcaactggatggaagattcggacgtggaagatctgactaaagagaccctgcacaagcagtaccacctggtaaaatcgcacaccaacaccagccacgtcatgcagtatggaaacaaaacaatctccaccatgaaagtgatgcagtttcagggtatgaaacgcaaagccagttctcccgtccccctacctccagtcacacaccttgacctcacccccagccctgatgtgcctctcaccatcatgaaaaggaaactgatgaacaccaatgatctggaggagtccaggcagctcacggaggagatccagcggcatctggatgccaggcacctcattgagaagtcagtgcgtaagatcgtctccttgctggcagcgtccgaggctgaggtggagcagctcctgtccgagagagccccgctcacggggcacagctgctacccagaggccctgctgcacttccggacccactgcttcaactggcactcccccacgtacgagtatgcgttgagacatttgtacgtgctggtcaacctttgtgagaagccgtatccgcttcacaggataaaattgtccatggaccacgtgtgccttggtcactactgaagagctgcctcctggaagcttttccaagtgtgagcgccccaccgactgtgtgctgatcagagactggagaggtggagtgagaagtctccgctgctcggg

SEQ ID NO: 157808 - DNA, 1592 bp, Artificial Sequence
  derived and/or modified sequence
aatcacagcagtgccgacgtcgtgggtgtttggtgtgaggctgcgagccgccgcgagttctcacggtcccgccggcgccaccaccgcggtcactcaccgccgccgccgccaccactgccaccacggtcgcctgccacaggtgtctgcaattgaactccaaggtgcagaatggtttggaaagtagctgtattcctcagtgtggcaggttcaaatggctggtataattataggcaccaggcagacgcgtgccatgcctaccagatcattcaccgcaatgggattcctgacgaacagatcgttgtgatgatgtacgatgacattgcttactctgaagacaatcccactccaggaattgtgatcaacaggcccaatggcacagatgtctatcagggagtcccgaaggactacactggagaggatgttaccccacaaaatttccttgctgtgttgagaggcgatgcagaagcagtgaagggcataggatccggcaaagtcctgaagagtggcccccaggatcacgtgttcatttacttcactgaccatggatctactggaatactggtttttcccaatgaagatcttcatgtaaaggacctgaatgagaccatccattacatgtacaaacacaaaatgtaccgaaagatggtgttctacattgaagcctgtgagtctgggtccatgatgaaccacctgccggataacatcaatgtttatgcaactactgctgccaaccccagagagtcgtcctacgcctgttactatgatgagaagaggtccacgtacctgggggactggtacagcgtcaactggatggaagattcggacgtggaagatctgactaaagagaccctgcacaagcagtaccacctggtaaaatcgcacaccaacaccagccacgtcatgcagtatggaaacaaaacaatctccaccatgaaagtgatgcagtttcagggtatgaaacgcaaagccagttctcccgtccccctacctccagtcacacaccttgacctcacccccagccctgatgtgcctctcaccatcatgaaaaggaaactgatgaacaccaatgatctggaggagtccaggcagctcacggaggagatccagcggcatctggatgccaggcacctcattgagaagtcagtgcgtaagatcgtctccttgctggcagcgtccgaggctgaggtggagcagctcctgtccgagagagccccgctcacggggcacagctgctacccagaggccctgctgcacttccggacccactgcttcaactggcactcccccacgtacgagtatgcgttgagacatttgtacgtgctggtcaacctttgtgagaagccgtatccgcttcacaggataaaattgtccatggaccacgtgtgccttggtcactactgaagagctgcctcctggaagcttttccaagtgtgagcgccccaccgactgtgtgctgatcagagactggagaggtggagtgagaagtctccgctgctcgggccctcctggggagcccccgctccagggctcgctccaggaccttcttcacaagatgacttgctcgctgttacctgcttccccagtcttttctg

SEQ ID NO: 157809 - DNA, 1302 bp, Artificial Sequence
  derived and/or modified sequence
atggtgtggaaggtggccgtgttcctgagcgtggccctgggcatcggggctgtaccaatcgatgaccctgaggacgggggtaagcactgggtggtgatcgtcgcgggcagcaatggatggtacaattatcgccaccaggcggatgcatgccatgcctaccagatcatacacagaaacggcatccctgacgaacagattgtggtcatgatgtacgatgacattgcatattcggaggataacccgacccctggcatagttataaaccgaccaaacggtacggacgtttatcagggggtacctaaggactacactggggaggatgttactcctcagaactttctggctgtgctcaggggggacgcagaggccgtcaagggtattggttccggaaaggtgctgaagtcaggcccacaggatcatgtatttatttactttaccgaccatggctctaccgggatcctcgtctttcccaatgaagacctgcatgtgaaggacctgaatgagacaatacactatatgtacaagcataaaatgtataggaagatggttttctacatcgaggcctgtgagagtgggtctatgatgaaccacttacccgataatatcaatgtttacgcaaccaccgcagccaaccctcgagaatcaagttacgcctgctattatgacgagaagcgttctacatacctgggggattggtattctgtgaactggatggaagactccgatgtagaggacctaaccaaggagactctgcacaaacagtaccacctggttaagtcgcacaccaacacatcccatgtgatgcagtacggcaacaaaacaataagcaccatgaaggtcatgcagttccagggaatgaaacgcaaggcttcctctccagtgcccctacctcctgtcacacacctggacctgacaccttcacctgatgttcccttaaccattatgaaaagaaaactgatgaacactaacgatctcgaggaatccaggcagctgacagaggagatacagcgccatctcgacgccaggcacctgattgagaagtcagtccggaagattgtgagccttttggctgcgtcggaggccgaggtggagcagttgctgagcgaacgcgctcccctcaccggccactcctgttaccctgaggcactgttacattttagaacacactgctttaactggcatagtcccacctatgagtacgccttgcgtcacctttatgttcttgtgaacttatgtgagaagccctacccgttacatcgcattaagctttctatggatcatgtgtgtctaggtcattattag

SEQ ID NO: 157810 - DNA, 1302 bp, Artificial Sequence
  derived and/or modified sequence
atggtgtggaaggtggccgtgttcctgagcgtggccctgggcatcggggctgttcccatcgatgatcctgaggacggtggaaagcactgggtcgtcattgttgccggctccaacggctggtacaactacagacatcaggctgacgcctgccatgcctaccagattatccaccggaacgggattccagacgaacagattgttgtgatgatgtacgacgacattgcatactcggaagacaatcctacccccggtattgtgatcaatcgacctaatggtactgatgtttatcagggcgtccccaaggattataccggagaagacgtgacgccacagaacttcttggctgtgctgcgtggagatgctgaagctgtcaaaggcataggttccggcaaggtgctgaaatctggaccacaagatcatgtctttatttacttcactgatcacggatctaccggaattctggtgttcccaaacgaagacctgcatgttaaggatctgaatgaaactatccactacatgtacaagcacaaaatgtatcgaaagatggtgttttacatcgaggcttgtgaatctgggagcatgatgaaccacctgccggacaatataaacgtttatgccactactgccgcaaaccctagggagtctagttatgcctgctattatgatgagaagaggtccacctatttgggagactggtactctgtgaactggatggaagattctgacgtagaggacttaacgaaggaaacactgcacaagcaataccacttagtaaaatctcataccaacacatcccacgtcatgcagtatggtaacaaaaccatcagtactatgaaggtgatgcagttccagggaatgaaacgcaaagcctcatctcccgtacctcttccccctgtgactcacctggaccttacgcctagtccagatgtgcccctgacaatcatgaaaagaaaactgatgaatacaaacgatcttgaggagagccgccagctgaccgaggagatccaacgtcacttggatgcgaggcacctgatagagaagtccgtccgcaaaatcgtctcactgctcgcagcaagtgaagccgaggtggaacagctcttatcagagagggcccctttgacaggtcattcatgttacccagaggctctgttgcacttcaggacacactgcttcaattggcactcacctacatatgaatatgccctcagacatctgtatgtgcttgtgaatttgtgtgagaagccataccctctgcaccgcataaagctctctatggatcatgtctgcctgggccactattag

SEQ ID NO: 157811 - DNA, 1197 bp, Artificial Sequence
  derived and/or modified sequence
atggtgtggaaggtggccgtgttcctgagcgtggccctgggcatcggcgcagtccccatcgacgacccggaagacgggggcaagcactgggtggtaatcgtggctgggtctaatggttggtacaactacaggcaccaggcggacgcttgtcacgcgtatcagataattcaccgaaatgggatcccagatgagcaaatcgtcgtcatgatgtatgacgttacgcctcagaatttcctcgcagtcctgcgaggtgatgccgaggcggtgaaagggattgggtcaggcaaagtgctgaagagtggtccacaggaccatgtctttatttactttacagatcacgggagcaccggcatcctcgtgttccccaatgaggacctacacgtcaaggatttaaacgagaccatccactatatgtataaacacaaaatgtatcgcaaaatggtgttttacatagaagcgtgcgagtccggctcgatgatgaatcacctgccagacaacatcaacgtgtacgctacaacagctgcgaatccccgggaaagttcgtatgcctgctactatgacgaaaagagatcaacctacctcggcgattggtatagcgttaactggatggaagattcagatgtggaggacctgacaaaagaaaccctgcataaacaataccatctcgtgaagagccacactaacacaagccacgtcatgcagtacggcaacaaaactatctcgacaatgaaggtaatgcagttccagggcatgaagcgcaaagcctcatcaccagtgcccctgcccccagtgacccatctggacctcacaccttctcccgacgtgccgcttacaattatgaagcggaaacttatgaatactaatgatctcgaagagtcgaggcagttgaccgaggagatccagaggcacctcgacgctcggcatttaatagaaaaaagtgtaagaaaaatcgtttcccttctcgccgcatcggaggccgaggtggaacagctgttgtccgaaagggcccctttaactgggcatagttgctacccagaggctctgctgcactttcggacccactgcttcaattggcactcccccacctacgaatacgccctaagacatttgtacgtgctggtcaacttgtgcgaaaagccctacccactgcaccggatcaaactctcgatggaccacgtgtgcttgggccattactag

SEQ ID NO: 157812 - DNA, 1233 bp, Artificial Sequence
  derived and/or modified sequence
atggtgtggaaggtggccgtgttcctgagcgtggccggcagcaacggctggtataattatagacatcaggctgacgcctgtcacgcatatcagatcattcatcgaaacggtattcccgatgaacaaatagtcgtgatgatgtacgatgatatcgcatactccgaagacaatcccacaccgggcattgtcatcaataggccaaatgggactgacgtatatcagggagtgcccaaggactatacaggcgaggatgtcacaccacagaatttcctggccgtactgaggggcgacgctgaggccgtcaagggaataggatctgggaaggtgttgaaatcaggccctcaggaccacgtttttatttatttcacggaccatggatctaccgggattctggtgtttccaaatgaagacctccacgtgaaagacctgaatgagacaatacactacatgtacaaacataaaatgtatcgaaagatggttttctacattgaggcatgtgagagcgggtccatgatgaatcacttaccggataacatcaatgtttacgccaccaccgcggccaacccgcgcgaatcctcgtacgcctgttattacgatgagaagagaagcacctacttgggagattggtattctgtgaactggatggaggattctgatgtcgaggatctcaccaaagagacactgcacaaacagtaccaccttgtgaaatcccacactaacacctcacacgtgatgcaatacgggaacaaaacaatcagtactatgaaggtcatgcagttccaaggcatgaagagaaaggccagctcacccgtgcccctgccccccgtaacgcacctggatctgacccccagtccggatgtaccactgactatcatgaagcgcaagctgatgaacacaaatgatttggaggaaagcagacagctgacggaagagatccagcgccacctcgatgctcgtcatttgattgagaaatctgtgcggaagattgtgagcttactggcggcatcagaagcagaggttgaacagcttctgtccgagcgcgcacccctgacaggccattcctgctaccctgaagccttactgcattttcgcactcattgcttcaactggcacagccctacctacgagtacgctctccgccacctttacgtgttggtgaatttatgcgagaagccctatcctctgcaccgcatcaagttgtccatggaccacgtgtgtctggggcattattag

SEQ ID NO: 157813 - DNA, 60 bp, Artificial Sequence
  derived and/or modified sequence
atggtgtggaaggtggccgtgttcctgagcgtggccctgggcatcggggctgttccctag

SEQ ID NO: 157814 - DNA, 1302 bp, Artificial Sequence
  derived and/or modified sequence
atggtgtggaaggtcgcggtgttcctgtcggtagctctggggattggggcagtcccaatcgatgatcccgaagacggcggtaagcactgggtcgtgattgtcgcaggcagcaatgggtggtataattatcgccatcaggctgatgcttgccatgcctatcagatcatacatagaaatgggatccccgacgagcagatcgtcgttatgatgtatgacgatatcgcttatagcgaggacaacccaacaccagggatcgtcatcaacaggcctaacggcactgatgtgtatcaaggtgtgcctaaagattataccggtgaggatgtaaccccgcagaactttttagccgtgctgcggggtgacgccgaagctgtcaaaggaatcgggtcaggcaaggtcctcaagagtgggccacaggaccacgtgtttatttacttcaccgatcatggttccacaggtattttggtgttcccaaacgaggatttgcacgtgaaagacctgaacgagacaattcactacatgtacaagcacaagatgtacaggaagatggtcttttacatcgaagcgtgcgaaagtggctccatgatgaaccacttacctgataatataaacgtctacgcgaccacagccgctaatcccagagagtcttcctacgcctgctattacgatgaaaagcgctcaacctatctaggggactggtacagtgtaaactggatggaggatagtgacgtggaggatctcaccaaggagacattacacaagcagtaccatctagtaaagtctcatacaaataccagccacgtgatgcaatacggaaacaagaccatttctacaatgaaagttatgcagtttcagggcatgaagagaaaggcgagttctccagtgcctctgcctcccgtcacgcacctggatctcactccttcaccagatgtccctctgactataatgaaaagaaaactgatgaacacaaatgatttggaggagtctcgacagctgacagaagaaatccaaagacatctcgatgccaggcatctcatcgagaagtctgttaggaagatcgtgtccctgctcgcagcgagcgaagccgaagtggaacagttgctgtctgaaagagcgcctcttactggacatagttgttatccggaagcgctgttgcacttccgcacgcactgtttcaactggcactcaccgacctacgaatacgctctgcgtcacttatatgtgttagttaacctctgcgagaagccctacccattacatcgcattaagctgtctatggatcacgtgtgcttaggtcattactag

SEQ ID NO: 157815 - DNA, 1302 bp, Artificial Sequence
  derived and/or modified sequence
atggtgtggaaggtggcagtttttctctccgtggccctgggcattggtgccgtcccgatcgacgatcctgaggacgggggtaaacactgggtggttattgtggcaggctcaaacggttggtataattatcgacaccaggcggacgcttgtcatgcttaccagatcattcaccggaatggaatccctgatgagcagatagtggtgatgatgtacgacgacatcgcttactctgaagacaaccctacccccggtatcgtgatcaataggcccaatggcacagatgtataccagggcgtccccaaggattatactggtgaagacgttacaccccagaatttcctagccgtcttgcggggtgacgccgaagccgtgaaaggtattgggagtgggaaggtccttaagagtgggcctcaggatcatgtgttcatctactttacagatcatgggtctacaggcatccttgtcttcccaaacgaggacttacatgtgaaagacctgaacgagactatacactatatgtacaaacataagatgtatagaaagatggtgttctacatcgaggcctgcgaatccggctctatgatgaatcacctgcctgacaatattaacgtttacgccactaccgctgcaaacccccgagagagttcctacgcctgctactatgacgaaaagaggtccacatacctcggggattggtatagtgtgaactggatggaggactcggacgtggaggatctcaccaaagaaacgcttcacaagcagtaccatcttgtgaagagtcatacaaataccagtcatgtgatgcaatacgggaataaaactatctctactatgaaggttatgcagttccaggggatgaagcggaaggccagttcaccagtgccccttcccccagtaacccacctcgacctgacccccagtcctgatgtccctcttaccattatgaagagaaagctgatgaacaccaatgatctcgaggagagcagacaattaaccgaagaaatacagcgccatcttgatgcacgtcatttgatagagaagtccgtgagaaagatcgttagtttgcttgcagcaagcgaagcagaagtggaacaactgctgtcagagagagctccattaactggtcatagttgctatcctgaagctctgcttcacttccgcacccattgcttcaattggcatagcccaacttatgagtatgccctgcggcatctgtacgtattggtgaacctctgtgagaagccatatcccttgcatcgcattaagctgtctatggaccatgtttgcttggggcactactag

SEQ ID NO: 157816 - DNA, 1197 bp, Artificial Sequence
  derived and/or modified sequence
atggtttggaaggtggctgttttcctctctgtcgctctgggaattggtgccgtaccgatcgacgacccagaagacggaggaaagcactgggtcgtgatagttgccggtagtaacgggtggtataattatagacaccaggcagacgcatgtcatgcataccagatcattcaccggaacggcatacccgatgagcagattgtggtgatgatgtacgacgtgacgcctcagaatttcctggctgtcttaaggggagatgctgaggcagttaagggaataggcagcgggaaggtgctcaagtccggtcctcaagaccacgtcttcatctatttcacagaccacggctcaaccggaatcctcgtgtttcctaacgaagacctacacgttaaggatctgaatgaaacaatacattatatgtataagcataaaatgtatagaaagatggtgttttatattgaggcatgtgaatctgggtccatgatgaatcacttgccagataatatcaatgtctatgctaccacggctgccaacccacgcgagtcctcttatgcttgctactatgacgagaagcggtccacttaccttggggactggtatagcgtgaattggatggaggatagcgatgtcgaggatctgactaaggagactctgcacaaacagtatcatctggttaagagtcatacgaatacttctcacgtgatgcagtatgggaacaagacaataagtacaatgaaagtgatgcaatttcaggggatgaaacggaaggcctcctcgcccgtgccactgccacctgtcactcacctggacctgaccccatctcccgatgtgcctcttaccattatgaagagaaagctgatgaacacgaatgacctcgaagaaagccgtcaactgaccgaggaaattcagcgccacctggacgcaagacacctaattgagaaatccgtgagaaagattgtgtcactcttggccgcatctgaggctgaggtcgaacagctcttgtctgagagagccccacttaccggacatagctgttatcccgaggccctgttgcatttcagaacccattgtttcaactggcactcacccacatacgagtacgcactgagacacctctacgtgctggtgaatctgtgtgagaaaccttatcctctacaccggattaagctgtccatggaccacgtttgcctcggtcattactag

SEQ ID NO: 157817 - DNA, 1233 bp, Artificial Sequence
  derived and/or modified sequence
atggtgtggaaagtggcggtgttcctgtctgtggcgggatcaaatggctggtacaattacagacaccaggccgatgcatgtcacgcgtatcaaatcatccatcggaatggtattccagatgaacagatcgtagttatgatgtacgatgacattgcttattctgaggacaaccctacgccgggaatcgttatcaatcgccctaacggcaccgacgtttatcagggcgtgcctaaggactacaccggagaagatgttacaccccagaacttccttgcggtgctacgaggcgacgcggaggccgtgaaaggcatcggctcgggaaaagtgcttaagagcggaccacaggaccacgtgtttatttactttaccgaccatggctcaaccggcattctcgtgtttccaaacgaggacctgcacgtgaaagatcttaacgaaactatacactacatgtataaacacaagatgtacaggaagatggttttttacattgaggcctgtgagtctggaagcatgatgaaccatctgccagacaatatcaacgtgtatgcgactaccgccgctaatcccagagagtccagctacgcttgttattatgatgaaaaacgcagtacttatctgggagactggtacagcgtgaactggatggaagattctgatgtagaagatctgactaaggagactctccataaacaataccatttggtgaagtcacataccaatacatcccatgtaatgcagtacggaaataagaccatcagcaccatgaaggtgatgcagtttcagggtatgaagcggaaagcatcctctccagtgcctctcccccctgtgactcacttggacttgacaccatcccccgacgtgccactgactatcatgaaaaggaaactgatgaacacaaacgacctggaagagtccagacagctgacagaagaaatccagcggcatttagacgccagacatctgatcgaaaagagcgtgcggaaaatcgtcagcctgctggcagcgagtgaggccgaggtagaacagttgctgtccgagcgtgctccccttactggtcattcatgctaccccgaagcattattgcacttccgaactcattgttttaactggcactcacccacatacgaatatgcgctacgccatctgtacgtcctcgtcaacctgtgcgagaaaccttatcctttacatagaatcaagctttcaatggaccatgtgtgtctaggccattattag

SEQ ID NO: 157818 - DNA, 60 bp, Artificial Sequence
  derived and/or modified sequence
atggtttggaaggtagccgtctttctgtccgtggctctgggtattggggctgtcccctag

SEQ ID NO: 157819 - DNA, 1302 bp, Artificial Sequence
  derived and/or modified sequence
atggtgtggaaggtggccgtgttcctgagcgtggccctgggcatcggcgccgtgcccatcgacgaccccgaggacggcggcaagcactgggtggtgatcgtggccggcagcaacggctggtacaactacagacaccaggccgacgcctgccacgcctaccagatcatccacagaaacggcatccccgacgagcagatcgtggtgatgatgtacgacgacatcgcctacagcgaggacaaccccacccccggcatcgtgatcaacagacccaacggcaccgacgtgtaccagggcgtgcccaaggactacaccggcgaggacgtgaccccccagaacttcctggccgtgctgagaggcgacgccgaggccgtgaagggcatcggcagcggcaaggtgctgaagagcggcccccaggaccacgtgttcatctacttcaccgaccacggcagcaccggcatcctggtgttccccaacgaggacctgcacgtgaaggacctgaacgagaccatccactacatgtacaagcacaagatgtacagaaagatggtgttctacatcgaggcctgcgagagcggcagcatgatgaaccacctgcccgacaacatcaacgtgtacgccaccaccgccgccaaccccagagagagcagctacgcctgctactacgacgagaagagaagcacctacctgggcgactggtacagcgtgaactggatggaggacagcgacgtggaggacctgaccaaggagaccctgcacaagcagtaccacctggtgaagagccacaccaacaccagccacgtgatgcagtacggcaacaagaccatcagcaccatgaaggtgatgcagttccagggcatgaagagaaaggccagcagccccgtgcccctgccccccgtgacccacctggacctgacccccagccccgacgtgcccctgaccatcatgaagagaaagctgatgaacaccaacgacctggaggagagcagacagctgaccgaggagatccagagacacctggacgccagacacctgatcgagaagagcgtgagaaagatcgtgagcctgctggccgccagcgaggccgaggtggagcagctgctgagcgagagagcccccctgaccggccacagctgctaccccgaggccctgctgcacttcagaacccactgcttcaactggcacagccccacctacgagtacgccctgagacacctgtacgtgctggtgaacctgtgcgagaagccctaccccctgcacagaatcaagctgagcatggaccacgtgtgcctgggccactactag

SEQ ID NO: 157820 - DNA, 1197 bp, Artificial Sequence
  derived and/or modified sequence
atggtgtggaaggtggccgtgttcctgagcgtggccctgggcatcggcgccgtgcccatcgacgaccccgaggacggcggcaagcactgggtggtgatcgtggccggcagcaacggctggtacaactacagacaccaggccgacgcctgccacgcctaccagatcatccacagaaacggcatccccgacgagcagatcgtggtgatgatgtacgacgtgaccccccagaacttcctggccgtgctgagaggcgacgccgaggccgtgaagggcatcggcagcggcaaggtgctgaagagcggcccccaggaccacgtgttcatctacttcaccgaccacggcagcaccggcatcctggtgttccccaacgaggacctgcacgtgaaggacctgaacgagaccatccactacatgtacaagcacaagatgtacagaaagatggtgttctacatcgaggcctgcgagagcggcagcatgatgaaccacctgcccgacaacatcaacgtgtacgccaccaccgccgccaaccccagagagagcagctacgcctgctactacgacgagaagagaagcacctacctgggcgactggtacagcgtgaactggatggaggacagcgacgtggaggacctgaccaaggagaccctgcacaagcagtaccacctggtgaagagccacaccaacaccagccacgtgatgcagtacggcaacaagaccatcagcaccatgaaggtgatgcagttccagggcatgaagagaaaggccagcagccccgtgcccctgccccccgtgacccacctggacctgacccccagccccgacgtgcccctgaccatcatgaagagaaagctgatgaacaccaacgacctggaggagagcagacagctgaccgaggagatccagagacacctggacgccagacacctgatcgagaagagcgtgagaaagatcgtgagcctgctggccgccagcgaggccgaggtggagcagctgctgagcgagagagcccccctgaccggccacagctgctaccccgaggccctgctgcacttcagaacccactgcttcaactggcacagccccacctacgagtacgccctgagacacctgtacgtgctggtgaacctgtgcgagaagccctaccccctgcacagaatcaagctgagcatggaccacgtgtgcctgggccactactag

SEQ ID NO: 157821 - DNA, 1233 bp, Artificial Sequence
  derived and/or modified sequence
atggtgtggaaggtggccgtgttcctgagcgtggccggcagcaacggctggtacaactacagacaccaggccgacgcctgccacgcctaccagatcatccacagaaacggcatccccgacgagcagatcgtggtgatgatgtacgacgacatcgcctacagcgaggacaaccccacccccggcatcgtgatcaacagacccaacggcaccgacgtgtaccagggcgtgcccaaggactacaccggcgaggacgtgaccccccagaacttcctggccgtgctgagaggcgacgccgaggccgtgaagggcatcggcagcggcaaggtgctgaagagcggcccccaggaccacgtgttcatctacttcaccgaccacggcagcaccggcatcctggtgttccccaacgaggacctgcacgtgaaggacctgaacgagaccatccactacatgtacaagcacaagatgtacagaaagatggtgttctacatcgaggcctgcgagagcggcagcatgatgaaccacctgcccgacaacatcaacgtgtacgccaccaccgccgccaaccccagagagagcagctacgcctgctactacgacgagaagagaagcacctacctgggcgactggtacagcgtgaactggatggaggacagcgacgtggaggacctgaccaaggagaccctgcacaagcagtaccacctggtgaagagccacaccaacaccagccacgtgatgcagtacggcaacaagaccatcagcaccatgaaggtgatgcagttccagggcatgaagagaaaggccagcagccccgtgcccctgccccccgtgacccacctggacctgacccccagccccgacgtgcccctgaccatcatgaagagaaagctgatgaacaccaacgacctggaggagagcagacagctgaccgaggagatccagagacacctggacgccagacacctgatcgagaagagcgtgagaaagatcgtgagcctgctggccgccagcgaggccgaggtggagcagctgctgagcgagagagcccccctgaccggccacagctgctaccccgaggccctgctgcacttcagaacccactgcttcaactggcacagccccacctacgagtacgccctgagacacctgtacgtgctggtgaacctgtgcgagaagccctaccccctgcacagaatcaagctgagcatggaccacgtgtgcctgggccactactag

SEQ ID NO: 157822 - DNA, 60 bp, Artificial Sequence
  derived and/or modified sequence
atggtgtggaaggtggccgtgttcctgagcgtggccctgggcatcggcgccgtgccctag

SEQ ID NO: 157823 - protein, 117 aa, Artificial Sequence
  derived and/or modified sequence
MAAAYLDPNLNHTPNSSTKTHLGTGMERSPGAMERVLKVFHYFESNSEPTTWASIIRHGDATDVRGIIQKIVDSHKVKHVACYGFRLSHLRSEEVHWLHVDMGVSSVREKYELAHPP

SEQ ID NO: 157824 - protein, 1096 aa, Artificial Sequence
  derived and/or modified sequence
MLLELAGQEALKPAGAIYMEKSGCSPFPVCWAKEYDRYLASSKIMAAAYLDPNLNHTPNSSTKTHLGTGMERSPGAMERVLKVFHYFESNSEPTTWASIIRHGDATDVRGIIQKIVDSHKVKHVACYGFRLSHLRSEEVHWLHVDMGVSSVREKYELAHPPEEWKYELRIRYLPKGFLNQFTEDKPTLNFFYQQVKSDYMLEIADQVDQEIALKLGCLEIRRSYWEMRGNALEKKSNYEVLEKDVGLKRFFPKSLLDSVKAKTLRKLIQQTFRQFANLNREESILKFFEILSPVYRFDKECFKCALGSSWIISVELAIGPEEGISYLTDKGCNPTHLADFTQVQTIQYSNSEDKDRKGMLQLKIAGAPEPLTVTAPSLTIAENMADLIDGYCRLVNGTSQSFIIRPQKEGERALPSIPKLANSEKQGMRTHAVSVSETDDYAEIIDEEDTYTMPSTRDYEIQRERIELGRCIGEGQFGDVHQGIYMSPENPALAVAIKTCKNCTSDSVREKFLQEALTMRQFDHPHIVKLIGVITENPVWIIMELCTLGELRSFLQVRKYSLDLASLILYAYQLSTALAYLESKRFVHRDIAARNVLVSSNDCVKLGDFGLSRYMEDSTYYKASKGKLPIKWMAPESINFRRFTSASDVWMFGVCMWEILMHGVKPFQGVKNNDVIGRIENGERLPMPPNCPPTLYSLMTKCWAYDPSRRPRFTELKAQLSTILEEEKAQQEERMRMESRRQATVSWDSGGSDEAPPKPSRPGYPSPRSSEGFYPSPQHMVQTNHYQVSGYPGSHGITAMAGSIYPGQASLLDQTDSWNHRPQEIAMWQPNVEDSTVLDLRGIGQVLPTHLMEERLIRQQQEMEEDQRWLEKEERFLKPDVRLSRGSIDREDGSLQGPIGNQHIYQPVGKPDPAAPPKKPPRPGAPGHLGSLASLSSPADSYNEGVKLQPQEISPPPTANLDRSNDKVYENVTGLVKAVIEMSSKIQPAPPEEYVPMVKEVGLALRTLLATVDETIPLLPASTHREIEMAQKLLNSDLGELINKMKLAQQYVMTSLQQEYKKQMLTAAHALAVDAKNLLDVIDQARLKMLGQTRPH

SEQ ID NO: 157825 - protein, 1017 aa, Artificial Sequence
  derived and/or modified sequence
  misc_feature (1)..(1): Xaa can be any naturally occurring amino acid
XYDRYLASSKIMAAAYLDPNLNHTPNSSTKTHLGTGMERSPGAMERVLKVFHYFESNSEPTTWASIIRHGDATDVRGIIQKIVDSHKVKHVACYGFRLSHLRSEEVHWLHVDMGVSSVREKYELAHPPEEWKYELRIRYLPKGFLNQFTEDKPTLNFFYQQVKSDYMLEIADQVDQEIALKLGCLEIRRSYWEMRGNALEKKSNYEVLEKDVGLKRFFPKSLLDSVKAKTLRKLIQQTFRQFANLNREESILKFFEILSPVYRFDKECFKCALGSSWIISVELAIGPEEGISYLTDKGCNPTHLADFTQVQTIQYSNSEDKDRKGMLQLKIAGAPEPLTVTAPSLTIAENMADLIDGYCRLVNGTSQSFIIRPQKEGERALPSIPKLANSEKQGMRTHAVSVSETDDYAEIIDEEDTYTMPSTRDYEIQRERIELGRCIGEGQFGDVHQGIYMSPENPALAVAIKTCKNCTSDSVREKFLQEALTMRQFDHPHIVKLIGVITENPVWIIMELCTLGELRSFLQVRKYSLDLASLILYAYQLSTALAYLESKRFVHRDIAARNVLVSSNDCVKLGDFGLSRYMEDSTYYKASKGKLPIKWMAPESINFRRFTSASDVWMFGVCMWEILMHGVKPFQGVKNNDVIGRIENGERLPMPPNCPPTLYSLMTKCWAYDPSRRPRFTELKAQLSTILEEEKAQQEERMRMESRRQATVSWDSGGSDEAPPKPSRPGYPSPRSSEGFYPSPQHMVQTNHYQDSTVLDLRGIGQVLPTHLMEERLIRQQQEMEEDQRWLEKEERFLKPDVRLSRGSIDREDGSLQGPIGNQHIYQPVGKPDPAAPPKKPPRPGAPGHLGSLASLSSPADSYNEGVKLQPQEISPPPTANLDRSNDKVYENVTGLVKAVIEMSSKIQPAPPEEYVPMVKEVGLALRTLLATVDETIPLLPASTHREIEMAQKLLNSDLGELINKMKLAQQYVMTSLQQEYKKQMLTAAHALAVDAKNLLDVIDQARLKMLGQTRPH

SEQ ID NO: 157826 - protein, 119 aa, Artificial Sequence
  derived and/or modified sequence
MAAAYLDPNLNHTPNSSTKTHLGTGMERSPGAMERVLKVFHYFESNSEPTTWASIIRHGDATDVRGIIQKIVDSHKVKHVACYGFRLSHLRSEEVHWLHVDMGVSSVREKYELAHPPEE

SEQ ID NO: 157827 - protein, 120 aa, Artificial Sequence
  derived and/or modified sequence
MAAAYLDPNLNHTPNSSTKTHLGTGMERSPGAMERVLKVFHYFESNSEPTTWASIIRHGDATDVRGIIQKIVDSHKVKHVACYGFRLSHLRSEEVHWLHVDMGVSSVREKYELAHPPEEW

SEQ ID NO: 157828 - protein, 1006 aa, Artificial Sequence
  derived and/or modified sequence
MAAAYLDPNLNHTPNSSTKTHLGTGMERSPGAMERVLKVFHYFESNSEPTTWASIIRHGDATDVRGIIQKIVDSHKVKHVACYGFRLSHLRSEEVHWLHVDMGVSSVREKYELAHPPEEWKYELRIRYLPKGFLNQFTEDKPTLNFFYQQVKSDYMLEIADQVDQEIALKLGCLEIRRSYWEMRGNALEKKSNYEVLEKDVGLKRFFPKSLLDSVKAKTLRKLIQQTFRQFANLNREESILKFFEILSPVYRFDKECFKCALGSSWIISVELAIGPEEGISYLTDKGCNPTHLADFTQVQTIQYSNSEDKDRKGMLQLKIAGAPEPLTVTAPSLTIAENMADLIDGYCRLVNGTSQSFIIRPQKEGERALPSIPKLANSEKQGMRTHAVSVSETDDYAEIIDEEDTYTMPSTRDYEIQRERIELGRCIGEGQFGDVHQGIYMSPENPALAVAIKTCKNCTSDSVREKFLQEALTMRQFDHPHIVKLIGVITENPVWIIMELCTLGELRSFLQVRKYSLDLASLILYAYQLSTALAYLESKRFVHRDIAARNVLVSSNDCVKLGDFGLSRYMEDSTYYKASKGKLPIKWMAPESINFRRFTSASDVWMFGVCMWEILMHGVKPFQGVKNNDVIGRIENGERLPMPPNCPPTLYSLMTKCWAYDPSRRPRFTELKAQLSTILEEEKAQQEERMRMESRRQATVSWDSGGSDEAPPKPSRPGYPSPRSSEGFYPSPQHMVQTNHYQDSTVLDLRGIGQVLPTHLMEERLIRQQQEMEEDQRWLEKEERFLKPDVRLSRGSIDREDGSLQGPIGNQHIYQPVGKPDPAAPPKKPPRPGAPGHLGSLASLSSPADSYNEGVKLQPQEISPPPTANLDRSNDKVYENVTGLVKAVIEMSSKIQPAPPEEYVPMVKEVGLALRTLLATVDETIPLLPASTHREIEMAQKLLNSDLGELINKMKLAQQYVMTSLQQEYKKQMLTAAHALAVDAKNLLDVIDQARLKMLGQTRPH

SEQ ID NO: 157829 - DNA, 1662 bp, Artificial Sequence
  derived and/or modified sequence
agcgactacatgatcatcaagaagaagagcaactacgaggtgctggagaaggacgtgggcctgaagagattcttccccaagagcctgctggacagcgtgaaggccaagaccctgagaaagctgatccagcagaccttcagacagttcgccaacctgaacagagaggagagcatcctgaagttcttcgagatcctgagccccgtgtacagattcgacaaggagtgcttcaagtgcgccctgggcagcagctggatcatcagcgtggagctggccatcggccccgaggagggcatcagctacctgaccgacaagggctgcaaccccacccacctggccgacttcacccaggtgcagaccatccagtacagcaacagcgaggacaaggacagaaagggcatgctgcagctgaagatcgccggcgcccccgagcccctgaccgtgaccgcccccagcctgaccatcgccgagaacatggccgacctgatcgacggctactgcagactggtgaacggcaccagccagagcttcatcatcagaccccagaaggagggcgagagagccctgcccagcatccccaagctggccaacagcgagaagcagggcatgagaacccacgccgtgagcgtgagcgagaccgacgactacgccgagatcatcgacgaggaggacacctacaccatgcccagcaccagagactacgagatccagagagagagaatcgagctgggcagatgcatcggcgagggccagttcggcgacgtgcaccagggcatctacatgagccccgagaaccccgccctggccgtggccatcaagacctgcaagaactgcaccagcgacagcgtgagagagaagttcctgcaggaggcctgccactacaccagcctgcactggaactggtgcagatacatcagcgaccccaacgtggactgccccgaccccagaaacgccgaggtgaccatgagacagttcgaccacccccacatcgtgaagctgatcggcgtgatcaccgagaaccccgtgtggatcatcatggagctgtgcaccctgggcgagctgagaagcttcctgcaggtgagaaagtacagcctggacctggccagcctgatcctgtacgcctaccagctgagcaccgccctggcctacctggagagcaagagattcgtgcacagagacatcgccgccagaaacgtgctggtgagcagcaacgactgcgtgaagctgggcgacttcggcctgagcagatacatggaggacagcacctactacaaggccagcaagggcaagctgcccatcaagtggatggcccccgagagcatcaacttcagaagattcaccagcgccagcgacgtgtggatgttcggcgtgtgcatgtgggagatcctgatgcacggcgtgaagcccttccagggcgtgaagaacaacgacgtgatcggcagaatcgagaacggcgagagactgcccatgccccccaactgcccccccaccctgtacagcctgatgaccaagtgctgggcctacgaccccagcagaagacccagattcaccgagctgaaggcccagctgagcttccagaaccccgcccagatgctgcccgccagcggcagactgcccaaccagccctgccccgagagagagaactacagcttcgccaccttctag

SEQ ID NO: 157830 - DNA, 2043 bp, Artificial Sequence
  derived and/or modified sequence
atgaagtaccaggaggtgagatgcctgaccagcttcaacatcagcgtgagcttccccgccgagaccgacgactacgccgagatcatcgacgaggaggacacctacaccatgcccagcaccagagactacgagatccagagagagagaatcgagctgggcagatgcatcggcgagggccagttcggcgacgtgcaccagggcatctacatgagccccgagaaccccgccctggccgtggccatcaagacctgcaagaactgcaccagcgacagcgtgagagagaagttcctgcaggaggccctgaccatgagacagttcgaccacccccacatcgtgaagctgatcggcgtgatcaccgagaaccccgtgtggatcatcatggagctgtgcaccctgggcgagctgagaagcttcctgcaggtgagaaagtacagcctggacctggccagcctgatcctgtacgcctaccagctgagcaccgccctggcctacctggagagcaagagattcgtgcacagagacatcgccgccagaaacgtgctggtgagcagcaacgactgcgtgaagctgggcgacttcggcctgagcagatacatggaggacagcacctactacaaggccagcaagggcaagctgcccatcaagtggatggcccccgagagcatcaacttcagaagattcaccagcgccagcgacgtgtggatgttcggcgtgtgcatgtgggagatcctgatgcacggcgtgaagcccttccagggcgtgaagaacaacgacgtgatcggcagaatcgagaacggcgagagactgcccatgccccccaactgcccccccaccctgtacagcctgatgaccaagtgctgggcctacgaccccagcagaagacccagattcaccgagctgaaggcccagctgagcaccatcctggaggaggagaaggcccagcaggaggagagaatgagaatggagagcagaagacaggccaccgtgagctgggacagcggcggcagcgacgaggccccccccaagcccagcagacccggctaccccagccccagaagcagcgagggcttctaccccagcccccagcacatggtgcagaccaaccactaccaggtgagcggctaccccggcagccacggcatcaccgccatggccggcagcatctaccccggccaggccagcctgctggaccagaccgacagctggaaccacagaccccaggagatcgccatgtggcagcccaacgtggaggacagcaccgtgctggacctgagaggcatcggccaggtgctgcccacccacctgatggaggagagactgatcagacagcagcaggagatggaggaggaccagagatggctggagaaggaggagagattcctgaagcccgacgtgagactgagcagaggcagcatcgacagagaggacggcagcctgcagggccccatcggcaaccagcacatctaccagcccgtgggcaagcccgaccccgccgccccccccaagaagccccccagacccggcgcccccggccacctgggcagcctggccagcctgagcagccccgccgacagctacaacgagggcgtgaagctgcagccccaggagatcagccccccccccaccgccaacctggacagaagcaacgacaaggtgtacgagaacgtgaccggcctggtgaaggccgtgatcgagatgagcagcaagatccagcccgccccccccgaggagtacgtgcccatggtgaaggaggtgggcctggccctgagaaccctgctggccaccgtggacgagaccatccccctgctgcccgccagcacccacagagagatcgagatggcccagaagctgctgaacagcgacctgggcgagctgatcaacaagatgaagctggcccagcagtacgtgatgaccagcctgcagcaggagtacaagaagcagatgctgaccgccgcccacgccctggccgtggacgccaagaacctgctggacgtgatcgaccaggccagactgaagatgctgggccagaccagaccccactag

SEQ ID NO: 157831 - DNA, 3054 bp, Artificial Sequence
  derived and/or modified sequence
tgatacgacagatacctggccagcagcaagatcatggccgccgcctacctggaccccaacctgaaccacacccccaacagcagcaccaagacccacctgggcaccggcatggagagaagccccggcgccatggagagagtgctgaaggtgttccactacttcgagagcaacagcgagcccaccacctgggccagcatcatcagacacggcgacgccaccgacgtgagaggcatcatccagaagatcgtggacagccacaaggtgaagcacgtggcctgctacggcttcagactgagccacctgagaagcgaggaggtgcactggctgcacgtggacatgggcgtgagcagcgtgagagagaagtacgagctggcccacccccccgaggagtggaagtacgagctgagaatcagatacctgcccaagggcttcctgaaccagttcaccgaggacaagcccaccctgaacttcttctaccagcaggtgaagagcgactacatgctggagatcgccgaccaggtggaccaggagatcgccctgaagctgggctgcctggagatcagaagaagctactgggagatgagaggcaacgccctggagaagaagagcaactacgaggtgctggagaaggacgtgggcctgaagagattcttccccaagagcctgctggacagcgtgaaggccaagaccctgagaaagctgatccagcagaccttcagacagttcgccaacctgaacagagaggagagcatcctgaagttcttcgagatcctgagccccgtgtacagattcgacaaggagtgcttcaagtgcgccctgggcagcagctggatcatcagcgtggagctggccatcggccccgaggagggcatcagctacctgaccgacaagggctgcaaccccacccacctggccgacttcacccaggtgcagaccatccagtacagcaacagcgaggacaaggacagaaagggcatgctgcagctgaagatcgccggcgcccccgagcccctgaccgtgaccgcccccagcctgaccatcgccgagaacatggccgacctgatcgacggctactgcagactggtgaacggcaccagccagagcttcatcatcagaccccagaaggagggcgagagagccctgcccagcatccccaagctggccaacagcgagaagcagggcatgagaacccacgccgtgagcgtgagcgagaccgacgactacgccgagatcatcgacgaggaggacacctacaccatgcccagcaccagagactacgagatccagagagagagaatcgagctgggcagatgcatcggcgagggccagttcggcgacgtgcaccagggcatctacatgagccccgagaaccccgccctggccgtggccatcaagacctgcaagaactgcaccagcgacagcgtgagagagaagttcctgcaggaggccctgaccatgagacagttcgaccacccccacatcgtgaagctgatcggcgtgatcaccgagaaccccgtgtggatcatcatggagctgtgcaccctgggcgagctgagaagcttcctgcaggtgagaaagtacagcctggacctggccagcctgatcctgtacgcctaccagctgagcaccgccctggcctacctggagagcaagagattcgtgcacagagacatcgccgccagaaacgtgctggtgagcagcaacgactgcgtgaagctgggcgacttcggcctgagcagatacatggaggacagcacctactacaaggccagcaagggcaagctgcccatcaagtggatggcccccgagagcatcaacttcagaagattcaccagcgccagcgacgtgtggatgttcggcgtgtgcatgtgggagatcctgatgcacggcgtgaagcccttccagggcgtgaagaacaacgacgtgatcggcagaatcgagaacggcgagagactgcccatgccccccaactgcccccccaccctgtacagcctgatgaccaagtgctgggcctacgaccccagcagaagacccagattcaccgagctgaaggcccagctgagcaccatcctggaggaggagaaggcccagcaggaggagagaatgagaatggagagcagaagacaggccaccgtgagctgggacagcggcggcagcgacgaggccccccccaagcccagcagacccggctaccccagccccagaagcagcgagggcttctaccccagcccccagcacatggtgcagaccaaccactaccaggacagcaccgtgctggacctgagaggcatcggccaggtgctgcccacccacctgatggaggagagactgatcagacagcagcaggagatggaggaggaccagagatggctggagaaggaggagagattcctgaagcccgacgtgagactgagcagaggcagcatcgacagagaggacggcagcctgcagggccccatcggcaaccagcacatctaccagcccgtgggcaagcccgaccccgccgccccccccaagaagccccccagacccggcgcccccggccacctgggcagcctggccagcctgagcagccccgccgacagctacaacgagggcgtgaagctgcagccccaggagatcagccccccccccaccgccaacctggacagaagcaacgacaaggtgtacgagaacgtgaccggcctggtgaaggccgtgatcgagatgagcagcaagatccagcccgccccccccgaggagtacgtgcccatggtgaaggaggtgggcctggccctgagaaccctgctggccaccgtggacgagaccatccccctgctgcccgccagcacccacagagagatcgagatggcccagaagctgctgaacagcgacctgggcgagctgatcaacaagatgaagctggcccagcagtacgtgatgaccagcctgcagcaggagtacaagaagcagatgctgaccgccgcccacgccctggccgtggacgccaagaacctgctggacgtgatcgaccaggccagactgaagatgctgggccagaccagaccccactag

SEQ ID NO: 157832 - DNA, 3159 bp, Artificial Sequence
  derived and/or modified sequence
atggccgccgcctacctggaccccaacctgaaccacacccccaacagcagcaccaagacccacctgggcaccggcatggagagaagccccggcgccatggagagagtgctgaaggtgttccactacttcgagagcaacagcgagcccaccacctgggccagcatcatcagacacggcgacgccaccgacgtgagaggcatcatccagaagatcgtggacagccacaaggtgaagcacgtggcctgctacggcttcagactgagccacctgagaagcgaggaggtgcactggctgcacgtggacatgggcgtgagcagcgtgagagagaagtacgagctggcccacccccccgaggagtggaagtacgagctgagaatcagatacctgcccaagggcttcctgaaccagttcaccgaggacaagcccaccctgaacttcttctaccagcaggtgaagagcgactacatgctggagatcgccgaccaggtggaccaggagatcgccctgaagctgggctgcctggagatcagaagaagctactgggagatgagaggcaacgccctggagaagaagagcaactacgaggtgctggagaaggacgtgggcctgaagagattcttccccaagagcctgctggacagcgtgaaggccaagaccctgagaaagctgatccagcagaccttcagacagttcgccaacctgaacagagaggagagcatcctgaagttcttcgagatcctgagccccgtgtacagattcgacaaggagtgcttcaagtgcgccctgggcagcagctggatcatcagcgtggagctggccatcggccccgaggagggcatcagctacctgaccgacaagggctgcaaccccacccacctggccgacttcacccaggtgcagaccatccagtacagcaacagcgaggacaaggacagaaagggcatgctgcagctgaagatcgccggcgcccccgagcccctgaccgtgaccgcccccagcctgaccatcgccgagaacatggccgacctgatcgacggctactgcagactggtgaacggcaccagccagagcttcatcatcagaccccagaaggagggcgagagagccctgcccagcatccccaagctggccaacagcgagaagcagggcatgagaacccacgccgtgagcgtgagcgagaccgacgactacgccgagatcatcgacgaggaggacacctacaccatgcccagcaccagagactacgagatccagagagagagaatcgagctgggcagatgcatcggcgagggccagttcggcgacgtgcaccagggcatctacatgagccccgagaaccccgccctggccgtggccatcaagacctgcaagaactgcaccagcgacagcgtgagagagaagttcctgcaggaggccctgaccatgagacagttcgaccacccccacatcgtgaagctgatcggcgtgatcaccgagaaccccgtgtggatcatcatggagctgtgcaccctgggcgagctgagaagcttcctgcaggtgagaaagtacagcctggacctggccagcctgatcctgtacgcctaccagctgagcaccgccctggcctacctggagagcaagagattcgtgcacagagacatcgccgccagaaacgtgctggtgagcagcaacgactgcgtgaagctgggcgacttcggcctgagcagatacatggaggacagcacctactacaaggccagcaagggcaagctgcccatcaagtggatggcccccgagagcatcaacttcagaagattcaccagcgccagcgacgtgtggatgttcggcgtgtgcatgtgggagatcctgatgcacggcgtgaagcccttccagggcgtgaagaacaacgacgtgatcggcagaatcgagaacggcgagagactgcccatgccccccaactgcccccccaccctgtacagcctgatgaccaagtgctgggcctacgaccccagcagaagacccagattcaccgagctgaaggcccagctgagcaccatcctggaggaggagaaggcccagcaggaggagagaatgagaatggagagcagaagacaggccaccgtgagctgggacagcggcggcagcgacgaggccccccccaagcccagcagacccggctaccccagccccagaagcagcgagggcttctaccccagcccccagcacatggtgcagaccaaccactaccaggtgagcggctaccccggcagccacggcatcaccgccatggccggcagcatctaccccggccaggccagcctgctggaccagaccgacagctggaaccacagaccccaggagatcgccatgtggcagcccaacgtggaggacagcaccgtgctggacctgagaggcatcggccaggtgctgcccacccacctgatggaggagagactgatcagacagcagcaggagatggaggaggaccagagatggctggagaaggaggagagattcctgaagcccgacgtgagactgagcagaggcagcatcgacagagaggacggcagcctgcagggccccatcggcaaccagcacatctaccagcccgtgggcaagcccgaccccgccgccccccccaagaagccccccagacccggcgcccccggccacctgggcagcctggccagcctgagcagccccgccgacagctacaacgagggcgtgaagctgcagccccaggagatcagccccccccccaccgccaacctggacagaagcaacgacaaggtgtacgagaacgtgaccggcctggtgaaggccgtgatcgagatgagcagcaagatccagcccgccccccccgaggagtacgtgcccatggtgaaggaggtgggcctggccctgagaaccctgctggccaccgtggacgagaccatccccctgctgcccgccagcacccacagagagatcgagatggcccagaagctgctgaacagcgacctgggcgagctgatcaacaagatgaagctggcccagcagtacgtgatgaccagcctgcagcaggagtacaagaagcagatgctgaccgccgcccacgccctggccgtggacgccaagaacctgctggacgtgatcgaccaggccagactgaagatgctgggccagaccagaccccactag

SEQ ID NO: 157833 - DNA, 3021 bp, Artificial Sequence
  derived and/or modified sequence
atggccgccgcctacctggaccccaacctgaaccacacccccaacagcagcaccaagacccacctgggcaccggcatggagagaagccccggcgccatggagagagtgctgaaggtgttccactacttcgagagcaacagcgagcccaccacctgggccagcatcatcagacacggcgacgccaccgacgtgagaggcatcatccagaagatcgtggacagccacaaggtgaagcacgtggcctgctacggcttcagactgagccacctgagaagcgaggaggtgcactggctgcacgtggacatgggcgtgagcagcgtgagagagaagtacgagctggcccacccccccgaggagtggaagtacgagctgagaatcagatacctgcccaagggcttcctgaaccagttcaccgaggacaagcccaccctgaacttcttctaccagcaggtgaagagcgactacatgctggagatcgccgaccaggtggaccaggagatcgccctgaagctgggctgcctggagatcagaagaagctactgggagatgagaggcaacgccctggagaagaagagcaactacgaggtgctggagaaggacgtgggcctgaagagattcttccccaagagcctgctggacagcgtgaaggccaagaccctgagaaagctgatccagcagaccttcagacagttcgccaacctgaacagagaggagagcatcctgaagttcttcgagatcctgagccccgtgtacagattcgacaaggagtgcttcaagtgcgccctgggcagcagctggatcatcagcgtggagctggccatcggccccgaggagggcatcagctacctgaccgacaagggctgcaaccccacccacctggccgacttcacccaggtgcagaccatccagtacagcaacagcgaggacaaggacagaaagggcatgctgcagctgaagatcgccggcgcccccgagcccctgaccgtgaccgcccccagcctgaccatcgccgagaacatggccgacctgatcgacggctactgcagactggtgaacggcaccagccagagcttcatcatcagaccccagaaggagggcgagagagccctgcccagcatccccaagctggccaacagcgagaagcagggcatgagaacccacgccgtgagcgtgagcgagaccgacgactacgccgagatcatcgacgaggaggacacctacaccatgcccagcaccagagactacgagatccagagagagagaatcgagctgggcagatgcatcggcgagggccagttcggcgacgtgcaccagggcatctacatgagccccgagaaccccgccctggccgtggccatcaagacctgcaagaactgcaccagcgacagcgtgagagagaagttcctgcaggaggccctgaccatgagacagttcgaccacccccacatcgtgaagctgatcggcgtgatcaccgagaaccccgtgtggatcatcatggagctgtgcaccctgggcgagctgagaagcttcctgcaggtgagaaagtacagcctggacctggccagcctgatcctgtacgcctaccagctgagcaccgccctggcctacctggagagcaagagattcgtgcacagagacatcgccgccagaaacgtgctggtgagcagcaacgactgcgtgaagctgggcgacttcggcctgagcagatacatggaggacagcacctactacaaggccagcaagggcaagctgcccatcaagtggatggcccccgagagcatcaacttcagaagattcaccagcgccagcgacgtgtggatgttcggcgtgtgcatgtgggagatcctgatgcacggcgtgaagcccttccagggcgtgaagaacaacgacgtgatcggcagaatcgagaacggcgagagactgcccatgccccccaactgcccccccaccctgtacagcctgatgaccaagtgctgggcctacgaccccagcagaagacccagattcaccgagctgaaggcccagctgagcaccatcctggaggaggagaaggcccagcaggaggagagaatgagaatggagagcagaagacaggccaccgtgagctgggacagcggcggcagcgacgaggccccccccaagcccagcagacccggctaccccagccccagaagcagcgagggcttctaccccagcccccagcacatggtgcagaccaaccactaccaggacagcaccgtgctggacctgagaggcatcggccaggtgctgcccacccacctgatggaggagagactgatcagacagcagcaggagatggaggaggaccagagatggctggagaaggaggagagattcctgaagcccgacgtgagactgagcagaggcagcatcgacagagaggacggcagcctgcagggccccatcggcaaccagcacatctaccagcccgtgggcaagcccgaccccgccgccccccccaagaagccccccagacccggcgcccccggccacctgggcagcctggccagcctgagcagccccgccgacagctacaacgagggcgtgaagctgcagccccaggagatcagccccccccccaccgccaacctggacagaagcaacgacaaggtgtacgagaacgtgaccggcctggtgaaggccgtgatcgagatgagcagcaagatccagcccgccccccccgaggagtacgtgcccatggtgaaggaggtgggcctggccctgagaaccctgctggccaccgtggacgagaccatccccctgctgcccgccagcacccacagagagatcgagatggcccagaagctgctgaacagcgacctgggcgagctgatcaacaagatgaagctggcccagcagtacgtgatgaccagcctgcagcaggagtacaagaagcagatgctgaccgccgcccacgccctggccgtggacgccaagaacctgctggacgtgatcgaccaggccagactgaagatgctgggccagaccagaccccactag

SEQ ID NO: 157834 - DNA, 1662 bp, Artificial Sequence
  derived and/or modified sequence
agtgactacatgatcattaagaagaaatccaactatgaagtgttggaaaaagacgttgggctgaagagatttttccccaagtcactactcgatagtgtcaaagcgaaaacacttcgcaagctgatccaacagacctttaggcagtttgccaacctgaatagagaagaaagtattctgaagttttttgaaatcctgagccccgtctaccgttttgataaagaatgctttaaatgtgcgctgggcagtagctggataatatcggttgagctggcaattgggcccgaggaggggattagttacttgaccgacaagggttgtaaccccacccacctggctgactttacccaggtccagacaatacaatattcaaactctgaggacaaggataggaagggcatgttacagctcaagattgcaggtgcgcccgagccgctaactgtaactgcacctagccttactattgctgagaacatggccgacctgatcgacggatactgcagattagttaacggaacatctcagtcatttatcatcaggcctcagaaggagggggaaagagccctgccaagtattcctaagttggcaaactcagaaaaacagggcatgaggacccacgctgtatctgtgagcgaaaccgacgattacgctgaaattatagatgaggaagacacttacactatgccttctaccagggactatgagatccagagagagcgcattgagctgggacggtgtataggggaaggtcagttcggggatgtgcaccagggcatatatatgtcacctgagaacccagccctggcagtggctatcaagacatgcaaaaattgcacctccgacagcgtcagggaaaagttcctgcaggaagcctgccactacacatctctgcactggaattggtgcagatacatctctgaccccaatgtggactgccctgatccacggaacgcggaagtcaccatgagacagttcgaccacccacacattgtcaagctgattggggtcatcacagagaatccggtatggataatcatggagctgtgtacgctgggggagctgcgctctttcctccaagtgcggaagtatagtttagatctggcctcactgatcttatacgcctaccaactgtccaccgctctggcgtacctggagagcaagagatttgtgcaccgcgacatcgccgcccgaaatgtccttgtttcaagcaatgattgcgtaaagctgggtgactttgggctgagccgttatatggaggactctacatactataaggcctccaaaggtaagttacctatcaagtggatggctcccgagtccattaacttccggcggtttacctctgcgtccgatgtgtggatgttcggtgtttgcatgtgggagatcctgatgcacggtgtgaaaccatttcaaggagtcaagaacaatgacgtgattggtagaatcgagaatggtgagagactccctatgcctcctaattgcccgcccaccctttacagtttaatgaccaaatgttgggcgtacgacccctcccgtcgccccaggttcaccgagcttaaggcccagctgtcctttcaaaaccctgctcagatgttgcccgcatctggccgtctgcccaaccagccctgccccgagcgtgagaactacagctttgccacattttag

SEQ ID NO: 157835 - DNA, 2043 bp, Artificial Sequence
  derived and/or modified sequence
atgaagtaccaggaggtccgatgccttacttcattcaacatttctgtgtctttccccgcagagaccgacgactacgccgaaatcatcgatgaggaagatacctacactatgcccagtaccagggattatgagattcaacgcgagagaatcgagctgggcaggtgtatcggtgagggccagtttggggatgtgcaccaaggaatctacatgagccctgagaaccctgcactggctgtcgctatcaaaacttgcaagaattgcacctcagactctgtacgggagaagttcttgcaagaagcgttgaccatgaggcagttcgaccacccacacatcgtaaagctgattggagttattactgaaaaccccgtgtggatcattatggagctgtgcacacttggcgagctcaggtcttttctccaggtgcgtaaatattccctggatttggcgtcactgatcttatatgcctatcagctgtctacagccctggcctaccttgagagcaaacggttcgtgcacagggatattgcagcacgaaatgtgttggtctcaagcaacgactgtgtcaagctaggcgatttcggattgagtcgttacatggaggactcaacctactacaaggcatcgaagggtaagttacccattaagtggatggcgccagaaagcatcaattttcgcagattcacgtcggcatctgatgtctggatgttcggagtttgtatgtgggaaatcctcatgcacggggttaagccatttcagggggtgaagaacaatgatgttatcggcaggattgaaaatggggagagactgcctatgccccctaactgtccacctacgctgtatagcctgatgactaaatgctgggcatatgatccaagtcgtcgaccacgtttcacggagctgaaggctcagctcagtacaatcttggaagaagaaaaagcccagcaggaggagcgcatgcgaatggagtcacggaggcaggccaccgtgtcttgggatagtggaggctcggatgaggccccccctaaaccctcaagaccaggctacccgagccctcggtcatcggaaggtttctacccatctccccaacacatggtccagacgaaccactaccaggtctccggctaccccggctcccacggcatcacagctatggcgggcagtatatatcctgggcaggcctctctgctggatcagactgattcctggaaccaccgtccgcaagagatcgccatgtggcagccaaacgtggaggattctaccgtgcttgacctcagaggaatcgggcaggtattgcccactcacctgatggaggaaaggttaattaggcagcagcaggaaatggaggaggaccagaggtggctggagaaggaagaacgttttttaaagccagatgtgcggttgtccaggggaagtatcgacagggaagatggaagtctgcagggtcccatcgggaatcaacatatctaccaaccggttggtaaaccggatcctgccgcccctcccaaaaagccacccagacccggtgccccgggccacctggggagcctggcgtcgctctccagtcctgctgacagttataacgagggtgtgaagctgcaaccccaggagatctccccacctcctactgctaacctggaccggagtaacgataaagtatacgagaatgttactggcctggttaaggccgtgattgaaatgtcttctaagatccagcccgccccccccgaggaatatgttcccatggtcaaagaggttggtcttgcactgcgtacccttctggcaacggtggacgagacgattccgttactgcccgcttccactcatagagagattgagatggctcagaaactactgaattctgatctaggtgaactgatcaacaaaatgaagctggctcagcagtacgtaatgactagcctccagcaggagtacaaaaagcaaatgctcactgcggcccacgccttggcagtagatgcaaagaatttgcttgatgttatagaccaagcccgacttaagatgctcggccagactcggccgcactag

SEQ ID NO: 157836 - DNA, 3054 bp, Artificial Sequence
  derived and/or modified sequence
taatatgatcgctacttggccagtagcaaaattatggccgccgcttaccttgacccaaacctgaaccacactcccaactccagcactaagactcacctggggactgggatggaacggtccccaggggcgatggaacgtgttctgaaggtattccactactttgaaagcaatagcgagccaacaacgtgggcttccataatccggcatggcgatgccaccgatgtgagaggcatcatccaaaagatcgtggactcccacaaagtgaagcacgtggcttgttacggatttcgtctttcccatctgcggagtgaagaggtccactggttgcacgttgacatgggtgtgtctagcgtaagggagaagtacgaacttgcccatcctccagaagagtggaaatatgaactgcggatacgttatcttccaaaagggttcctaaaccaatttaccgaagataagccaaccttgaacttcttctatcagcaggtgaagtcggactatatgctcgaaatcgcggaccaggtcgatcaggaaatcgcattgaaattggggtgtctggagatccggcggtcttattgggagatgagaggaaatgctctggaaaaaaagagtaactacgaggtgttagagaaggatgtgggcctgaaaagattctttcccaaatcgctgctggactcagtcaaggccaagaccttgcggaaattgattcagcaaacattccgacagttcgcaaatttgaatcgggaggagagtattttgaaattttttgaaatactgagtccagtctaccggtttgacaaggagtgctttaaatgtgccttaggctctagctggatcatcagtgttgaactcgcgattggtccggaagaaggtatatcttacctgacggataagggctgcaaccctactcacctggccgactttactcaggtacagactattcagtacagcaacagcgaggataaggatagaaagggaatgctgcagctgaagattgccggggccccagagcctctgaccgtcactgctccctctctaaccattgcagagaatatggctgacctgatcgatggttactgcagactagttaatgggacctcacagtctttcataattcggcctcagaaggaaggggagcgggcattgccatccatccccaagctcgcaaattccgagaaacaaggcatgcgtacgcatgcagttagtgtgtctgaaaccgatgattatgccgaaattatcgacgaggaggacacatacaccatgccatctactcgagattacgagattcagcgggagcgcatcgagttgggccgctgcatcggggaagggcagttcggagacgtgcaccagggaatttacatgtcgccagagaatccagcattggctgtggctatcaaaacatgtaaaaattgtacatccgattccgtcagggaaaaatttctccaggaagcccttacaatgcgccagtttgaccacccacatatcgttaagctgattggtgtcatcaccgaaaaccctgtgtggataattatggaactgtgtaccttaggcgaactgagatcgtttctccaagtgaggaagtatagcctggacctggctagtcttatactttacgcatatcagttgagcacagccctggcatacctagagtccaaacgttttgtgcatagggacatcgccgctagaaatgttttggtcagttctaacgattgcgtgaaactgggagactttggcctgtcacggtacatggaggactcaacatactataaggccagcaaagggaaattacccatcaagtggatggcaccagagagcataaactttcggagattcaccagcgcaagcgacgtttggatgtttggcgtatgcatgtgggaaatcctgatgcatggtgtgaagccttttcagggcgtcaagaacaacgatgtgattggcagaattgagaacggcgagcggctaccaatgccccctaactgcccacccacactgtactccctaatgactaagtgctgggcgtatgatccaagtagaagacctcggtttacggaactgaaggcgcagctgtcgacaatcctagaagaagagaaggcccagcaggaagagaggatgaggatggagtcccggcggcaggctacagtgtcctgggattcagggggtagtgatgaagctcctcctaagccgtctagacctgggtatcccagccctcggtcctctgaagggttttatccgtcaccacaacacatggtgcaaaccaatcactaccaggatagcactgtgctggacctcaggggcatcgggcaggtgctgcccacgcacttgatggaagagcgcttgattcgacaacagcaggaaatggaagaggaccagcgatggctggaaaaggaggagcgcttcctgaagccggatgtgcggttaagccgaggctctatcgaccgcgaggacggcagtttgcagggcccaatcgggaaccagcacatataccagccagtgggcaagcctgacccagccgccccccccaagaaacctccccgccccggtgcaccgggccatctgggcagcctggcaagtttgtcatcgcctgccgacagctacaacgagggggtcaaattacagccgcaagaaatttccccgcctcccacagccaacttggacaggtcaaacgacaaagtctatgagaacgtcaccggcttggtaaaggcagtcatcgagatgagttctaagatccagcctgctccaccggaggaatacgttcccatggtcaaagaggtcggcttggcccttagaacactgttggccaccgtggatgagaccatacctctgctacccgcgtctacccaccgggaaattgagatggcccaaaagctgttgaacagtgacctcggcgaactgataaacaagatgaaactggcccaacaatacgttatgacaagcctgcaacaggagtataagaagcagatgcttaccgccgcccatgcgctcgctgtggatgccaagaatctgctggacgtaatcgaccaggccaggcttaaaatgctggggcagactcgccctcactag

SEQ ID NO: 157837 - DNA, 3159 bp, Artificial Sequence
  derived and/or modified sequence
atggcagccgcctacctggatccaaatctaaaccatacgccaaatagcagcaccaagactcacctcggaaccgggatggagcggagcccaggcgcaatggagagagttctaaaggtgtttcactacttcgagtccaacagcgaacccactacctgggcatcaattatcaggcatggcgacgccaccgacgttcgcggaataatacaaaaaatcgtggactcacataaggtgaaacatgttgcatgttacggttttagattgtcccacctcaggtcagaggaggtgcattggctgcacgttgatatgggggtctcctccgtcagggagaaatacgaattggctcatcctcccgaggagtggaaatacgaactgcggatccgatacttgcccaagggattcctaaaccagtttaccgaagacaagcctacacttaacttcttctaccagcaggtgaaaagcgactacatgcttgagatcgccgaccaagtagatcaagagatagccctcaaactgggatgcttggaaataaggagaagctattgggaaatgcgggggaatgccctggagaaaaaaagtaactacgaggtgctcgaaaaggacgtaggtcttaaacgcttcttccccaagtctctccttgacagtgtcaaagctaagaccctgcggaagctgatccagcagacatttcgccagttcgccaatctgaaccgagaggagtccatactgaagtttttcgagatactcagccccgtttataggtttgacaaagaatgctttaaatgtgcactggggtcctcatggatcatctctgtggaactggcaatcggtccagaggaaggcatatcctatttaacagacaaggggtgcaatcctacacatctcgcagactttactcaggtccagaccatccagtattcaaatagtgaggataaggatcggaaaggcatgctacagctgaaaattgcaggtgcaccagaaccacttactgtaacagcgccaagtctgactatagccgaaaatatggctgaccttattgacgggtactgtcggctggtgaatggaactagccagtcttttatcattcggccccagaaggagggagagagggctctcccttcaattcctaagctggcaaattctgagaagcagggaatgaggacccacgcggtgagtgtaagcgaaactgacgactatgctgaaattattgatgaagaggacacttacaccatgccgagtactcgagattacgaaatccagcgagaacgaatcgagctgggacgctgcattggggaggggcagtttggggacgttcaccagggcatatacatgtctccggaaaatcccgctctggcagttgcaattaaaacatgtaaaaactgcactagtgatagcgttagagaaaagtttctccaggaggcactgaccatgaggcaattcgaccacccccacattgtcaaacttatcggagtgattaccgaaaatcccgtctggatcatcatggaactctgcacactgggcgaactccgcagctttctccaggttcgaaaatatagcctggacctggcgtcgctgattctttatgcttaccagctctctacggcccttgcctatctggagagcaagcggttcgtgcatcgggacatagccgctcgcaacgtgcttgtctcatccaatgactgtgttaagctgggcgatttcggcctgtctagatacatggaggacagcacttattacaaggccagcaagggcaaattacccataaaatggatggctccagaatccatcaactttcggcggtttacttccgccagtgatgtgtggatgttcggcgtctgtatgtgggagattttgatgcacggtgttaagcccttccagggggtaaagaataacgatgtaatcggcaggatcgaaaatggcgaacgccttcctatgcctcctaattgcccgccaaccctttacagcctgatgacaaagtgctgggcttatgacccatctcggcgaccccggtttactgagctgaaggcccagctgtctactatcctggaagaggaaaaggcccagcaggaggagagaatgcgcatggagtcaagacggcaggcaaccgtctcatgggatagcggggggtcggatgaggcccccccaaagccatcgcggcccggctatccctcccctaggagtagcgagggtttttacccaagcccccagcacatggtccagacaaatcactaccaggtttctgggtatccggggagccatggtatcactgcaatggctggtagcatatatcccggccaggcttcattgttggatcagaccgactcatggaaccacaggccacaggaaatcgctatgtggcagcccaacgtcgaggatagtaccgtgctggacctgcgaggaatcgggcaagttctgcccactcacctgatggaggaaaggttgatacgccaacaacaggagatggaggaggaccagaggtggttggagaaggaagagcggttcttgaagcccgacgttcggctgtcgagaggatccattgaccgggaagacggctccctgcagggtccgattggaaaccagcacatctaccaacctgtgggaaagcctgatcctgccgccccccccaaaaagccgcctaggccaggtgccccaggacacttaggctcccttgctagtttatctagccctgccgacagctacaatgagggcgtaaaactccagcctcaggaaattagccccccacccacagccaatctcgataggagcaatgacaaagtatatgagaatgtaaccggcttggtcaaggccgtgattgagatgtcctcaaagattcagccagctccccctgaggagtacgtcccaatggtaaaggaggtcgggctggcattaaggactcttctggctacggtggacgaaaccatccccctgcttcccgcatctacccaccgagaaatcgagatggcccagaaactcctgaatagtgaccttggtgaactgatcaataagatgaagcttgcacagcagtacgttatgaccagcttacagcaagaatataagaagcagatgctaaccgcggcacacgcactcgcagtggacgccaaaaatctactggatgttatagatcaggcaaggctcaaaatgctgggccagacacggccccactag

SEQ ID NO: 157838 - DNA, 3159 bp, Artificial Sequence
  derived and/or modified sequence
atggcagccgcctatcttgacccaaacctcaaccacacacctaatagttccactaagacgcaccttggcaccggtatggagcgaagtccgggggccatggagcgcgttctgaaggtattccactattttgagagtaactcagaaccaaccacttgggcctcaatcattcggcatggcgatgcgaccgacgtgcgaggaatcattcagaagattgtggattcccacaaagttaagcacgtcgcatgctatgggttccgactcagtcatctccgatcagaggaggtgcattggcttcacgtggacatgggcgtgtcaagcgtccgggaaaagtacgaactcgcccaccccccggaggaatggaagtacgaactgagaatcagatacctgcccaaaggttttctcaatcagttcacggaagacaaacctactctgaacttcttctaccagcaggtcaaaagcgactatatgctcgaaattgcagaccaagttgaccaggagatcgccctgaagctgggctgtctcgagattagacgctcttactgggagatgagagggaatgcccttgagaaaaagtctaactacgaggttctggagaaagacgtgggcctgaaacggttttttcctaagtccttgttagactccgtgaaggccaagacgctcagaaaactcattcagcaaacgttccggcagttcgctaatctcaacagggaagagagcattctgaaattcttcgaaattcttagtccagtctacaggttcgacaaagagtgttttaagtgcgctctcggctcttcctggattatcagtgttgaattggcgatcggccccgaagaaggaatttcatatcttacagacaagggatgtaaccctactcatttagctgacttcacccaggtgcagaccattcagtacagcaactcagaagacaaggacagaaagggaatgctgcagcttaagatcgctggcgctcccgaaccgctgacagttaccgccccctccctgacaattgctgaaaatatggcagacctgatagacggatactgtaggctggttaacggaactagtcagtcttttattattaggccccagaaggagggtgaacgggcactgccaagcatccccaagctcgctaattcagaaaaacagggaatgagaacccacgcggtgtccgtgtctgagactgacgattatgccgaaattattgatgaggaagacacatacactatgccctccacacgtgactatgagattcagagagagcgcatcgagctcggcaggtgcattggcgaggggcaattcggggatgtgcatcaggggatttatatgtctcccgagaatcctgccctcgcagtggccatcaagacatgcaagaactgcacctcagattcagtgcgtgaaaagtttctccaggaggcccttaccatgagacagtttgatcatccccacatcgttaaattgatcggggttataactgagaaccctgtttggatcatcatggaactgtgcactcttggtgagctaaggagttttttacaggtcagaaagtactccctggaccttgcttcgctgatactttacgcataccagctctcgacagctctcgcctatttagagagcaagagattcgtccatcgggatattgccgcgagaaatgtccttgtctcaagtaatgattgtgtgaagctcggcgacttcgggctatcccggtatatggaagactctacatactataaagcctccaaaggcaaactccccatcaagtggatggccccggaaagtatcaattttagacggtttacatcggcttctgatgtttggatgttcggcgtgtgcatgtgggaaatactgatgcacggtgttaagccctttcagggcgtgaaaaacaatgacgtgattggccgcattgaaaatggtgagagactccccatgccccccaactgcccacctactctgtactccctgatgacaaaatgctgggcatacgatccatcccgccgccctcggtttaccgaattaaaagcccaactctctaccatattggaggaggagaaagcccagcaggaggagcgtatgcgaatggaatctcgtcgacaggcaacagtatcctgggacagcggcgggagcgacgaagctccaccaaagcccagcaggccgggatatccctctccccggtcctcagagggcttctacccatcacctcagcacatggtccagacaaaccactaccaggtgagtggatatccggggagtcatggaatcaccgctatggcaggatccatctaccctggtcaagcgagcctgctcgaccagactgactcctggaaccaccgtcctcaggaaatcgcaatgtggcagcccaacgtcgaagatagtaccgtgcttgacctccggggcatcgggcaagtgcttcctacccacctaatggaggagagactgatcagacagcaacaggagatggaggaggatcagaggtggctggagaaagaggaacgctttctgaagcccgatgtgcggctttctaggggtagcattgaccgggaagatgggtctctgcaaggcccaatcgggaaccagcacatctatcagcctgtgggcaaacccgatcctgccgcacctccaaagaaacctccccgaccgggcgccccgggacatctgggcagtctggcctctctgagctccccagccgactcttacaacgaaggcgtcaagctgcagccacaggagatcagcccgcctcctaccgcaaatctggacagaagcaatgacaaagtttatgaaaacgtaaccggattagtcaaagccgttatcgagatgtctagtaaaatccagccagcacctcctgaagaatacgtccccatggtaaaagaggtggggctcgctcttagaacccttcttgcaaccgtggatgagacgattcccctgctgcccgcctctacgcatcgtgagatcgagatggctcagaagctgctgaactccgacctgggagagctaattaataaaatgaagttagcacagcaatacgtcatgacaagcctgcagcaggaatataaaaaacaaatgcttaccgcagcccacgctctcgccgtcgacgccaagaatctgctggacgtgatagaccaggcacgcctgaaaatgttgggccagactaggccacactag

SEQ ID NO: 157839 - DNA, 3021 bp, Artificial Sequence
  derived and/or modified sequence
atggcagccgcctacttagatcccaacctgaatcacacacccaattctagtaccaagacccatctgggtaccggtatggagcgatcaccgggcgctatggaaagagtactgaaggtatttcactacttcgagagcaacagcgaaccaacgacctgggcctccatcatcagacacggcgatgctacagatgtgagaggaattatccagaagatcgtcgattcccacaaggtgaaacacgtggcctgctacgggttccggctctctcacctccgttctgaggaggtccactggcttcatgtggacatgggcgtgtcatctgtgagagagaagtacgaacttgcccatccaccagaggagtggaaatatgagcttagaattcggtacctccctaaaggattcctgaatcagttcacagaagataagcctaccctgaattttttctaccaacaggtgaagtcggattatatgctcgaaattgccgaccaagtggaccaggagatcgctttaaaactgggttgcctagaaattaggcgaagctactgggagatgagggggaatgcgttggaaaaaaagtccaactacgaagtgctggaaaaggacgttggcctcaaaaggtttttccctaaatctcttttggacagcgtcaaagccaagaccttaagaaaactgattcaacaaacattcaggcagttcgcaaacctaaaccgcgaagagtcaatcctgaagttttttgaaatactgagccctgtgtaccgctttgacaaagaatgtttcaagtgcgcactggggagttcttggatcattagcgtggagttggcgattggcccggaagagggaatttcctacctgaccgataagggctgtaaccctacacacctcgccgactttacccaggtgcaaactatccagtactctaatagcgaagacaaggaccgaaaggggatgctgcaactgaagattgccggagctcccgaacccctcaccgttactgctcccagccttactattgctgagaatatggccgatctgattgatggatattgtcgcctggtgaatgggaccagccaatccttcatcatccgtccccagaaggaaggcgagcgggctttaccgagcattcccaagctggccaattccgagaagcagggcatgcgtacccacgctgtctcagtatctgaaaccgacgattatgccgagatcatcgacgaagaagacacctatacaatgcctagcacacgggactacgagatccagagggagcgaatcgagttgggtcgatgcatcggtgagggacaatttggtgacgtgcaccagggcatctatatgtccccagagaatcccgccctcgctgtggctatcaagacttgtaagaattgtacatctgactctgtcagagaaaagttccttcaggaggctctaaccatgcgtcaatttgaccatccccacatcgttaagctcatcggcgtcattaccgagaaccccgtgtggatcatcatggaactgtgcactctcggagaacttagaagttttttgcaagtgcggaagtattcccttgaccttgcatcacttattttatacgcctatcagttgtctacagccctggcatacttagaatcaaaaaggtttgtccatagggatattgccgcccgtaacgtgttggtgagctcaaacgactgcgtcaaactgggagacttcgggctgagcagatatatggaggactcaacctactataaggcctccaagggaaaactgcccattaagtggatggccccagaaagcataaactttcggcgtttcacctccgcctccgatgtgtggatgtttggggtctgcatgtgggaaatcctgatgcatggagtcaagccattccagggggtgaaaaataacgatgtcatcggccgaatcgaaaacggggaaaggttgcctatgccacctaactgtcctcctaccctgtatagtcttatgacaaaatgttgggcttatgatccttcacgtagacctcggttcactgagctgaaagcacaactgtcaacgatcctcgaggaggaaaaggcacaacaagaggagcggatgaggatggaatcccgacgtcaggccactgtgtcatgggatagcggtggcagtgacgaagcccctcccaaaccttcccgccctggttacccctccccccggtccagcgaaggtttctatccctccccgcagcatatggttcagactaatcattatcaggatagtacagtccttgaccttagaggcattggacaggtcctacccactcacctcatggaggaacgtcttattcgccagcagcaggagatggaagaggaccagagatggctggagaaagaggagcgttttcttaagcccgacgtgaggctctccaggggcagtattgaccgggaggacggatcgctgcaaggacccattggcaatcagcacatctatcaacctgttggtaaacccgatcccgccgcccccccaaaaaaacccccaaggccaggcgcgcccggccatttgggctccctggcctctctctcctcacccgctgactcctataacgaaggggtgaagctgcaaccccaggaaataagtccaccgccaaccgctaaccttgacaggtctaatgacaaagtatacgaaaacgttaccggattggtaaaggcagtcatcgagatgagctcgaaaattcagcccgctcctcctgaagagtacgttccaatggtgaaagaggtcgggttagctttgaggaccctgttggctacggtcgacgaaaccattccactcctgcccgcctcaactcatagagagatcgagatggcacaaaaattgctcaatagcgaccttggcgaactgatcaacaagatgaaactcgcccagcagtacgtgatgacgtcactgcaacaagagtataagaagcagatgcttaccgctgctcacgcactggccgtggacgcgaagaatctgctggatgtcatcgatcaggcaaggctgaagatgctcgggcagaccagaccgcattag

SEQ ID NO: 157840 - DNA, 1662 bp, Artificial Sequence
  derived and/or modified sequence
agtgactacatgatcatcaagaagaagagcaactatgaggtgctggagaaggatgtgggcctgaagcgcttcttccccaagagcctgctggacagcgtgaaggccaagaccctgaggaagctgatccagcagaccttccggcagtttgccaacctgaaccgggaggagagcatcctgaagttctttgagatcctgagccctgtgtacagatttgacaaggagtgcttcaagtgtgccctgggcagctcctggatcatctctgtggagctggccatcggccctgaggagggcatctcctacctgacagacaagggctgcaaccccacccacctggccgacttcacccaggtgcagaccatccagtacagcaacagcgaggacaaggacaggaagggcatgctgcagctgaagattgctggggcccctgagcccctgactgtgacagcccccagcctgaccatcgccgagaacatggctgacctgattgatggctactgccgcctggtgaatggcaccagccagagcttcatcatccggccccagaaggagggggagcgggccctgcccagcatccccaagctggccaacagcgagaagcagggcatgaggacccatgctgtgtctgtgtctgaaacagatgattatgcagagatcattgatgaggaggacacctacaccatgcccagcacccgggactatgagatccagcgggagcgcatcgagctgggccgctgcatcggggagggccagtttggagatgtgcaccagggcatctacatgagcccagaaaatcctgccctggccgtggccatcaagacctgcaagaactgcaccagtgacagcgtgcgggagaagttcctgcaggaggcctgccactacaccagcctgcactggaactggtgccgctacatcagtgaccccaacgtggactgcccagaccccagaaatgctgaggtgaccatgaggcagtttgaccacccccacatcgtgaagctgattggagtcatcacagagaaccctgtgtggatcatcatggagctgtgcaccctgggggagctgcgctccttcctgcaggtgaggaagtacagcctggacctggccagcctcatcctgtatgcctaccagctgagcacagccctggcctacctggagagcaagagatttgtgcaccgggacattgctgccagaaatgtgctggtgagcagcaatgactgtgtgaagctgggggactttggcctgagccgctacatggaggacagcacctactacaaggccagcaagggcaagctgcccatcaagtggatggcccctgagagcatcaacttccgccgcttcaccagcgccagtgatgtgtggatgtttggagtgtgcatgtgggagatcctgatgcacggcgtgaagcccttccagggcgtgaagaacaatgatgtgattggaagaattgaaaatggagagcggctgcccatgccacccaactgcccccccaccctgtacagcctgatgaccaagtgctgggcctatgaccccagcagaagaccccgcttcacagagctgaaggcccagctgtccttccagaacccagcccagatgctgcctgccagcggccgcctgcccaaccagccctgcccagagcgggagaactacagctttgccaccttctag

SEQ ID NO: 157841 - DNA, 2043 bp, Artificial Sequence
  derived and/or modified sequence
atgaagtaccaggaggtgcgctgcctgaccagcttcaacatctctgtgtccttccctgctgagacagatgattatgcagagatcattgatgaggaggacacctacaccatgcccagcacccgggactatgagatccagcgggagcgcatcgagctgggccgctgcatcggggagggccagtttggagatgtgcaccagggcatctacatgagcccagaaaatcctgccctggccgtggccatcaagacctgcaagaactgcaccagtgacagcgtgcgggagaagttcctgcaggaggccctgaccatgaggcagtttgaccacccccacatcgtgaagctgattggagtcatcacagagaaccctgtgtggatcatcatggagctgtgcaccctgggggagctgcgctccttcctgcaggtgaggaagtacagcctggacctggccagcctcatcctgtatgcctaccagctgagcacagccctggcctacctggagagcaagagatttgtgcaccgggacattgctgccagaaatgtgctggtgagcagcaatgactgtgtgaagctgggggactttggcctgagccgctacatggaggacagcacctactacaaggccagcaagggcaagctgcccatcaagtggatggcccctgagagcatcaacttccgccgcttcaccagcgccagtgatgtgtggatgtttggagtgtgcatgtgggagatcctgatgcacggcgtgaagcccttccagggcgtgaagaacaatgatgtgattggaagaattgaaaatggagagcggctgcccatgccacccaactgcccccccaccctgtacagcctgatgaccaagtgctgggcctatgaccccagcagaagaccccgcttcacagagctgaaggcccagctgagcaccatcctggaggaggagaaggcccagcaggaggagaggatgaggatggagagccggcggcaggccaccgtgtcctgggacagcggcggcagtgatgaggccccacccaagcccagccggcccggctaccccagccccaggagcagcgagggcttctaccccagcccccagcacatggtgcagaccaaccactaccaggtgtctggctacccaggcagccacggcatcacagccatggccggcagcatctacccaggccaggccagcctgctggaccagacagacagctggaaccaccggccccaggagatcgccatgtggcagcccaacgtggaggacagcacagtgctggacctgcggggcatcggccaggtgctgcccacccacctgatggaggagcggctcatccggcagcagcaggagatggaggaggaccagcgctggctggagaaggaggagcgcttcctgaagccagatgtgcggctgagccggggcagcattgacagagaagatggcagcctgcagggccccatcggcaaccagcacatctaccagcctgtgggcaagccagaccctgctgccccacccaagaagccacccaggcctggggcccctggccacctgggcagcctggccagcctgagcagccctgctgacagctacaatgaaggagtgaagctgcagccccaggagatcagccccccacccacagccaacctggacaggagcaatgacaaggtgtatgaaaatgtgacaggcctggtgaaggccgtcatcgagatgagcagcaagatccagcctgcccctcctgaggagtatgtgcccatggtgaaggaggtgggcctggccctgcggaccctgctggccaccgtggatgagaccatccccctgctgcctgccagcacccaccgggagattgagatggcccagaagctgctgaacagcgacctgggggagctgatcaacaagatgaagctggcccagcagtatgtgatgaccagcctgcagcaggagtacaagaagcagatgctgacagctgcccacgccctggccgtggatgccaagaacctgctggatgtgattgaccaggcccggctgaagatgctgggccagacccggccccactag

SEQ ID NO: 157842 - DNA, 3054 bp, Artificial Sequence
  derived and/or modified sequence
tgatatgaccgctacctggccagcagcaagatcatggccgccgcctacctggaccccaacctgaaccacacccccaacagcagcaccaagacccacctgggcaccggcatggagaggagccctggggccatggagcgggtgctgaaggtgttccactactttgagagcaacagcgagcccaccacctgggccagcatcatcagacatggagatgccacagatgtgcggggcatcatccagaagatcgtggacagccacaaggtgaagcacgtggcctgctacggcttccggctgagccacctgcggtctgaggaggtgcactggctgcacgtggacatgggcgtgtcctctgtgcgggagaagtatgagctggcccaccccccagaggagtggaagtatgagctgcgcatccgctacctgcccaagggcttcctgaaccagttcacagaggacaagcccaccctgaacttcttctaccagcaggtgaagagtgactacatgctggagattgctgaccaggtggaccaggagatcgccctgaagctgggctgcctggagatccgccgcagctactgggagatgagaggaaatgccctggagaagaagagcaactatgaggtgctggagaaggatgtgggcctgaagcgcttcttccccaagagcctgctggacagcgtgaaggccaagaccctgaggaagctgatccagcagaccttccggcagtttgccaacctgaaccgggaggagagcatcctgaagttctttgagatcctgagccctgtgtacagatttgacaaggagtgcttcaagtgtgccctgggcagctcctggatcatctctgtggagctggccatcggccctgaggagggcatctcctacctgacagacaagggctgcaaccccacccacctggccgacttcacccaggtgcagaccatccagtacagcaacagcgaggacaaggacaggaagggcatgctgcagctgaagattgctggggcccctgagcccctgactgtgacagcccccagcctgaccatcgccgagaacatggctgacctgattgatggctactgccgcctggtgaatggcaccagccagagcttcatcatccggccccagaaggagggggagcgggccctgcccagcatccccaagctggccaacagcgagaagcagggcatgaggacccatgctgtgtctgtgtctgaaacagatgattatgcagagatcattgatgaggaggacacctacaccatgcccagcacccgggactatgagatccagcgggagagaattgagctgggccgctgcattggagagggccagtttggagatgtgcaccagggcatctacatgagccctgagaacccagccctggccgtggccatcaagacctgcaagaactgcaccagtgacagcgtgcgggagaagttcctgcaggaggccctgaccatgaggcagtttgaccacccccacatcgtgaagctgattggagtcatcacagaaaatcctgtgtggatcatcatggagctgtgcaccctgggggagctgcggagcttcctgcaggtgaggaagtacagcctggacctggccagcctcatcctgtatgcctaccagctgagcacagccctggcctacctggagagcaagagatttgtgcaccgggacattgctgccagaaatgtgctggtgagcagcaatgactgtgtgaagctgggggactttggcctgagccgctacatggaggacagcacctactacaaggccagcaagggcaagctgcccatcaagtggatggcccctgagagcatcaacttccgccgcttcaccagcgccagtgatgtgtggatgtttggagtgtgcatgtgggagatcctgatgcatggagtgaagcccttccagggcgtgaagaacaatgatgtgattggaagaattgaaaatggagagcggctgcccatgccacccaactgcccccccaccctgtacagcctgatgaccaagtgctgggcctatgaccccagccggcggccccgcttcacagagctgaaggcccagctgagcaccatcctggaggaggagaaggcccagcaggaggagaggatgaggatggagagccggcggcaggccaccgtgtcctgggacagcggcggcagtgatgaggccccacccaagcccagcaggcctggctaccccagccccaggagcagcgagggcttctaccccagcccccagcacatggtgcagaccaaccactaccaggacagcacagtgctggacctgcggggcatcggccaggtgctgcccacccacctgatggaggagcggctcatccggcagcagcaggagatggaggaggaccagcgctggctggagaaggaggagcgcttcctgaagccagatgtgcggctgagccggggcagcattgaccgggaggatggcagcctgcagggccccatcggcaaccagcacatctaccagcctgtgggcaagccagaccctgctgccccacccaagaagccacccaggcctggggcccctggccacctgggcagcctggccagcctgagcagccctgctgacagctacaatgaaggagtgaagctgcagccccaggagatcagccccccacccacagccaacctggacaggagcaatgacaaggtgtatgaaaatgtgacaggcctggtgaaggctgtgattgagatgagcagcaagatccagcctgcccctcctgaggagtatgtgcccatggtgaaggaggtgggcctggccctgcggaccctgctggccaccgtggatgagaccatccccctgctgcctgccagcacccaccgggagattgagatggcccagaagctgctgaacagcgacctgggggagctgatcaacaagatgaagctggcccagcagtatgtgatgaccagcctgcagcaggagtacaagaagcagatgctgacagctgcccacgccctggccgtggatgccaagaacctgctggatgtgattgaccaggcccggctgaagatgctgggccagacccggccccactag

SEQ ID NO: 157843 - DNA, 3159 bp, Artificial Sequence
  derived and/or modified sequence
atggctgctgcctacctggaccccaacctgaaccacacccccaacagcagcaccaagacccacctgggcaccggcatggagaggagccctggggccatggagcgggtgctgaaggtgttccactactttgagagcaacagcgagcccaccacctgggccagcatcatcagacatggagatgccacagatgtgcggggcatcatccagaagatcgtggacagccacaaggtgaagcacgtggcctgctacggcttccggctgagccacctgcggtctgaggaggtgcactggctgcacgtggacatgggcgtgtcctctgtgcgggagaagtatgagctggcccaccccccagaggagtggaagtatgagctgcgcatccgctacctgcccaagggcttcctgaaccagttcacagaggacaagcccaccctgaacttcttctaccagcaggtgaagagtgactacatgctggagattgctgaccaggtggaccaggagatcgccctgaagctgggctgcctggagatcagaagaagctactgggagatgagaggaaatgccctggagaagaagagcaactatgaggtgctggagaaggatgtgggcctgaagcgcttcttccccaagagcctgctggacagcgtgaaggccaagaccctgaggaagctgatccagcagaccttccggcagtttgccaacctgaaccgggaggagagcatcctgaagttctttgagatcctgagccctgtgtacagatttgacaaggagtgcttcaagtgtgccctgggcagctcctggatcatctctgtggagctggccatcggccctgaggagggcatctcctacctgacagacaagggctgcaaccccacccacctggccgacttcacccaggtgcagaccatccagtacagcaacagcgaggacaaggacaggaagggcatgctgcagctgaagattgctggggcccctgagcccctgactgtgacagcccccagcctgaccatcgccgagaacatggctgacctgattgatggctactgccgcctggtgaatggcaccagccagagcttcatcatccggccccagaaggagggggagcgggccctgcccagcatccccaagctggccaacagcgagaagcagggcatgaggacccatgctgtgtctgtgtctgaaacagatgattatgcagagatcattgatgaggaggacacctacaccatgcccagcacccgggactatgagatccagcgggagcgcatcgagctgggccgctgcatcggggagggccagtttggagatgtgcaccagggcatctacatgagcccagaaaatcctgccctggccgtggccatcaagacctgcaagaactgcaccagtgacagcgtgcgggagaagttcctgcaggaggccctgaccatgaggcagtttgaccacccccacatcgtgaagctgattggagtcatcacagagaaccctgtgtggatcatcatggagctgtgcaccctgggggagctgcgctccttcctgcaggtgaggaagtacagcctggacctggccagcctcatcctgtatgcctaccagctgagcacagccctggcctacctggagagcaagagatttgtgcaccgggacattgctgccagaaatgtgctggtgagcagcaatgactgtgtgaagctgggggactttggcctgagccgctacatggaggacagcacctactacaaggccagcaagggcaagctgcccatcaagtggatggcccctgagagcatcaacttccgccgcttcaccagcgccagtgatgtgtggatgtttggagtgtgcatgtgggagatcctgatgcacggcgtgaagcccttccagggcgtgaagaacaatgatgtgattggaagaattgaaaatggagagcggctgcccatgccacccaactgcccccccaccctgtacagcctgatgaccaagtgctgggcctatgaccccagcagaagaccccgcttcacagagctgaaggcccagctgagcaccatcctggaggaggagaaggcccagcaggaggagaggatgaggatggagagccggcggcaggccaccgtgtcctgggacagcggcggcagtgatgaggccccacccaagcccagccggcccggctaccccagccccaggagcagcgagggcttctaccccagcccccagcacatggtgcagaccaaccactaccaggtgtctggctacccaggcagccacggcatcacagccatggccggcagcatctacccaggccaggccagcctgctggaccagacagacagctggaaccaccggccccaggagatcgccatgtggcagcccaacgtggaggacagcacagtgctggacctgcggggcatcggccaggtgctgcccacccacctgatggaggagcggctcatccggcagcagcaggagatggaggaggaccagcgctggctggagaaggaggagcgcttcctgaagccagatgtgcggctgagccggggcagcattgacagagaagatggcagcctgcagggccccatcggcaaccagcacatctaccagcctgtgggcaagccagaccctgctgccccacccaagaagccacccaggcctggggcccctggccacctgggcagcctggccagcctgagcagccctgctgacagctacaatgaaggagtgaagctgcagccccaggagatcagccccccacccacagccaacctggacaggagcaatgacaaggtgtatgaaaatgtgacaggcctggtgaaggccgtcatcgagatgagcagcaagatccagcctgcccctcctgaggagtatgtgcccatggtgaaggaggtgggcctggccctgcggaccctgctggccaccgtggatgagaccatccccctgctgcctgccagcacccaccgggagattgagatggcccagaagctgctgaacagcgacctgggggagctgatcaacaagatgaagctggcccagcagtatgtgatgaccagcctgcagcaggagtacaagaagcagatgctgacagctgcccacgccctggccgtggatgccaagaacctgctggatgtgattgaccaggcccggctgaagatgctgggccagacccggccccactag

SEQ ID NO: 157844 - DNA, 3021 bp, Artificial Sequence
  derived and/or modified sequence
atggctgctgcctacctggaccccaacctgaaccacacccccaacagcagcaccaagacccacctgggcaccggcatggagaggagccctggggccatggagcgggtgctgaaggtgttccactactttgagagcaacagcgagcccaccacctgggccagcatcatcagacatggagatgccacagatgtgcggggcatcatccagaagatcgtggacagccacaaggtgaagcacgtggcctgctacggcttccggctgagccacctgcggtctgaggaggtgcactggctgcacgtggacatgggcgtgtcctctgtgcgggagaagtatgagctggcccaccccccagaggagtggaagtatgagctgcgcatccgctacctgcccaagggcttcctgaaccagttcacagaggacaagcccaccctgaacttcttctaccagcaggtgaagagtgactacatgctggagattgctgaccaggtggaccaggagatcgccctgaagctgggctgcctggagatcagaagaagctactgggagatgagaggaaatgccctggagaagaagagcaactatgaggtgctggagaaggatgtgggcctgaagcgcttcttccccaagagcctgctggacagcgtgaaggccaagaccctgaggaagctgatccagcagaccttccggcagtttgccaacctgaaccgggaggagagcatcctgaagttctttgagatcctgagccctgtgtacagatttgacaaggagtgcttcaagtgtgccctgggcagctcctggatcatctctgtggagctggccatcggccctgaggagggcatctcctacctgacagacaagggctgcaaccccacccacctggccgacttcacccaggtgcagaccatccagtacagcaacagcgaggacaaggacaggaagggcatgctgcagctgaagattgctggggcccctgagcccctgactgtgacagcccccagcctgaccatcgccgagaacatggctgacctgattgatggctactgccgcctggtgaatggcaccagccagagcttcatcatccggccccagaaggagggggagcgggccctgcccagcatccccaagctggccaacagcgagaagcagggcatgaggacccatgctgtgtctgtgtctgaaacagatgattatgcagagatcattgatgaggaggacacctacaccatgcccagcacccgggactatgagatccagcgggagcgcatcgagctgggccgctgcatcggggagggccagtttggagatgtgcaccagggcatctacatgagcccagaaaatcctgccctggccgtggccatcaagacctgcaagaactgcaccagtgacagcgtgcgggagaagttcctgcaggaggccctgaccatgaggcagtttgaccacccccacatcgtgaagctgattggagtcatcacagagaaccctgtgtggatcatcatggagctgtgcaccctgggggagctgcgctccttcctgcaggtgaggaagtacagcctggacctggccagcctcatcctgtatgcctaccagctgagcacagccctggcctacctggagagcaagagatttgtgcaccgggacattgctgccagaaatgtgctggtgagcagcaatgactgtgtgaagctgggggactttggcctgagccgctacatggaggacagcacctactacaaggccagcaagggcaagctgcccatcaagtggatggcccctgagagcatcaacttccgccgcttcaccagcgccagtgatgtgtggatgtttggagtgtgcatgtgggagatcctgatgcacggcgtgaagcccttccagggcgtgaagaacaatgatgtgattggaagaattgaaaatggagagcggctgcccatgccacccaactgcccccccaccctgtacagcctgatgaccaagtgctgggcctatgaccccagcagaagaccccgcttcacagagctgaaggcccagctgagcaccatcctggaggaggagaaggcccagcaggaggagaggatgaggatggagagccggcggcaggccaccgtgtcctgggacagcggcggcagtgatgaggccccacccaagcccagccggcccggctaccccagccccaggagcagcgagggcttctaccccagcccccagcacatggtgcagaccaaccactaccaggacagcacagtgctggacctgcggggcatcggccaggtgctgcccacccacctgatggaggagcggctcatccggcagcagcaggagatggaggaggaccagcgctggctggagaaggaggagcgcttcctgaagccagatgtgcggctgagccggggcagcattgacagagaagatggcagcctgcagggccccatcggcaaccagcacatctaccagcctgtgggcaagccagaccctgctgccccacccaagaagccacccaggcctggggcccctggccacctgggcagcctggccagcctgagcagccctgctgacagctacaatgaaggagtgaagctgcagccccaggagatcagccccccacccacagccaacctggacaggagcaatgacaaggtgtatgaaaatgtgacaggcctggtgaaggccgtcatcgagatgagcagcaagatccagcctgcccctcctgaggagtatgtgcccatggtgaaggaggtgggcctggccctgcggaccctgctggccaccgtggatgagaccatccccctgctgcctgccagcacccaccgggagattgagatggcccagaagctgctgaacagcgacctgggggagctgatcaacaagatgaagctggcccagcagtatgtgatgaccagcctgcagcaggagtacaagaagcagatgctgacagctgcccacgccctggccgtggatgccaagaacctgctggatgtgattgaccaggcccggctgaagatgctgggccagacccggccccactag

SEQ ID NO: 157845 - DNA, 1662 bp, Artificial Sequence
  derived and/or modified sequence
agcgactacatgatcatcaagaagaagagcaactacgaggtgctggaaaaggatgtgggcttgaaacggttttttcctaagtcactccttgactctgtgaaggccaagacactgcgaaaattgatacagcagactttcagacagttcgcaaacctgaaccgggaggaatccatcctcaagttcttcgagatcctgtctcctgtatatcggtttgacaaagagtgtttcaaatgcgccctgggaagctcttggatcatctcggttgagctggcgatcgggcccgaggaagggatctcttatctcacagataaaggctgcaatccaacccacctcgccgatttcacacaagtccagaccatccagtattccaactctgaggacaaggacagaaaaggcatgctgcagcttaaaatagccggggcccctgaaccgctcactgtgaccgctccatccctgacaatcgctgaaaatatggctgatctgatcgatgggtactgtcgtctggtcaacggaacctcgcagtctttcatcatccggccgcagaaggaaggtgaacgtgcactgccatccattcctaagcttgcaaattcggagaagcagggcatgcgaacacacgcggtgtctgtgtcagaaacagacgattacgctgaaattattgatgaggaggacacctatacaatgccctcaacacgcgattacgagatacagcgcgagcgaatcgaactggggcgttgtatcggcgaggggcaatttggtgacgttcatcagggaatctatatgagtccagaaaatcccgctctggctgtggcgattaagacttgtaagaactgcacgagtgacagcgtcagggagaagtttctgcaagaggcgtgccattacacctcactgcactggaattggtgtcggtatatttcagacccaaatgtggattgtcctgatccccggaatgccgaagtcaccatgagacagtttgatcaccctcatattgtaaaactgattggagtcattacggagaatcccgtgtggataataatggagctctgtactctcggggagcttagatcgtttttacaggtgagaaaatattctctggacctcgcctctttaatcctttacgcctaccagctcagcactgctttggcttacctggagtcgaaaagattcgtgcaccgggatatcgctgctcgcaatgtgctggtgtctagtaatgactgcgtaaaactcggtgattttggcctatccagatacatggaagatagtacatactataaggcctctaaagggaagctgcccatcaagtggatggcccccgagagtatcaactttcggaggttcacctccgcctccgacgtttggatgttcggcgtttgtatgtgggagattctgatgcatggagtaaaaccatttcagggggtgaaaaataacgacgtcatcggtcggattgagaacggggagaggctgcccatgccaccaaactgccctcccacgctgtactctctcatgacaaagtgctgggcttatgacccaagtcgccgccctcggtttaccgaactcaaggctcaactgtccttccagaatcccgcccagatgcttcccgcatccggccggctgccaaatcagccctgccccgaacgcgaaaactactcttttgcaacattctag

SEQ ID NO: 157846 - DNA, 2043 bp, Artificial Sequence
  derived and/or modified sequence
atgaagtaccaggaggtgcggtgcctgaccagcttcaacatcagcgtctcatttccagcggagaccgacgattatgctgaaattattgacgaggaggatacctatacgatgcctagtacacgtgactatgagattcagcgagagaggatcgagctcggtcgatgcataggcgaaggacagttcggtgacgtgcaccaggggatctatatgagtcctgagaatccggcgctggctgtcgccatcaagacatgtaaaaactgcacaagcgattcagtgagagaaaagtttctgcaggaggctcttacaatgcggcaatttgaccacccacacatagtcaagctgataggggtgatcacagagaatcccgtatggataattatggagctgtgtactcttggcgaattgcgctcatttctccaagttcgcaaatacagcctggacctcgcctccctcattttatatgcctaccagctgagtacagcactggcttacctcgagtccaaacgctttgtccacagggatattgctgcgcggaacgtactcgtatcctcaaatgactgcgttaaactgggagattttggtctgagtcgctacatggaagacagcacctattacaaagcctcaaagggaaaattgcccattaagtggatggctcctgagagtattaattttcgtagatttacttctgcatcagacgtgtggatgtttggcgtttgcatgtgggaaatactcatgcacggcgtcaaaccattccagggagtcaagaacaatgacgtgattggccgcattgaaaacggcgaaagacttccaatgccccccaactgtccccctacattgtactccttgatgaccaaatgttgggcctatgacccttcccgacgcccaagattcacagaattaaaggctcagctttccacaattctggaggaagagaaggcccagcaggaagaaaggatgcgcatggagtcccgcagacaggccaccgtgagttgggactctggcgggtctgatgaggctcccccaaaaccctcccgcccagggtatccttctcccagaagctctgagggcttttatccgtcccctcagcacatggtgcagacaaatcactaccaggtgtccggttatcctggaagtcatggtataacagcaatggccggttcaatttatcccggacaggcctcgttgctagaccagaccgatagctggaatcacaggcctcaagagatcgcaatgtggcagcctaatgtggaggattcaacagtgttagacctcaggggcattggccaggtccttcccacacacctgatggaggagcggttgatacggcagcagcaggaaatggaagaggatcagcgctggttggaaaaggaggagagatttcttaagcctgacgtgagactgtcacgaggatccatcgacagagaggatggaagcctgcaggggcccatcggtaaccagcacatttatcagcccgtgggaaaaccagaccccgccgcccccccgaagaagcctccaagacctggtgctcccgggcaccttgggtcactggcctccttgagcagtccagcggatagctataatgagggtgtgaagctgcaacctcaggagatttccccgcccccgacggccaacctcgatcgctccaatgacaaggtgtacgaaaatgtcacgggacttgtcaaagccgtcattgagatgagttctaaaatccaaccagcgcctcctgaggagtatgtgcccatggttaaggaggtgggcctggccctgaggacattacttgctactgttgacgagacaataccgttattgccagcctccacccaccgggagattgaaatggcccagaaacttctaaactcagatctgggcgagctgattaataaaatgaagcttgcacagcaatacgtgatgacatctctgcagcaagagtataaaaagcaaatgcttacagcagctcatgccttggccgtggatgctaaaaaccttctcgatgtcatcgaccaggccaggctgaagatgctcggccagacacgcccacattag

SEQ ID NO: 157847 - DNA, 3054 bp, Artificial Sequence
  derived and/or modified sequence
tgatacgaccggtacctggccagcagcaagatcatggccgccgcctatctggatcccaatttaaaccatactcctaactcttcaactaagacgcatttggggacgggcatggagaggtcaccgggggctatggaacgggtgttgaaggtattccattactttgagtctaattccgagcctaccacatgggcctctatcatccgccacggtgatgctacggacgtgcgagggataatccagaaaatcgtagactcacataaggtaaagcacgtagcttgttacggcttccgtctctcccatctgcggagcgaagaagtgcactggctccacgtcgatatgggagtcagttctgtaagggaaaagtacgaactggctcacccccctgaagagtggaaatacgagctccgaattagatatctacctaaggggtttctcaaccagtttactgaggacaagcccacacttaacttcttttatcagcaggtgaaaagcgactacatgcttgaaatcgccgaccaggtggatcaggagatcgctctcaaactcggctgtcttgaaatacgccgctcctattgggaaatgcgaggtaatgccctcgagaaaaagtccaattacgaagttctggagaaagacgtagggctcaagagattctttcctaaatctctgctggattctgtcaaggcaaagaccttgcgtaagctcatccagcagactttccggcagtttgccaatctcaacagagaggagtccatccttaaattcttcgaaatcctgagcccagtgtaccgtttcgacaaagaatgttttaagtgtgcccttgggagtagctggatcatctcagtggaattagctattggtccagaagaggggatttcctatctgaccgacaaaggctgcaacccgacccacctcgccgattttactcaagtgcaaactatacagtattccaatagtgaagacaaggaccggaagggaatgcttcaattaaaaatcgcaggggcacccgaaccactgacagttaccgccccttccctaacaatcgcagagaacatggcagatctcatagacggatactgtaggcttgtgaatggaacaagccaaagcttcatcatacggccccagaaggaaggtgaacgggccttgccaagcatacccaaattggctaacagcgaaaagcaggggatgcgaactcacgctgttagcgttagtgaaacagacgactatgccgagatcatcgacgaagaggacacttataccatgccaagcactagggactacgagatccagcgtgaacgcatcgaattgggccgttgtatcggtgaaggacaatttggggatgtgcaccagggaatctatatgagtcctgagaaccctgccttggccgtcgccatcaaaacttgtaagaattgtaccagcgattccgtccgcgagaaatttctacaggaggcactcacaatgaggcaatttgatcacccacacattgtgaagcttatcggcgtaataactgagaaccctgtttggattattatggagctttgtaccctaggcgagctacgcagtttccttcaagtccgaaagtattcacttgacctggccagtctgatcctttacgcttaccaactgtcaactgctctagcttacctggagagcaaaagattcgtgcacagggacattgcagcgcgtaatgtgttagtgtcttctaatgattgtgtcaagctgggcgattttgggttgtctcgatacatggaggattcaacttactacaaagcctctaaaggcaagctgcccatcaagtggatggcccctgagtcaataaacttcaggagattcactagtgcatccgatgtgtggatgttcggggtatgtatgtgggagattctgatgcacggagttaaaccattccagggagttaagaacaacgatgttatcggtcgcatcgaaaacggggagcggcttccaatgccccctaactgtccccctactctgtattctcttatgacaaagtgttgggcctatgacccaagtcgccgacccaggtttactgagctgaaggcccagctgagcactatcttagaagaagaaaaggcccagcaggaagagaggatgagaatggaaagtcgtagacaggccactgtcagctgggattctggcgggtcagatgaggccccccccaaacctagccgacccgggtatccaagtccacgctcctcggagggcttttaccctagcccacagcacatggtccagacaaatcactaccaagacagcaccgttctagacctgcgcggaataggccaagtgctgcctactcacctcatggaggagcgcctgatacgccagcaacaggagatggaggaagaccaacgctggcttgaaaaagaggagagattcctgaagcctgacgttcgtctatcccggggatctatcgaccgggaagacggctccctccagggcccgattgggaaccaacatatttaccagcccgtcgggaagcccgatccggctgcaccacccaagaagccccccagaccaggagctcctggacacctggggtcactggcatccctgagttcacctgctgactcttacaatgagggtgtgaagcttcaaccgcaagaaatatcacctccacctacagccaatcttgatcgcagcaacgataaggtctacgagaatgtgacaggcctggttaaggccgtcatcgagatgagcagtaagatccagcctgctcctccagaggaatatgtacccatggtcaaagaagttgggctagcattgagaaccttgctcgccacagtggacgagaccatccccttgctgcccgcttcaacccatagagagattgaaatggcccagaagttactcaacagtgacctgggcgaactcattaacaagatgaagttagctcagcaatatgttatgacctccctacagcaggagtacaaaaagcagatgcttacggcggcccacgcccttgcagtcgacgccaagaacctgttggatgtgattgatcaggctagactgaagatgctcgggcagactaggccgcactag

SEQ ID NO: 157848 - DNA, 3159 bp, Artificial Sequence
  derived and/or modified sequence
atggccgccgcctacctggaccccaacctgaaccacacccccaactccagcacaaagacccatcttggcactggaatggaacggtctcctggggctatggaacgggtgctcaaggtgttccattacttcgagtcaaatagtgaaccaacaacatgggcttctataatcagacatggggacgctacggacgtacgggggatcatacaaaaaatcgttgatagccataaagtgaaacacgtggcgtgctatgggtttcgcttgagccacctccgctctgaagaagtgcattggctccatgtggatatgggcgtgagcagtgtgagggagaagtacgaactggcgcatcctccagaggaatggaagtacgagctccgcatccggtatctgcccaagggctttttgaaccagttcactgaagataagcccacactcaattttttttatcagcaagttaaatccgattatatgctggagattgcagatcaagtcgaccaggaaatcgctttgaagctgggatgtttggaaatccgtaggtcatactgggaaatgaggggtaatgccttagagaagaagagcaactatgaggtcctcgaaaaagacgtaggcctcaagaggttctttccaaagtcgctgttagattctgtgaaggccaagactctgaggaaattaatacaacagacatttcggcagtttgcaaacctcaatcgggaagagtccatattgaaattcttcgaaatcctgagccctgtctaccgctttgataaggaatgtttcaagtgtgcactcgggtctagttggatcattagcgttgagctggcaattggtcccgaggaagggattagttaccttacggacaagggttgtaacccgacacacttggctgatttcacccaggtccagactatacagtactcgaacagtgaagataaggataggaaagggatgttgcaactgaagatcgccggggctcctgaaccgctgacagtaacagccccttcactcaccattgccgagaacatggctgacctgatcgacggttattgccggctggttaacgggacttcccagagttttataataagaccgcagaaggaaggagaaagggctctgccgtccattcccaagttggccaacagtgagaaacagggcatgcgcacacatgccgttagtgtgtccgaaaccgacgactatgccgaaattattgatgaggaggatacctacaccatgccctccactcgggattatgagattcagagggagagaatcgaactgggcaggtgcattggggagggacagtttggagacgtgcatcaggggatctacatgtctccagagaaccccgcactcgcagtcgccattaaaacctgcaagaactgtacatctgactccgttagagaaaaatttcttcaggaggctctgactatgagacagtttgatcaccctcatatagtgaagctcatcggagtcatcacggaaaatcctgtgtggatcattatggagttatgtactctgggcgagctgaggtcttttctgcaggtacgcaaatacagtcttgacctggcctcactgatactctacgcttaccagcttagcacagcactggcctaccttgagtctaagagattcgttcaccgtgatattgctgcacggaacgtgctggtttcaagcaacgattgtgtaaaactgggcgattttggcctgtctcgttacatggaggatagcacttactacaaggcctccaaaggcaaacttcccatcaagtggatggcccctgaatctatcaattttagacggtttacctctgcaagcgacgtctggatgttcggcgtctgtatgtgggaaatcctgatgcacggcgttaaacccttccagggtgtgaagaataacgatgtgattgggcgcatcgaaaacggcgaaaggctccctatgccacccaactgcccacccaccctgtatagtctcatgaccaagtgttgggcttatgacccctccaggcgtcctcgttttaccgagctgaaggctcagctgtccaccattctggaggaggaaaaggcacagcaggaagagcgtatgcgcatggaatcccgtagacaggcaaccgtgtcctgggattcaggcgggtcggatgaagctccgccgaaacccagcagacctggctatccttcaccacgatcatccgaaggattctaccctagtccacagcacatggttcagacgaatcactaccaagtgagcggttaccccggttctcatggcatcacagccatggccggctcaatctaccccggtcaggcatccctgctggaccagacagattcatggaatcaccggccccaggagattgcgatgtggcagcccaacgtcgaagatagtacagtgcttgaccttcgcgggattgggcaggttctccctactcacctgatggaggaacgactcatcagacagcagcaggagatggaggaagatcaacgttggttagagaaggaggaacgatttctcaaacctgatgttcggctgtctcggggctctatcgacagggaagacgggtccttgcagggaccgatcggcaaccaacacatctaccaacctgttggaaaaccagatccggccgcccctccaaaaaaacctcctagaccaggggcccccgggcatttgggcagccttgcctcactgagtagcccggctgacagctacaacgaaggagtcaagctgcaaccacaggagatctcacctccccctactgccaacctggaccgaagtaatgacaaagtgtacgaaaacgtaactggtctggtgaaagctgtgatagagatgagcagcaaaatccagcccgcccctcccgaagagtacgtgcccatggtaaaagaagtagggctcgccctcaggaccctcctggcaaccgtggatgagacaatccctctcttgcctgcaagtacccaccgggagattgagatggcgcagaaattgcttaactccgaccttggggagttgatcaacaaaatgaagctggcgcaacagtatgtgatgacttcccttcagcaagaatataaaaagcagatgctgactgctgctcacgcactcgctgtcgacgctaaaaacctgcttgatgtgattgaccaggcgaggctcaaaatgctgggccaaacccgaccccactag

SEQ ID NO: 157849 - DNA, 3159 bp, Artificial Sequence
  derived and/or modified sequence
atggccgccgcctacctggaccccaacctgaaccacacccccaacagcagcacaaagacgcatctcggtaccggcatggagcgatcaccgggagctatggaacgagtactcaaagtcttccactactttgaatctaatagtgaacctacaacgtgggctagcatcatccggcatggggacgccacagatgtgcgcggtataatccagaagattgtggatagccacaaagtgaagcatgttgcttgctatggatttaggctttctcacctgaggtcggaagaggtgcactggcttcacgtggacatgggggtatcttccgtgcgggaaaaatatgagctggcccatccgcccgaggaatggaaatatgaattgcgaattaggtacctgcctaaaggctttctgaaccagtttaccgaagacaaacctaccctcaacttcttctaccaacaggtaaagtccgactatatgctggaaatcgctgatcaggtggaccaggagatcgcgctgaagctggggtgccttgaaattagacgaagctattgggaaatgcgaggcaatgccctggagaaaaaaagtaactatgaagtgctggaaaaagacgttggattgaaacggtttttccccaaatctctcctggattcggtcaaggctaaaacgttacggaaactgatccagcagacctttcgtcagtttgctaacctgaatagggaggagtctattctgaaatttttcgagattctgagtcctgtttaccgatttgacaaagaatgtttcaagtgcgcattagggtctagctggatcatcagcgtcgagctggctataggacctgaggaaggcattagttatctgactgataaaggttgcaaccccacccacttggccgactttacgcaggtccagacaattcagtactctaattccgaggataaagataggaaaggaatgctacagctgaaaatcgcaggggcaccagagcccttgacagtgactgcacccagcctgactatcgctgaaaatatggctgatctgatcgacggatactgccgactggtaaacggcacaagccaatcctttatcatccgcccccaaaaggagggtgaacgcgccctgccgtccatccccaaactggcaaattcagaaaagcaggggatgcgcacgcatgccgtctccgtgtctgagaccgacgactacgccgagattattgacgaggaagacacttatacaatgcctagcactcgggattatgaaattcagcgcgaacgcatcgaattaggccgctgtattggcgaaggacagttcggagacgtgcaccagggcatttacatgtcgcctgaaaatccggcactggctgttgctatcaagacatgcaagaattgcacatcagactctgtgcgcgaaaaatttctgcaggaggcattaaccatgagacagttcgatcacccccatatagtgaagttgatcggagttatcaccgagaatcccgtgtggattatcatggagctgtgcactctgggcgaactccgaagttttctccaggtcagaaagtattctctcgacctcgcgagcttgattctatatgcgtatcagctgagcactgctctggcttacctggagtctaagcgattcgttcatcgagatattgccgccaggaacgtgctcgtttcctctaatgactgtgtaaagttgggagatttcggtcttagtcgttacatggaggattccacttattataaagcctccaagggtaaattgcccatcaagtggatggcccctgagagcatcaacttccgtcgctttactagcgctagcgacgtctggatgttcggtgtgtgcatgtgggagatcctgatgcacggcgtcaagccttttcaaggtgttaagaacaacgatgtcatcggccggatcgaaaacggcgagcgactgccaatgccccctaattgccctcctacattatattctcttatgactaagtgttgggcctacgacccaagcagacggcctcgcttcaccgagctcaaggctcagctgagcacgattctcgaagaggagaaggcccagcaggaagagaggatgagaatggaatcccggcgccaggctacagtcagctgggatagtgggggctccgatgaggccccccctaagccaagtcggccgggatatcctagcccaagatcttctgagggtttttacccaagtccacaacacatggtgcagacaaatcactatcaagtgtctggctaccccggtagccacgggattactgctatggcgggatcaatctatcctggtcaggcgagcctcctggaccagaccgattcttggaaccacagaccacaggagatagctatgtggcagcctaacgtggaggacagtacagtgctcgatcttaggggtatcggacaggttctccctacccatctgatggaggagcgccttataaggcaacagcaggagatggaggaggatcagcgctggttagagaaggaagagcgcttcctcaagccagacgtgcgcctttctaggggctcaattgaccgggaagacggctctttacagggtcctatcggcaaccagcacatttatcaaccagttgggaagcccgaccccgcagcgccacctaaaaagcctccaagacctggtgctcccgggcaccttggatctctggccagcctttcgagccccgctgacagttacaatgaaggggttaaactccaacctcaggaaatcagtccacctcccaccgctaaccttgataggagcaatgacaaggtatacgaaaatgtgacaggtctggtaaaagcagtaatagaaatgagttccaagatccagcccgctccccctgaggaatacgtccccatggtcaaggaggtggggttggctctgaggacactcctagctacagttgatgaaacaatccctttactgcctgcttccacacaccgcgagatcgaaatggcacagaagttgctgaattctgatctgggagagctgatcaataaaatgaagctggctcagcaatatgtgatgacctctctgcagcaggaatataaaaaacaaatgctcactgctgctcacgctctggctgttgatgccaagaatttactcgacgtgatcgaccaggcgcgcctgaaaatgctgggccagacccgtccacactag

SEQ ID NO: 157850 - DNA, 3021 bp, Artificial Sequence
  derived and/or modified sequence
atggccgccgcctacctggaccccaacctgaaccacacccccaacagttctactaaaacccacttaggtaccggcatggaacggtcccccggggcgatggaacgtgtactgaaagtcttccactatttcgaatctaacagcgagccaacaacttgggccagcatcatcaggcatggcgacgcaactgatgtccgtggaatcattcaaaaaattgtggactctcacaaagtcaagcatgtggcgtgttatggatttcggctgtcccatctcagaagtgaggaggtccactggctgcacgtggatatgggagtttcaagcgtgagggagaaatatgagttggctcacccaccagaggagtggaagtacgagctgaggataaggtacttaccaaaaggcttcctgaatcagttcacagaggataaacctactcttaattttttttaccagcaggtgaagtccgattatatgcttgaaatcgctgatcaggtggaccaagaaattgccctgaagctcggttgtttagagatccggcggtcctattgggaaatgaggggcaacgcactggaaaaaaagtctaattatgaggtacttgaaaaggacgtgggcctcaagcgattctttcccaaatctctactcgattctgttaaagctaagacccttcgaaagctgatccagcagacatttcgtcagtttgcaaacttaaacagggaggaaagtatcttgaaattttttgaaatcctcagtccagtctatcggttcgacaaggagtgttttaagtgtgccctcggaagctcttggattatctcagtcgaactggccatcggaccagaggaaggaatttcttacctgaccgataagggctgtaatcccacacacctggccgactttactcaggtgcaaactattcagtacagtaatagcgaagataaagaccgcaagggcatgctgcaactgaaaattgctggcgccccggagcctctgacggtgaccgccccctcccttacgattgctgagaacatggctgatttgatagacggatactgtaggctggttaacggcactagtcagagcttcattatccggccacagaaagagggagagcgagcactacccagcataccaaaattagctaactccgagaagcaaggcatgcgcacccatgccgtgagcgtttccgaaaccgacgactatgcagagatcattgacgaggaagatacgtacaccatgccttccacgcgtgattacgagatccagcgtgaacggatagagcttgggcgatgcattggagaagggcaatttggggacgtgcaccagggcatctatatgtccccagagaaccccgccctggccgttgccattaaaacatgcaaaaactgtacgtcagacagcgttagggaaaaattcctccaggaggctctcaccatgaggcagtttgatcaccctcacattgtgaagttaatcggagtgataactgaaaatcccgtgtggatcataatggagctgtgtactttgggcgaattgaggtcttttttacaggtgaggaagtactccctcgacctcgcctcactaatcctatatgcttaccagctctccaccgccctcgcctacttagaatccaagagatttgtgcaccgcgatatagccgcccgcaacgtcttagtcagttccaacgattgcgtcaaactgggcgactttgggttaagtcgctatatggaggattcaacctattacaaggccagtaaaggtaagttgcctatcaagtggatggcccccgaaagcatcaatttcaggagatttaccagcgcctccgacgtctggatgttcggcgtgtgcatgtgggaaattcttatgcacggggtcaagccattccagggcgttaagaacaacgatgtaatagggcgtatagagaatggcgagcgactacccatgccgcccaattgccccccgaccttatatagccttatgactaaatgctgggcttatgacccctcacgccgccccagattcacagaactgaaagcacagctgtctaccatcctagaggaggaaaaagcccagcaggaggagcgcatgcgcatggagtctagacgacaggccacagtgtcttgggactctgggggctccgacgaggctcccccaaaaccgtcacgacctggttatccctctcctaggtcctctgaggggttctatccttctccacagcacatggtccaaactaatcactatcaggatagcactgtgttggatctgagaggaattggacaggtactgcccacccacctcatggaagaaagactgatccgccagcagcaagagatggaagaagatcagaggtggcttgaaaaagaagagcgctttctcaaacccgacgtacggctttctagaggatccatcgaccgggaggatggctctttgcaaggtcccatcgggaatcagcacatataccagcccgtaggaaagccggaccctgccgccccgcccaaaaaaccgccacggcccggtgccccagggcatctaggctctctggcttctctgtcctcccccgccgactcatataacgagggagtgaagttgcaaccacaggaaatcagcccccctcccacagcgaatctggatcgcagcaatgacaaggtgtatgaaaacgtgactggcctggtgaaggctgtgattgagatgagttccaaaatccagcccgcccccccagaggaatacgttccaatggtcaaggaggtgggtcttgccctccgtactctcttggctactgtggacgagaccattcctttgctgcctgcaagtacacaccgcgagattgagatggcgcaaaaactcctaaattctgatcttggagaacttatcaacaagatgaaactggcgcagcagtacgtcatgacaagtctgcaacaggagtacaaaaagcagatgctgacagcagctcacgcactcgcagtggacgcaaagaacctcttggatgttatcgatcaggcgcgcctgaaaatgcttggccagactcgacctcactag

SEQ ID NO: 157851 - DNA, 1662 bp, Artificial Sequence
  derived and/or modified sequence
tctgactatatgatcattaaaaagaagtccaattatgaggtgctggagaaagatgtgggtctgaaaaggttctttcccaagtcactgcttgatagtgtgaaggccaagactttgaggaagttgattcagcagaccttccgccagttcgctaacctcaaccgagaagaaagcatccttaaattcttcgagattctaagtcccgtgtaccgcttcgacaaggaatgttttaaatgcgccctcgggtccagctggataatcagtgtcgaactagccatcggccctgaagagggcatatcttatttaaccgacaaggggtgtaatcctacccacctcgccgactttactcaggtccagacgatacagtactcgaattctgaagataaagatcggaagggcatgctccagcttaaaattgccggtgctccagagccactgaccgtgaccgcaccctctctgactattgcagaaaacatggctgatctaattgacgggtactgtaggttggttaacggtacctctcagagcttcattatcaggccgcagaaggagggggagcgggctctaccttcaatccccaagctggcaaatagcgaaaagcaggggatgcgaacccacgcagtgagcgtgtctgaaaccgatgactacgccgagatcatcgatgaggaagacacatacacgatgccttctacgagggattacgagattcaacgcgagcgcatagagctcggtagatgtataggcgaggggcaattcggagatgtccaccagggtatttacatgtctcccgagaatccggctctggcagtggcaataaagacctgcaagaattgtaccagtgacagtgtgcgtgagaagttcctccaggaagcctgccattacacgtctttacactggaactggtgtaggtacatatcagaccccaacgtcgactgccccgatccacgcaacgcagaggtgacaatgagacagtttgaccatcctcacatagtgaagttaatcggagtaatcacagagaatccggtctggataatcatggaactctgtactctgggtgaactgagaagttttttgcaggtgcggaaatattcccttgatctggcaagtctgattctctatgcctatcagctgtctacagcgctagcctacctcgagagtaagaggtttgtgcacagagatatcgcagcgagaaatgtcttagtttcaagcaacgactgtgtgaagcttggcgactttggtctctccagatacatggaggattccacctactataaagcaagcaagggcaaactcccaatcaaatggatggcccctgagtccataaacttccgcaggttcacgtccgcctctgatgtgtggatgttcggggtctgtatgtgggaaattttaatgcatggggtgaaacctttccagggggtgaaaaacaatgacgtgatcggacggatcgagaacggagagcgactgccgatgcctccaaactgcccgccaaccttgtactcactcatgaccaaatgctgggcctacgatccatccaggcgcccacggtttactgagctaaaggctcagctgtcttttcaaaacccagcccagatgctcccagcctcaggcagactgccaaaccagccatgcccggagcgggaaaactactcatttgcgaccttttag

SEQ ID NO: 157852 - DNA, 2043 bp, Artificial Sequence
  derived and/or modified sequence
atgaaataccaggaagtgaggtgtctgacctcattcaacataagtgtgagttttcccgctgaaactgatgactatgctgagatcattgatgaagaggacacctacaccatgccctctacgcgggattatgagatacagcgagagcgcatcgagctcggccgttgcataggagagggacagtttggtgatgtccatcagggcatttacatgtcaccagaaaacccagccctcgcggttgcaattaagacgtgtaaaaactgtacctcggactccgtgcgggagaaattcctacaagaggcactgaccatgcgacagttcgaccacccgcacatcgtgaaattaattggggtaatcacggagaatcccgtctggataattatggaactgtgcaccctcggggaactgaggagctttctgcaggttagaaagtattctctggacttggcctccctgatcctttacgcctaccagttatcaactgctttagcttatctcgagagcaagcgattcgttcatcgcgacattgcggcaagaaatgttctggtgagttccaacgactgtgtgaaactgggcgatttcggactatcaaggtacatggaggactctacttactacaaggctagtaagggcaagctaccgattaagtggatggcgccagagtcgattaacttccgccgtttcaccagcgcaagcgacgtctggatgtttggagtctgcatgtgggaaatacttatgcacggagtgaaaccattccaaggcgtgaaaaataatgatgtgattggacgcatcgaaaacggtgaaaggctgcccatgccaccaaactgtccacctactctttacagtctgatgacgaagtgctgggcttacgacccaagccgacgaccaaggttcacagagttaaaagcacagctgtcaaccatactcgaagaggaaaaagcacaacaagaggagcggatgcgaatggagagtcggcgacaggcaaccgtgtcttgggatagcgggggatcagacgaggcaccgccaaagcctagtagacctgggtatcccagcccacggagctctgaaggcttctacccctccccccagcatatggtacagaccaaccattaccaggtgagcgggtatcctggatcccatggcatcaccgcaatggcaggctcaatttatcctgggcaggcctcactcctcgaccaaaccgattcatggaaccataggcctcaggaaattgccatgtggcagccaaacgtggaagatagcactgtcctcgatcttagggggatcgggcaggttctgcccacacatttaatggaagagcggctcattcgtcagcagcaagagatggaggaggatcagaggtggctggaaaaagaagagcggttcctgaagcctgatgttcgcctgtctagaggcagtattgaccgggaagatggctccctccagggtccaattggaaatcagcatatttaccagcccgtaggcaaaccggaccccgcagctccaccaaaaaaaccccctagaccaggagccccaggccacctgggctcactcgcctccctgagcagccctgcagattcctacaacgaaggggtgaaactccagcctcaggaaatctcaccgccacccactgctaatttagacaggtctaacgacaaagtgtatgaaaacgttaccggcctggtgaaggcggtgattgagatgagttccaaaatacaacccgcaccccctgaggagtacgtccctatggtgaaagaggtggggttagcccttaggacactcttagctactgtggatgaaaccatccccctgctaccggcaagcactcacagagagatcgaaatggcacaaaagcttcttaattccgacctcggcgaactgattaataagatgaaattagcccagcagtatgtgatgacttccctgcaacaggaatataagaagcaaatgctgactgcagcccatgctctggcagttgacgccaagaacctgttggacgtcatcgaccaggccagactcaagatgctaggtcagacccgcccacactag

SEQ ID NO: 157853 - DNA, 3054 bp, Artificial Sequence
  derived and/or modified sequence
tgatatgaccgctatctcgcctctagcaagattatggcggcagcctaccttgatcccaacttgaaccacacaccaaactcttctaccaaaactcatctcggaacaggcatggagcgcagtcccggagccatggagcgcgtcttaaaggttttccactactttgaaagcaacagcgaaccaaccacatgggccagcataatccgtcatggcgatgcaaccgacgtgcggggtatcatccagaaaattgtggattctcataaggttaagcatgtcgcctgctatggctttcgtttatctcacctgcgcagcgaagaagtccattggctgcacgttgatatgggcgtgagtagcgtgagggagaaatatgaactcgctcaccccccagaggaatggaagtacgaactccgtatacggtacctgccaaaaggattcctgaaccagtttacagaggacaaaccaacattgaactttttttaccagcaagtgaaatctgactacatgctggaaatagccgatcaggtggaccaggaaatcgcgcttaagttgggctgcctggagatccggaggagctactgggagatgcgcggaaacgcactcgagaaaaagtcaaattacgaggtactcgaaaaggacgtgggccttaagcgctttttccccaaaagtttattagactccgtcaaagccaaaacacttcgcaagttgatccaacagactttccggcagtttgcaaacctaaaccgggaagaaagcatcctcaaattttttgagatcctgtccccagtctaccggttcgataaggaatgtttcaagtgtgcactgggttctagttggattatcagcgtggagctggcgattgggccagaggaggggattagctacctgactgacaaggggtgcaatcccacgcacctggccgactttactcaagtccagaccattcaatattctaacagcgaagacaaggacagaaagggaatgctgcagttgaaaattgctggggcaccagagcctttgacagtgactgccccatcactgacaatagcggaaaatatggcggatctgattgatgggtactgcagacttgtgaacggcacttctcagtctttcatcattcggccacagaaagagggtgaacgcgcactgccaagtatccccaagctagccaattctgagaagcagggaatgcgcacccacgcagtttctgtgtctgaaactgacgattatgctgagatcatcgatgaggaagatacttatacgatgccatccacgagagattatgagatccagcgagaaaggatcgagttgggacgctgtatcggcgagggtcagtttggagatgtccaccagggcatttatatgtctcctgagaatcccgctttagccgtggctataaagacctgtaagaactgtacaagtgactcagttagagagaaattcctccaggaagctctgacgatgagacaattcgaccatccacatatcgtcaagcttattggggtgatcaccgaaaatccggtgtggattattatggagttgtgcacacttggcgaacttcgaagcttcctgcaagtgcgtaaatacagcttagacctggcatccctgattctttatgcatatcaattgtccacggcgctggcatacctggaaagcaaaaggttcgtccatagagatatcgctgccaggaacgttctggtttcctccaacgactgcgtcaagctaggagactttggcctctccaggtacatggaggattccacctattataaggcttcaaaaggcaaactgccaattaaatggatggccccagaatctatcaattttcgcaggttcacgtctgctagcgatgtttggatgttcggagtatgcatgtgggagatattgatgcacggggttaaaccatttcaaggcgttaaaaataatgacgttattggcagaatcgaaaatggtgagagactgcctatgcctccaaactgtcccccaactctttattcccttatgacgaagtgttgggcttatgacccgtcacgaaggcctagatttacagagctgaaagcccagctgagcactattttggaggaagaaaaggcacaacaggaagaacgtatgcgcatggagtcacgcagacaggccactgtgtcctgggattccggtggaagcgacgaggcaccccctaaaccctctaggccaggttaccctagtcccagatcatctgaaggtttttacccttccccacaacatatggttcagaccaaccactaccaggactccaccgttcttgatctgaggggcattgggcaggttcttcccactcatctgatggaggagcgccttatccgccaacagcaggaaatggaggaggaccagcggtggttggagaaggaagaaaggtttttaaagccggacgtgcgactctctcgaggatctattgaccgggaggacggttctttacagggaccaatcggaaaccagcatatctatcagcctgtgggaaaacctgatcctgctgcccctcccaagaagcccccacgcccaggcgcacctggccacctcggctctttggccagcctgagtagtcccgctgattcctacaacgagggcgtcaaattgcagccgcaagaaatctccccccctcctaccgccaatctggatcgatcaaacgacaaagtttatgaaaatgttacaggactagttaaggccgtgattgaaatgtcttccaaaatacagccagccccacccgaggagtacgtgccaatggtgaaggaggtgggccttgcactccgcaccttattagcaactgttgatgagaccataccattgttacccgctagcacccacagggagattgagatggcccagaagctgctcaattctgatctgggtgagttaattaacaagatgaagcttgctcagcagtacgttatgacatccttacagcaggagtataagaagcagatgttgacagctgcccacgccctcgccgtcgatgctaaaaacttactggatgtcatcgaccaggctcgcctgaagatgttgggccagaccaggccccactag

SEQ ID NO: 157854 - DNA, 3159 bp, Artificial Sequence
  derived and/or modified sequence
atggcagccgcttacctcgatcccaatctcaatcatactcccaatagcagcactaaaacccacctggggaccggcatggaaaggagccctggcgcaatggagagggtgctaaaggtgtttcactatttcgagtcgaattccgagcctaccacatgggcctcaatcatcaggcacggagatgcaactgatgttcggggaatcatccagaaaatcgtcgatagtcacaaggttaagcatgtggcgtgctacgggtttaggctgtcccatctcagatccgaagaagtgcattggctacacgtggatatgggagtgagtagcgtgagagagaagtacgagctagcccaccctccagaagagtggaagtacgaactgagaattcgttacctccctaaaggtttcctgaatcagttcaccgaggacaagcccacactgaacttcttctaccagcaggttaagtcagattatatgttagagattgctgaccaggtggaccaagagattgccttaaaactcggttgcctggagatccggaggtcctactgggagatgcgaggcaacgccctggaaaaaaaaagtaattacgaggtgctcgagaaagacgtggggctgaaacgtttttttccaaaaagtctgttggattctgtcaaggcgaagacgcttcggaaactgatccagcaaacgttccgacagttcgcaaacctgaatcgcgaagagtccatacttaagttctttgaaattctatccccggtgtacaggttcgacaaagagtgttttaagtgtgcactggggtcttcgtggattatttccgttgagctggctatcggaccggaagagggcatcagctatctgaccgacaaagggtgtaacccgactcatcttgccgactttactcaagtgcagacaatacaatattctaactcagaagacaaggatcggaagggcatgttgcagctcaagattgcgggagccccagaaccactcaccgtcacagccccaagtctcacaattgccgagaacatggccgaccttattgacgggtactgtcgcctcgtaaatggaacaagtcagagtttcatcattcggcctcagaaggagggggagcgcgctttaccgagtattcccaaacttgctaattcggaaaagcagggtatgcggacccacgcagtgtccgtctctgagacagatgattatgccgagataatcgacgaagaggatacttatacaatgccttccactcgtgactatgaaatacaacgggagaggatagagctgggccgatgcatcggcgagggacagtttggggatgtacatcagggtatctatatgtcccccgagaacccagctctggccgtggcaattaagacttgtaagaactgtaccagtgatagtgtgcgagaaaaattcctccaggaagcacttaccatgcggcagtttgaccatccccacatcgtgaaactgatcggtgtgattaccgagaatcctgtttggataatcatggaattatgcacgctaggagagctgcgcagcttcctgcaggtccgcaagtactcactggatcttgcatcactgattctgtatgcgtaccagctgtcgacagctctggcttacctggagagcaagcggtttgtgcaccgcgacatagctgccagaaatgttctggtttcatctaatgattgcgtgaagctgggcgatttcggactctccagatatatggaagactccacatactacaaggcgagcaaaggaaaacttccaatcaaatggatggctccagaatctatcaactttagacgattcacctcagcttcagacgtctggatgttcggagtatgcatgtgggagattctgatgcatggcgtgaaaccttttcagggagtaaagaataatgatgtcattggcaggatcgaaaacggagaacggctaccaatgccaccgaactgtccccctaccctttacagcctgatgacaaagtgttgggcctacgatccttcgcgcagacctcggtttactgaattaaaggcacagctgagcacaatcctggaagaagagaaagcccagcaggaggagaggatgaggatggagtcaaggagacaggcaacagtaagttgggactctggaggctctgatgaggcacctcccaagccctcccgcccaggctatccatcccctcgctctagtgaaggtttttacccaagtccacagcatatggtccagaccaatcactaccaggtgagcgggtatcccggaagccatggaattaccgctatggccggatccatttaccccggacaggctagcttattggatcagacagattcctggaaccatcggcctcaagaaatcgccatgtggcagcccaatgtggaggatagcactgtactcgatctccgcggaattggacaggtactccccacgcatctcatggaggaaaggctgattcggcagcaacaggaaatggaagaagatcagaggtggctggaaaaggaggagcgctttcttaagcccgatgttagattatcgcgaggatccatcgacagggaagatggttctttgcagggacctattggaaaccagcacatctaccagcctgttggcaaacccgacccagctgctccccctaagaagcctccacggcctggggcacccggacacctcggatcattggcctcactgtcgagccccgcagatagctataacgaaggggtaaaactccagccgcaggagatttccccgcctcccacagctaatctggaccggtctaacgacaaggtgtacgagaatgtcaccggcctcgttaaagccgtgatcgaaatgtctagcaagattcagcctgcgcctcctgaagagtatgtgccgatggtaaaggaggtggggctggctctgcgcaccctgttagccaccgtcgacgagactatacccctacttccagcttctacacatagagaaatagaaatggcccagaagctcctgaactccgacctcggcgaattaataaacaaaatgaagctggcccaacagtacgttatgacaagcctgcaacaggagtataaaaagcagatgctcacggcggctcatgccttggctgtggatgctaaaaatctgttagatgtcatagaccaagccaggctgaagatgctgggccagacaaggccacactag

SEQ ID NO: 157855 - DNA, 3159 bp, Artificial Sequence
  derived and/or modified sequence
atggctgctgcctacctggatcctaatttgaatcacacacccaactcgtccactaagactcatctcggcaccggaatggagcggtctccgggagccatggagcgagtcttgaaagtatttcactattttgagtcaaactctgagccgaccacatgggccagcatcatcagacacggagatgccactgatgtacgtgggattattcagaaaatcgtggattcacacaaggtgaagcacgtagcttgttatgggttccggctgagtcacctccggtccgaagaagtccactggcttcacgtcgatatgggggtgtcatcagtgagagagaagtatgagcttgcacatccccctgaagagtggaagtatgaactgcgaatcagatacctgccgaaagggtttctaaaccaatttaccgaggataaaccgaccctgaacttcttctaccagcaggtgaaatctgactatatgctggaaattgcagaccaggtggatcaagagatcgccctcaagctcgggtgcctggagattcggcgatcctactgggaaatgcgcggaaatgccttagaaaagaaaagcaactatgaggttctggaaaaggacgtgggcctgaagcggttctttccaaagtctctactagacagcgttaaagccaagacactgcgaaaactaatacagcagacctttaggcagtttgcaaatctgaatcgcgaggaatcgatactgaaattttttgaaattttgtctcctgtgtaccggttcgataaagagtgctttaagtgcgccttaggatcttcctggataatcagcgttgagctcgctataggccctgaagagggcatttcctatctaaccgataaggggtgtaatccaacccacctagcggatttcactcaggtacagaccatccagtactcaaacagcgaagacaaggacaggaaaggaatgcttcagctgaagattgcaggagcgcctgaacctttgaccgtcactgcgcctagtttgactattgcggaaaacatggctgacctaattgatggctactgcaggctggttaatgggacgtcccagtccttcataattcgccctcagaaggagggagaaagagccctgccaagcatccccaagctcgctaattctgaaaaacagggtatgcgtacacatgcagtgagcgtgtcagagaccgacgactacgcagagatcatcgacgaggaagacacttacactatgcctagcacgagggactacgagatccaacgagaaagaatagaactaggacggtgcattggagaaggtcaatttggagatgtgcaccaggggatctacatgtctcccgaaaatccggcactggcagtggctatcaagacgtgcaagaattgcacctccgacagtgttcgagaaaagtttctacaggaggccctcaccatgcgacaattcgaccaccctcacatagtgaaactgatcggtgtgatcaccgagaatcctgtgtggattataatggagttgtgcacactgggggaactccgttcattcctgcaggttcgtaagtattcacttgacctggcgtctctgatcctgtacgcctatcagttatctacagctctggcctatctcgaaagcaaaagatttgtccaccgggacattgcagcaagaaatgtgctagtgtcctcaaatgactgcgtcaaattgggtgatttcggcctgagccggtacatggaggattccacttattacaaagcttctaaagggaaactccccataaagtggatggcccctgaaagcatcaatttcagacgttttacgtcggcctccgatgtgtggatgtttggagtgtgcatgtgggagattttgatgcatggcgtcaagccatttcaaggggtgaaaaacaacgacgtgataggtcggatagagaatggagaacgtctccctatgcctcccaactgtcctcccaccttgtatagcctcatgacgaaatgctgggcctatgacccttcgagacggcctcgcttcacggaactcaaggcacagctgagcacaattctcgaagaggaaaaggcccagcaggaggaacgcatgcgaatggaatcccggaggcaggcgacagtctcctgggattctgggggatctgatgaagctcctccgaaacctagtaggccaggctacccaagtccgagaagctcggagggcttctaccctagccctcaacacatggtccagaccaatcattaccaggttagcgggtacccgggtagtcacgggatcacagccatggcaggctccatctatccgggtcaagcctctctgctcgaccagacagacagctggaatcacaggccccaggagatcgctatgtggcagcccaatgttgaggactccaccgtgctggacttgagaggtattggtcaggtgctgccaacccatttaatggaggaaaggctgatcaggcagcagcaggagatggaggaggatcagcgttggcttgagaaggaggaaaggttcctcaaacctgacgttagactgtcccgagggtctatcgatcgcgaagatgggtcactgcaggggcctattggcaaccaacatatctaccagcccgttggaaaacctgaccctgctgcaccacctaagaaacctcctcgaccaggcgcaccagggcatctgggcagcctcgcttccctgtctagtcctgcggatagctacaatgagggcgtgaagctgcaaccacaggagattagtccaccacctaccgcgaacctggacaggtcaaacgacaaagtgtatgagaacgtaacaggtctcgtcaaggctgtgatcgaaatgtcttcgaagattcaacccgctcccccagaagagtacgtcccgatggtcaaggaggtagggttagcactgcgcacgctcctggctacagtagatgagacaattccgttactgcccgcttcaactcatagagaaattgagatggctcaaaaacttctgaactctgacttaggtgagttgatcaacaaaatgaaactcgcccagcagtacgtgatgacatctctccagcaggagtataaaaagcagatgcttacagcagcccacgctttggccgtcgacgccaagaatttactcgatgtgattgatcaggctagattgaagatgctgggtcagactaggccccactag

SEQ ID NO: 157856 - DNA, 3021 bp, Artificial Sequence
  derived and/or modified sequence
atggcggcagcatatctcgatccaaatctgaatcacacacccaattcctcaacaaagacccatcttgggaccggaatggaaagatcccctggggcaatggagagggtccttaaggtgttccactattttgaaagcaactctgaacccacaacttgggccagcatcatcaggcatggggacgccacagatgtgagagggattatccagaagatcgtggacagtcacaaggtaaagcacgtggcctgctacgggtttcgccttagccatctgcggagtgaggaagttcactggctccatgtcgatatgggcgttagctccgtgagggagaaatacgagcttgcccaccccccagaggaatggaagtatgagctacgtattcggtatctgcccaaaggctttctgaaccagtttaccgaggacaagcctaccctcaattttttctaccagcaagtgaaaagtgactacatgttagaaatagccgaccaggttgatcaagaaatcgcgctcaagctaggttgcctggagattcgacgatcatattgggaaatgaggggaaacgccttggagaaaaaatccaactatgaggtactggaaaaagatgttggcctgaagcgcttctttcctaagtctctactggattcagtcaaagctaagacactccgcaagctgatccagcagacctttaggcagtttgcaaacctgaaccgcgaggagtcaatcctaaagttcttcgagattctcagccccgtgtataggtttgataaggagtgtttcaagtgcgctttggggagctcttggattataagcgtcgaactcgccataggccctgaagaggggatcagctacctgactgataaaggctgcaatcccacacatttggctgatttcacacaagtgcagactattcagtattccaactccgaggacaaagataggaagggaatgttacagctcaagattgccggtgctccagaaccccttacagtgactgccccatctctcacaattgcagagaacatggcagacctgatcgatggatactgtaggctggtaaacggcactagtcagtccttcattataaggcctcagaaagagggagaaagagctttgccatccataccgaaactggctaactctgagaaacagggtatgcggacgcatgccgtgtcagtctcagaaacagacgactacgcggagattatcgacgaggaagacacatacactatgccaagtacacgcgactatgaaatacagagagaacggatcgagctgggcagatgtatcggagaaggccaatttggggacgtgcaccaggggatatacatgagtccggagaacccggctctggccgtcgctataaaaacttgcaaaaactgtacatcagattcagtccgcgaaaagtttctacaagaggcactgaccatgaggcagttcgatcacccgcacatcgttaagctgatcggcgtgattacagagaaccctgtgtggattatcatggaactgtgtaccttaggcgagctgagatctttcctccaggtcagaaaatatagcctcgatttggcttccctaattctgtatgcgtatcagttgtctacagccctggcatatctggaatccaagaggtttgtgcatcgggacatcgctgccagaaatgtcctcgtgtcctcaaacgactgcgtcaaactgggggactttgggctcagtcggtatatggaagatagcacgtattacaaagcgagcaagggtaaactacccatcaaatggatggcacccgagagtattaactttagacggtttacatctgcttcagatgtttggatgtttggagtgtgtatgtgggagattttgatgcacggggtcaagccattccaaggggtgaagaacaacgacgtaataggtcgcattgaaaatggtgagcgtcttcccatgccccctaattgcccgccaacgctgtactcattaatgacaaagtgttgggcttatgatccctcaagacgccctcgcttcacagagttgaaagcccaattaagtaccatattggaagaggaaaaggcccagcaagaagagagaatgagaatggaatccaggcgtcaggcaaccgtgagttgggacagcggcggttctgacgaggcccctcccaaaccgtcaagaccgggatacccgtccccaaggtcttcagagggcttttacccttctccccagcatatggtgcagaccaaccactaccaggacagcaccgtcttagatctgaggggtattggacaggtcctgcctactcacctgatggaagagcgccttattcgacaacagcaagagatggaggaggaccagagatggctggagaaggaggaaaggtttctcaaaccggacgtcagattgagcagaggaagcattgatcgcgaggatgggtcactccaagggcctataggcaatcagcatatctaccagcctgtgggtaaacctgatcccgctgcccctccgaagaagccgcctagacctggcgctccaggccacctggggtcattggcctctctgtcatctccggctgacagctacaacgagggtgtgaaactgcagccccaggaaatttccccccctccaacagcaaatctagatagatcaaacgacaaagtgtacgaaaatgtcacggggctggtaaaagcagtaatcgaaatgtcatcaaaaatacagcctgctccgccagaagaatacgttccgatggtgaaggaagtcgggcttgcccttaggacactgctggccacagtggacgaaacgattccattgcttcccgctagtacacaccgggagattgagatggcccaaaagttgctgaactccgacttgggcgaactgataaacaagatgaaactggcccaacagtatgtcatgacatctctacagcaggaatataaaaaacagatgctcactgcagcgcacgcactggccgtggacgctaagaatctgctggatgtcatagatcaggctagacttaagatgctcggacaaacacgaccccattag

SEQ ID NO: 157857 - DNA, 1662 bp, Artificial Sequence
  derived and/or modified sequence
agcgattatatgattatcaaaaagaagtctaactatgaagtattagaaaaagatgttggtttaaagcgattttttcctaagagtttactggattctgtcaaggccaaaacactaagaaaactgatccaacaaacatttagacaatttgccaaccttaatagagaagaaagtattctgaaattctttgagatcctgtctccagtctacagatttgataaggaatgcttcaagtgtgctcttggttcaagctggattatttcagtggaactggcaatcggcccagaagaaggaatcagttacctaacggacaagggctgcaatcccacacatcttgctgacttcactcaagtgcaaaccattcagtattcaaacagtgaagacaaggacagaaaaggaatgctacaactaaaaatagcaggtgcacccgagcctctgacagtgacggcaccatccctaaccattgcggagaatatggctgacctaatagatgggtactgccggctggtgaatggaacctcgcagtcatttatcatcagacctcagaaagaaggtgaacgggctttgccatcaataccaaagttggccaacagcgaaaagcaaggcatgcggacacacgccgtctctgtgtcagaaacagatgattatgctgagattatagatgaagaagatacttacaccatgccctcaaccagggattatgagattcaaagagaaagaatagaacttggacgatgtattggagaaggccaatttggagatgtacatcaaggcatttatatgagtccagagaatccagctttggcggttgcaattaaaacatgtaaaaactgtacttcggacagcgtgagagagaaatttcttcaagaagcctgccattacacatctttgcactggaattggtgcagatatataagtgatcctaatgttgattgcccagaccccaggaatgcagaggtaacaatgcgtcagtttgaccatcctcatattgtgaagctgattggagtcatcacagagaatcctgtctggataatcatggagctgtgcacacttggagagctgaggtcatttttgcaagtaaggaaatacagtttggatctagcatctttgatcctgtatgcctatcagcttagtacagctcttgcatatctagagagcaaaagatttgtacacagggacattgctgctcggaatgttctggtgtcctcaaatgattgtgtaaaattaggagactttggattatcccgatatatggaagatagtacttactacaaagcttccaaaggaaaattgcctattaaatggatggctccagagtcaatcaattttcgacgttttacctcagctagtgacgtatggatgtttggtgtgtgtatgtgggagatactgatgcatggtgtgaagccttttcaaggagtgaagaacaatgatgtaatcggtcgaattgaaaatggggaaagattaccaatgcctccaaattgtcctcctaccctctacagccttatgacgaaatgctgggcctatgaccccagcaggcggcccaggtttactgaacttaaagctcagctcagttttcagaacccagctcagatgttacctgcttcaggaaggcttcctaatcaaccctgccccgaaagagagaattactcctttgccaccttttga

SEQ ID NO: 157858 - DNA, 571 bp, Artificial Sequence
  derived and/or modified sequence
ataaccaactagctcctcgctgaaactggctcacaccgcggaagcccgggtcggtgtcggggcgagccttccctccttttcctggagcccgtctcaggcagaactggggctcccttgcatcttccagttacaaattcagtgccttctgcagtttccccagagctcctcaagaataacggaagggagaatatgacagatacctagcatctagcaaaataatggcagctgcttaccttgaccccaacttgaatcacacaccaaattcgagtactaagactcacctgggtactggtatggaacgttctcctggtgcaatggagcgagtattaaaggtctttcattattttgaaagcaatagtgagccaaccacctgggccagtattatcaggcatggagatgctactgatgtcaggggcatcattcagaagatagtggacagtcacaaagtaaagcatgtggcctgctatggattccgcctcagtcacctgcggtcagaggaggttcactggcttcacgtggatatgggcgtctccagtgtgagggagaagtatgagcttgctcacccaccaga

SEQ ID NO: 157859 - DNA, 3279 bp, Artificial Sequence
  derived and/or modified sequence
agccctgtttgctctccgataaacaagtctgtgtattataacgtattggacaatgatgtcacttttatttccataaatgactcatgtgtgagcaaaatttgagtaatagtgttttaagaatatttcagcgtagtagaggatttaagcagatcgctttgcctactttaattatatgaaataccaggaggtcagatgtttaacctctttcaacatatctgtttcttttcctgcagaaacagatgattatgctgagattatagatgaagaagatacttacaccatgccctcaaccagggattatgagattcaaagagaaagaatagaacttggacgatgtattggagaaggccaatttggagatgtacatcaaggcatttatatgagtccagagaatccagctttggcggttgcaattaaaacatgtaaaaactgtacttcggacagcgtgagagagaaatttcttcaagaagccttaacaatgcgtcagtttgaccatcctcatattgtgaagctgattggagtcatcacagagaatcctgtctggataatcatggagctgtgcacacttggagagctgaggtcatttttgcaagtaaggaaatacagtttggatctagcatctttgatcctgtatgcctatcagcttagtacagctcttgcatatctagagagcaaaagatttgtacacagggacattgctgctcggaatgttctggtgtcctcaaatgattgtgtaaaattaggagactttggattatcccgatatatggaagatagtacttactacaaagcttccaaaggaaaattgcctattaaatggatggctccagagtcaatcaattttcgacgttttacctcagctagtgacgtatggatgtttggtgtgtgtatgtgggagatactgatgcatggtgtgaagccttttcaaggagtgaagaacaatgatgtaatcggtcgaattgaaaatggggaaagattaccaatgcctccaaattgtcctcctaccctctacagccttatgacgaaatgctgggcctatgaccccagcaggcggcccaggtttactgaacttaaagctcagctcagcacaatcctggaggaagagaaggctcagcaagaagagcgcatgaggatggagtccagaagacaggccacagtgtcctgggactccggagggtctgatgaagcaccgcccaagcccagcagaccgggttatcccagtccgaggtccagcgaaggattttatcccagcccacagcacatggtacaaaccaatcattaccaggtttctggctaccctggttcacatggaatcacagccatggctggcagcatctatccaggtcaggcatctcttttggaccaaacagattcatggaatcatagacctcaggagatagcaatgtggcagcccaatgtggaggactctacagtattggacctgcgagggattgggcaagtgttgccaacccatctgatggaagagcgtctaatccgacagcaacaggaaatggaagaagatcagcgctggctggaaaaagaggaaagatttctgaaacctgatgtgagactctctcgaggcagtattgacagggaggatggaagtcttcagggtccgattggaaaccaacatatatatcagcctgtgggtaaaccagatcctgcagctccaccaaagaaaccgcctcgccctggagctcccggtcatctgggaagccttgccagcctcagcagccctgctgacagctacaacgagggtgtcaagcttcagccccaggaaatcagcccccctcctactgccaacctggaccggtcgaatgataaggtgtacgagaatgtgacgggcctggtgaaagctgtcatcgagatgtccagtaaaatccagccagccccaccagaggagtatgtccctatggtgaaggaagtcggcttggccctgaggacattattggccactgtggatgagaccattcccctcctaccagccagcacccaccgagagattgagatggcacagaagctattgaactctgacctgggtgagctcatcaacaagatgaaactggcccagcagtatgtcatgaccagcctccagcaagagtacaaaaagcaaatgctgactgctgctcacgccctggctgtggatgccaaaaacttactcgatgtcattgaccaagcaagactgaaaatgcttgggcagacgagaccacactgagcctcccctaggagcacgtcttgctaccctcttttgaagatgttctctagccttccaccagcagcgaggaattaaccctgtgtcctcagtcgccagcacttacagctccaacttttttgaatgaccatctggttgaaaaatctttctcatataagtttaaccacactttgatttgggttcattttttgttttgtttttttcaatcatgatattcagaaaaatccaggatccaaaatgtggcgtttttctaagaatgaaaattatatgtaagcttttaagcatcatgaagaacaatttatgttcacattaagatacgttctaaagggggatggccaaggggtgacatcttaattcctaaactaccttagctgcatagtggaagaggagagcatgaagcaaagaattccaggaaacccaagaggctgagaattcttttgtctaccatagaattattatccagactggaatttttgtttgttagaacacccttcagttgcaatatgctaatcccactttacaaagaatataaaagctatattttgaagacttgagttatttcagaaaaaactacagccctttttgtcttacctgccttttactttcgtgtggatatgtgaagcattgggtcgggaactagctgtagaacacaactaaaaactcatgtcttttttcacagaataatgtgccagttttttgtagcaatgttatttctcttggaagcagaaatgctttgtaccagagcacctccaaactgcattgaggagaagttccagaaccatcccctttttccatttttatataatttataaagaaagattaaagccatgttgactattttacagccactggagttaactaacccttccttgtatctgtcttcccaggagagaatgaagcaaaacaggaatttggttttcttttgatgtccagttacaccatccattctgttaattttgaaaaaatataccctccctttagtttgttgggggatataaattattctcaggaagaatataatgaactgtacagttactttgacctattaaaaaggtgttaccagtaaa

SEQ ID NO: 157860 - DNA, 4129 bp, Artificial Sequence
  derived and/or modified sequence
atatgacagatacctagcatctagcaaaataatggcagctgcttaccttgaccccaacttgaatcacacaccaaattcgagtactaagactcacctgggtactggtatggaacgttctcctggtgcaatggagcgagtattaaaggtctttcattattttgaaagcaatagtgagccaaccacctgggccagtattatcaggcatggagatgctactgatgtcaggggcatcattcagaagatagtggacagtcacaaagtaaagcatgtggcctgctatggattccgcctcagtcacctgcggtcagaggaggttcactggcttcacgtggatatgggcgtctccagtgtgagggagaagtatgagcttgctcacccaccagaggagtggaaatatgaattgagaattcgttatttgccaaaaggatttctaaaccagtttactgaagataagccaactttgaatttcttctatcaacaggtgaagagcgattatatgttagagatagctgatcaagtggaccaggaaattgctttgaagttgggttgtctagaaatacggcgatcatactgggagatgcggggcaatgcactagaaaagaagtctaactatgaagtattagaaaaagatgttggtttaaagcgattttttcctaagagtttactggattctgtcaaggccaaaacactaagaaaactgatccaacaaacatttagacaatttgccaaccttaatagagaagaaagtattctgaaattctttgagatcctgtctccagtctacagatttgataaggaatgcttcaagtgtgctcttggttcaagctggattatttcagtggaactggcaatcggcccagaagaaggaatcagttacctaacggacaagggctgcaatcccacacatcttgctgacttcactcaagtgcaaaccattcagtattcaaacagtgaagacaaggacagaaaaggaatgctacaactaaaaatagcaggtgcacccgagcctctgacagtgacggcaccatccctaaccattgcggagaatatggctgacctaatagatgggtactgccggctggtgaatggaacctcgcagtcatttatcatcagacctcagaaagaaggtgaacgggctttgccatcaataccaaagttggccaacagcgaaaagcaaggcatgcggacacacgccgtctctgtgtcagaaacagatgattatgctgagattatagatgaagaagatacttacaccatgccctcaaccagggattatgagattcaaagagaaagaatagaacttggacgatgtattggagaaggccaatttggagatgtacatcaaggcatttatatgagtccagagaatccagctttggcggttgcaattaaaacatgtaaaaactgtacttcggacagcgtgagagagaaatttcttcaagaagccttaacaatgcgtcagtttgaccatcctcatattgtgaagctgattggagtcatcacagagaatcctgtctggataatcatggagctgtgcacacttggagagctgaggtcatttttgcaagtaaggaaatacagtttggatctagcatctttgatcctgtatgcctatcagcttagtacagctcttgcatatctagagagcaaaagatttgtacacagggacattgctgctcggaatgttctggtgtcctcaaatgattgtgtaaaattaggagactttggattatcccgatatatggaagatagtacttactacaaagcttccaaaggaaaattgcctattaaatggatggctccagagtcaatcaattttcgacgttttacctcagctagtgacgtatggatgtttggtgtgtgtatgtgggagatactgatgcatggtgtgaagccttttcaaggagtgaagaacaatgatgtaatcggtcgaattgaaaatggggaaagattaccaatgcctccaaattgtcctcctaccctctacagccttatgacgaaatgctgggcctatgaccccagcaggcggcccaggtttactgaacttaaagctcagctcagcacaatcctggaggaagagaaggctcagcaagaagagcgcatgaggatggagtccagaagacaggccacagtgtcctgggactccggagggtctgatgaagcaccgcccaagcccagcagaccgggttatcccagtccgaggtccagcgaaggattttatcccagcccacagcacatggtacaaaccaatcattaccaggactctacagtattggacctgcgagggattgggcaagtgttgccaacccatctgatggaagagcgtctaatccgacagcaacaggaaatggaagaagatcagcgctggctggaaaaagaggaaagatttctgaaacctgatgtgagactctctcgaggcagtattgacagggaggatggaagtcttcagggtccgattggaaaccaacatatatatcagcctgtgggtaaaccagatcctgcagctccaccaaagaaaccgcctcgccctggagctcccggtcatctgggaagccttgccagcctcagcagccctgctgacagctacaacgagggtgtcaagcttcagccccaggaaatcagcccccctcctactgccaacctggaccggtcgaatgataaggtgtacgagaatgtgacgggcctggtgaaagctgtcatcgagatgtccagtaaaatccagccagccccaccagaggagtatgtccctatggtgaaggaagtcggcttggccctgaggacattattggccactgtggatgagaccattcccctcctaccagccagcacccaccgagagattgagatggcacagaagctattgaactctgacctgggtgagctcatcaacaagatgaaactggcccagcagtatgtcatgaccagcctccagcaagagtacaaaaagcaaatgctgactgctgctcacgccctggctgtggatgccaaaaacttactcgatgtcattgaccaagcaagactgaaaatgcttgggcagacgagaccacactgagcctcccctaggagcacgtcttgctaccctcttttgaagatgttctctagccttccaccagcagcgaggaattaaccctgtgtcctcagtcgccagcacttacagctccaacttttttgaatgaccatctggttgaaaaatctttctcatataagtttaaccacactttgatttgggttcattttttgttttgtttttttcaatcatgatattcagaaaaatccaggatccaaaatgtggcgtttttctaagaatgaaaattatatgtaagcttttaagcatcatgaagaacaatttatgttcacattaagatacgttctaaagggggatggccaaggggtgacatcttaattcctaaactaccttagctgcatagtggaagaggagagcatgaagcaaagaattccaggaaacccaagaggctgagaattcttttgtctaccatagaattattatccagactggaatttttgtttgttagaacacccttcagttgcaatatgctaatcccactttacaaagaatataaaagctatattttgaagacttgagttatttcagaaaaaactacagccctttttgtcttacctgccttttactttcgtgtggatatgtgaagcattgggtcgggaactagctgtagaacacaactaaaaactcatgtcttttttcacagaataatgtgccagttttttgtagcaatgttatttctcttggaagcagaaatgctttgtaccagagcacctccaaactgcattgaggagaagttccagaaccatcccctttttccatttttatataatttataaagaaagattaaagccatgttgactattttacagccactggagttaactaacccttccttgtatctgtcttcccaggagagaatgaagcaaaacaggaatttggttttcttttgatgtccagttacaccatccattctgttaattttgaaaaaatataccctccctttagtttgttgggggatataaattattctcaggaagaatataatgaactgtacagttactttgacctattaaaaaggtgttaccagtaaagttcttgttgtaa

SEQ ID NO: 157861 - DNA, 602 bp, Artificial Sequence
  derived and/or modified sequence
agcacggcctcgagggcgcgagcccgcgccgccgccgccgccgccggtcccggaccactgtgagcccgcggcgtgaggcgtgggaggaagcgcggctgctgtcgcccagcgccgccccgtcgtcgtctgccttcgcttcacggcgccgagccgcggtccgaatccatggttggttgaatctggatgtggaacccgctgacgtggatggctgactgtattaatatgacagatacctagcatctagcaaaataatggcagctgcttaccttgaccccaacttgaatcacacaccaaattcgagtactaagactcacctgggtactggtatggaacgttctcctggtgcaatggagcgagtattaaaggtctttcattattttgaaagcaatagtgagccaaccacctgggccagtattatcaggcatggagatgctactgatgtcaggggcatcattcagaagatagtggacagtcacaaagtaaagcatgtggcctgctatggattccgcctcagtcacctgcggtcagaggaggttcactggcttcacgtggatatgggcgtctccagtgtgagggagaagtatgagcttgctcacccacca

SEQ ID NO: 157862 - DNA, 4405 bp, Artificial Sequence
  derived and/or modified sequence
gcgcggctgctgtcgcccagcgccgccccgtcgtcgtctgccttcgcttcacggcgccgagccgcggtccgaagtcttgctgtgtcacccaggctgccaggctggagtggagtggcatgatctcggctgactgcaacctctgcctcccagaatatgacagatacctagcatctagcaaaataatggcagctgcttaccttgaccccaacttgaatcacacaccaaattcgagtactaagactcacctgggtactggtatggaacgttctcctggtgcaatggagcgagtattaaaggtctttcattattttgaaagcaatagtgagccaaccacctgggccagtattatcaggcatggagatgctactgatgtcaggggcatcattcagaagatagtggacagtcacaaagtaaagcatgtggcctgctatggattccgcctcagtcacctgcggtcagaggaggttcactggcttcacgtggatatgggcgtctccagtgtgagggagaagtatgagcttgctcacccaccagaggagtggaaatatgaattgagaattcgttatttgccaaaaggatttctaaaccagtttactgaagataagccaactttgaatttcttctatcaacaggtgaagagcgattatatgttagagatagctgatcaagtggaccaggaaattgctttgaagttgggttgtctagaaatacggcgatcatactgggagatgcggggcaatgcactagaaaagaagtctaactatgaagtattagaaaaagatgttggtttaaagcgattttttcctaagagtttactggattctgtcaaggccaaaacactaagaaaactgatccaacaaacatttagacaatttgccaaccttaatagagaagaaagtattctgaaattctttgagatcctgtctccagtctacagatttgataaggaatgcttcaagtgtgctcttggttcaagctggattatttcagtggaactggcaatcggcccagaagaaggaatcagttacctaacggacaagggctgcaatcccacacatcttgctgacttcactcaagtgcaaaccattcagtattcaaacagtgaagacaaggacagaaaaggaatgctacaactaaaaatagcaggtgcacccgagcctctgacagtgacggcaccatccctaaccattgcggagaatatggctgacctaatagatgggtactgccggctggtgaatggaacctcgcagtcatttatcatcagacctcagaaagaaggtgaacgggctttgccatcaataccaaagttggccaacagcgaaaagcaaggcatgcggacacacgccgtctctgtgtcagaaacagatgattatgctgagattatagatgaagaagatacttacaccatgccctcaaccagggattatgagattcaaagagaaagaatagaacttggacgatgtattggagaaggccaatttggagatgtacatcaaggcatttatatgagtccagagaatccagctttggcggttgcaattaaaacatgtaaaaactgtacttcggacagcgtgagagagaaatttcttcaagaagccttaacaatgcgtcagtttgaccatcctcatattgtgaagctgattggagtcatcacagagaatcctgtctggataatcatggagctgtgcacacttggagagctgaggtcatttttgcaagtaaggaaatacagtttggatctagcatctttgatcctgtatgcctatcagcttagtacagctcttgcatatctagagagcaaaagatttgtacacagggacattgctgctcggaatgttctggtgtcctcaaatgattgtgtaaaattaggagactttggattatcccgatatatggaagatagtacttactacaaagcttccaaaggaaaattgcctattaaatggatggctccagagtcaatcaattttcgacgttttacctcagctagtgacgtatggatgtttggtgtgtgtatgtgggagatactgatgcatggtgtgaagccttttcaaggagtgaagaacaatgatgtaatcggtcgaattgaaaatggggaaagattaccaatgcctccaaattgtcctcctaccctctacagccttatgacgaaatgctgggcctatgaccccagcaggcggcccaggtttactgaacttaaagctcagctcagcacaatcctggaggaagagaaggctcagcaagaagagcgcatgaggatggagtccagaagacaggccacagtgtcctgggactccggagggtctgatgaagcaccgcccaagcccagcagaccgggttatcccagtccgaggtccagcgaaggattttatcccagcccacagcacatggtacaaaccaatcattaccaggtttctggctaccctggttcacatggaatcacagccatggctggcagcatctatccaggtcaggcatctcttttggaccaaacagattcatggaatcatagacctcaggagatagcaatgtggcagcccaatgtggaggactctacagtattggacctgcgagggattgggcaagtgttgccaacccatctgatggaagagcgtctaatccgacagcaacaggaaatggaagaagatcagcgctggctggaaaaagaggaaagatttctgaaacctgatgtgagactctctcgaggcagtattgacagggaggatggaagtcttcagggtccgattggaaaccaacatatatatcagcctgtgggtaaaccagatcctgcagctccaccaaagaaaccgcctcgccctggagctcccggtcatctgggaagccttgccagcctcagcagccctgctgacagctacaacgagggtgtcaagcttcagccccaggaaatcagcccccctcctactgccaacctggaccggtcgaatgataaggtgtacgagaatgtgacgggcctggtgaaagctgtcatcgagatgtccagtaaaatccagccagccccaccagaggagtatgtccctatggtgaaggaagtcggcttggccctgaggacattattggccactgtggatgagaccattcccctcctaccagccagcacccaccgagagattgagatggcacagaagctattgaactctgacctgggtgagctcatcaacaagatgaaactggcccagcagtatgtcatgaccagcctccagcaagagtacaaaaagcaaatgctgactgctgctcacgccctggctgtggatgccaaaaacttactcgatgtcattgaccaagcaagactgaaaatgcttgggcagacgagaccacactgagcctcccctaggagcacgtcttgctaccctcttttgaagatgttctctagccttccaccagcagcgaggaattaaccctgtgtcctcagtcgccagcacttacagctccaacttttttgaatgaccatctggttgaaaaatctttctcatataagtttaaccacactttgatttgggttcattttttgttttgtttttttcaatcatgatattcagaaaaatccaggatccaaaatgtggcgtttttctaagaatgaaaattatatgtaagcttttaagcatcatgaagaacaatttatgttcacattaagatacgttctaaagggggatggccaaggggtgacatcttaattcctaaactaccttagctgcatagtggaagaggagagcatgaagcaaagaattccaggaaacccaagaggctgagaattcttttgtctaccatagaattattatccagactggaatttttgtttgttagaacacccttcagttgcaatatgctaatcccactttacaaagaatataaaagctatattttgaagacttgagttatttcagaaaaaactacagccctttttgtcttacctgccttttactttcgtgtggatatgtgaagcattgggtcgggaactagctgtagaacacaactaaaaactcatgtcttttttcacagaataatgtgccagttttttgtagcaatgttatttctcttggaagcagaaatgctttgtaccagagcacctccaaactgcattgaggagaagttccagaaccatcccctttttccatttttatataatttataaagaaagattaaagccatgttgactattttacagccactggagttaactaacccttccttgtatctgtcttcccaggagagaatgaagcaaaacaggaatttggttttcttttgatgtccagttacaccatccattctgttaattttgaaaaaatataccctccctttagtttgttgggggatataaattattctcaggaagaatataatgaactgtacagttactttgacctattaaaaaggtgttaccagtaaa

SEQ ID NO: 157863 - DNA, 540 bp, Artificial Sequence
  derived and/or modified sequence
agccactggaggatcttgagcagaggcgtgacgtaaattttaagaaacttgttgggatggttgtgttctaaagttaaggaatcaaggatgatgtcaaggcagaactggggctcccttgcatcttccagttacaaattcagtgccttctgcagtttccccagagctcctcaagaataacggaagggagaatatgacagatacctagcatctagcaaaataatggcagctgcttaccttgaccccaacttgaatcacacaccaaattcgagtactaagactcacctgggtactggtatggaacgttctcctggtgcaatggagcgagtattaaaggtctttcattattttgaaagcaatagtgagccaaccacctgggccagtattatcaggcatggagatgctactgatgtcaggggcatcattcagaagatagtggacagtcacaaagtaaagcatgtggcctgctatggattccgcctcagtcacctgcggtcagaggaggttcactggcttcacgtggatatgggcgtctccagtgtg

SEQ ID NO: 157864 - DNA, 4955 bp, Artificial Sequence
  derived and/or modified sequence
gaccactgtgagcccgcggcgtgaggcgtgggaggaagcgcggctgctgtcgcccagcgccgccccgtcgtcgtctgccttcgcttcacggcgccgagccgcggtccgagcagaactggggctcccttgcatcttccagttacaaattcagtgccttctgcagtttccccagagctcctcaagaataacggaagggagaatatgacagatacctagcatctagcaaaataatggcagctgcttaccttgaccccaacttgaatcacacaccaaattcgagtactaagactcacctgggtactggtatggaacgttctcctggtgcaatggagcgagtattaaaggtctttcattattttgaaagcaatagtgagccaaccacctgggccagtattatcaggcatggagatgctactgatgtcaggggcatcattcagaagatagtggacagtcacaaagtaaagcatgtggcctgctatggattccgcctcagtcacctgcggtcagaggaggttcactggcttcacgtggatatgggcgtctccagtgtgagggagaagtatgagcttgctcacccaccagaggagtggaaatatgaattgagaattcgttatttgccaaaaggatttctaaaccagtttactgaagataagccaactttgaatttcttctatcaacaggtgaagagcgattatatgttagagatagctgatcaagtggaccaggaaattgctttgaagttgggttgtctagaaatacggcgatcatactgggagatgcggggcaatgcactagaaaagaagtctaactatgaagtattagaaaaagatgttggtttaaagcgattttttcctaagagtttactggattctgtcaaggccaaaacactaagaaaactgatccaacaaacatttagacaatttgccaaccttaatagagaagaaagtattctgaaattctttgagatcctgtctccagtctacagatttgataaggaatgcttcaagtgtgctcttggttcaagctggattatttcagtggaactggcaatcggcccagaagaaggaatcagttacctaacggacaagggctgcaatcccacacatcttgctgacttcactcaagtgcaaaccattcagtattcaaacagtgaagacaaggacagaaaaggaatgctacaactaaaaatagcaggtgcacccgagcctctgacagtgacggcaccatccctaaccattgcggagaatatggctgacctaatagatgggtactgccggctggtgaatggaacctcgcagtcatttatcatcagacctcagaaagaaggtgaacgggctttgccatcaataccaaagttggccaacagcgaaaagcaaggcatgcggacacacgccgtctctgtgtcagaaacagatgattatgctgagattatagatgaagaagatacttacaccatgccctcaaccagggattatgagattcaaagagaaagaatagaacttggacgatgtattggagaaggccaatttggagatgtacatcaaggcatttatatgagtccagagaatccagctttggcggttgcaattaaaacatgtaaaaactgtacttcggacagcgtgagagagaaatttcttcaagaagccttaacaatgcgtcagtttgaccatcctcatattgtgaagctgattggagtcatcacagagaatcctgtctggataatcatggagctgtgcacacttggagagctgaggtcatttttgcaagtaaggaaatacagtttggatctagcatctttgatcctgtatgcctatcagcttagtacagctcttgcatatctagagagcaaaagatttgtacacagggacattgctgctcggaatgttctggtgtcctcaaatgattgtgtaaaattaggagactttggattatcccgatatatggaagatagtacttactacaaagcttccaaaggaaaattgcctattaaatggatggctccagagtcaatcaattttcgacgttttacctcagctagtgacgtatggatgtttggtgtgtgtatgtgggagatactgatgcatggtgtgaagccttttcaaggagtgaagaacaatgatgtaatcggtcgaattgaaaatggggaaagattaccaatgcctccaaattgtcctcctaccctctacagccttatgacgaaatgctgggcctatgaccccagcaggcggcccaggtttactgaacttaaagctcagctcagcacaatcctggaggaagagaaggctcagcaagaagagcgcatgaggatggagtccagaagacaggccacagtgtcctgggactccggagggtctgatgaagcaccgcccaagcccagcagaccgggttatcccagtccgaggtccagcgaaggattttatcccagcccacagcacatggtacaaaccaatcattaccaggtttctggctaccctggttcacatggaatcacagccatggctggcagcatctatccaggtcaggcatctcttttggaccaaacagattcatggaatcatagacctcaggagatagcaatgtggcagcccaatgtggaggactctacagtattggacctgcgagggattgggcaagtgttgccaacccatctgatggaagagcgtctaatccgacagcaacaggaaatggaagaagatcagcgctggctggaaaaagaggaaagatttctgaaacctgatgtgagactctctcgaggcagtattgacagggaggatggaagtcttcagggtccgattggaaaccaacatatatatcagcctgtgggtaaaccagatcctgcagctccaccaaagaaaccgcctcgccctggagctcccggtcatctgggaagccttgccagcctcagcagccctgctgacagctacaacgagggtgtcaagcttcagccccaggaaatcagcccccctcctactgccaacctggaccggtcgaatgataaggtgtacgagaatgtgacgggcctggtgaaagctgtcatcgagatgtccagtaaaatccagccagccccaccagaggagtatgtccctatggtgaaggaagtcggcttggccctgaggacattattggccactgtggatgagaccattcccctcctaccagccagcacccaccgagagattgagatggcacagaagctattgaactctgacctgggtgagctcatcaacaagatgaaactggcccagcagtatgtcatgaccagcctccagcaagagtacaaaaagcaaatgctgactgctgctcacgccctggctgtggatgccaaaaacttactcgatgtcattgaccaagcaagactgaaaatgcttgggcagacgagaccacactgagcctcccctaggagcacgtcttgctaccctcttttgaagatgttctctagccttccaccagcagcgaggaattaaccctgtgtcctcagtcgccagcacttacagctccaacttttttgaatgaccatctggttgaaaaatctttctcatataagtttaaccacactttgatttgggttcattttttgttttgtttttttcaatcatgatattcagaaaaatccaggatccaaaatgtggcgtttttctaagaatgaaaattatatgtaagcttttaagcatcatgaagaacaatttatgttcacattaagatacgttctaaagggggatggccaaggggtgacatcttaattcctaaactaccttagctgcatagtggaagaggagagcatgaagcaaagaattccaggaaacccaagaggctgagaattcttttgtctaccatagaattattatccagactggaatttttgtttgttagaacacccttcagttgcaatatgctaatcccactttacaaagaatataaaagctatattttgaagacttgagttatttcagaaaaaactacagccctttttgtcttacctgccttttactttcgtgtggatatgtgaagcattgggtcgggaactagctgtagaacacaactaaaaactcatgtcttttttcacagaataatgtgccagttttttgtagcaatgttatttctcttggaagcagaaatgctttgtaccagagcacctccaaactgcattgaggagaagttccagaaccatcccctttttccatttttatataatttataaagaaagattaaagccatgttgactattttacagccactggagttaactaacccttccttgtatctgtcttcccaggagagaatgaagcaaaacaggaatttggttttcttttgatgtccagttacaccatccattctgttaattttgaaaaaatataccctccctttagtttgttgggggatataaattattctcaggaagaatataatgaactgtacagttactttgacctattaaaaaggtgttaccagtaaagttcttgttgtaatatcctttcttttggttctgtttcttcagatggcttttcaggtgacttgtcagataagataacatacaagagagttcccaataattatcaggaagcctctcactaattagtttctttttttttatttaatcttctaaacaagtcaaggatgttaccacagaagggtagcgtggcgtaagttaaccttttcattccatcgtcacctattaaatgcagagctcaggatggaagtagcaatggtcttcaatgaaagaaccttcccctgcgcagggtctcactattccgctaactcggactcaaagcataattcacttgtcaaggaaattgttagcatttcccaggcccaccctagtcttgctagaatctctgtgagccacagagcagggagcaaatagaactgagatctccagcactagggactcagactccaaagggagggatttgagtgaattttttccaggtaaatacatgctcttatgtgcaaaagca

SEQ ID NO: 157865 - DNA, 750 bp, Artificial Sequence
  derived and/or modified sequence
gggattacaggcacatgccaccacacccggctgatatttgtatttttagtagagacggggttttaccgtcttggccaggctggtcttgaactcctgacttcaggtgatccacccaccttggcctcccaaagtgttgggattacaggcctgagccaccgtgcccggcagtgcttggtcttattaaacgctttatgaaagttagcttggaaagttaacctaacttggaaagacacaatagcttgacactgttgctatttgttaaataaggcagaactggggctcccttgcatcttccagttacaaattcagtgccttctgcagtttccccagagctcctcaagaataacggaagggagaatatgacagatacctagcatctagcaaaataatggcagctgcttaccttgaccccaacttgaatcacacaccaaattcgagtactaagactcacctgggtactggtatggaacgttctcctggtgcaatggagcgagtattaaaggtctttcattattttgaaagcaatagtgagccaaccacctgggccagtattatcaggcatggagatgctactgatgtcaggggcatcattcagaagatagtggacagtcacaaagtaaagcatgtggcctgctatggattccgcctcagtcacctgcggtcagaggaggttcactggcttcacgtggatatgggcgtctccagtgtgagggagaagtatgagcttgctcacccaccagaggagtggaa

SEQ ID NO: 157866 - DNA, 4127 bp, Artificial Sequence
  derived and/or modified sequence
atatgacagatacctagcatctagcaaaataatggcagctgcttaccttgaccccaacttgaatcacacaccaaattcgagtactaagactcacctgggtactggtatggaacgttctcctggtgcaatggagcgagtattaaaggtctttcattattttgaaagcaatagtgagccaaccacctgggccagtattatcaggcatggagatgctactgatgtcaggggcatcattcagaagatagtggacagtcacaaagtaaagcatgtggcctgctatggattccgcctcagtcacctgcggtcagaggaggttcactggcttcacgtggatatgggcgtctccagtgtgagggagaagtatgagcttgctcacccaccagaggagtggaaatatgaattgagaattcgttatttgccaaaaggatttctaaaccagtttactgaagataagccaactttgaatttcttctatcaacaggtgaagagcgattatatgttagagatagctgatcaagtggaccaggaaattgctttgaagttgggttgtctagaaatacggcgatcatactgggagatgcggggcaatgcactagaaaagaagtctaactatgaagtattagaaaaagatgttggtttaaagcgattttttcctaagagtttactggattctgtcaaggccaaaacactaagaaaactgatccaacaaacatttagacaatttgccaaccttaatagagaagaaagtattctgaaattctttgagatcctgtctccagtctacagatttgataaggaatgcttcaagtgtgctcttggttcaagctggattatttcagtggaactggcaatcggcccagaagaaggaatcagttacctaacggacaagggctgcaatcccacacatcttgctgacttcactcaagtgcaaaccattcagtattcaaacagtgaagacaaggacagaaaaggaatgctacaactaaaaatagcaggtgcacccgagcctctgacagtgacggcaccatccctaaccattgcggagaatatggctgacctaatagatgggtactgccggctggtgaatggaacctcgcagtcatttatcatcagacctcagaaagaaggtgaacgggctttgccatcaataccaaagttggccaacagcgaaaagcaaggcatgcggacacacgccgtctctgtgtcagaaacagatgattatgctgagattatagatgaagaagatacttacaccatgccctcaaccagggattatgagattcaaagagaaagaatagaacttggacgatgtattggagaaggccaatttggagatgtacatcaaggcatttatatgagtccagagaatccagctttggcggttgcaattaaaacatgtaaaaactgtacttcggacagcgtgagagagaaatttcttcaagaagccttaacaatgcgtcagtttgaccatcctcatattgtgaagctgattggagtcatcacagagaatcctgtctggataatcatggagctgtgcacacttggagagctgaggtcatttttgcaagtaaggaaatacagtttggatctagcatctttgatcctgtatgcctatcagcttagtacagctcttgcatatctagagagcaaaagatttgtacacagggacattgctgctcggaatgttctggtgtcctcaaatgattgtgtaaaattaggagactttggattatcccgatatatggaagatagtacttactacaaagcttccaaaggaaaattgcctattaaatggatggctccagagtcaatcaattttcgacgttttacctcagctagtgacgtatggatgtttggtgtgtgtatgtgggagatactgatgcatggtgtgaagccttttcaaggagtgaagaacaatgatgtaatcggtcgaattgaaaatggggaaagattaccaatgcctccaaattgtcctcctaccctctacagccttatgacgaaatgctgggcctatgaccccagcaggcggcccaggtttactgaacttaaagctcagctcagcacaatcctggaggaagagaaggctcagcaagaagagcgcatgaggatggagtccagaagacaggccacagtgtcctgggactccggagggtctgatgaagcaccgcccaagcccagcagaccgggttatcccagtccgaggtccagcgaaggattttatcccagcccacagcacatggtacaaaccaatcattaccaggactctacagtattggacctgcgagggattgggcaagtgttgccaacccatctgatggaagagcgtctaatccgacagcaacaggaaatggaagaagatcagcgctggctggaaaaagaggaaagatttctgaaacctgatgtgagactctctcgaggcagtattgacagggaggatggaagtcttcagggtccgattggaaaccaacatatatatcagcctgtgggtaaaccagatcctgcagctccaccaaagaaaccgcctcgccctggagctcccggtcatctgggaagccttgccagcctcagcagccctgctgacagctacaacgagggtgtcaagcttcagccccaggaaatcagcccccctcctactgccaacctggaccggtcgaatgataaggtgtacgagaatgtgacgggcctggtgaaagctgtcatcgagatgtccagtaaaatccagccagccccaccagaggagtatgtccctatggtgaaggaagtcggcttggccctgaggacattattggccactgtggatgagaccattcccctcctaccagccagcacccaccgagagattgagatggcacagaagctattgaactctgacctgggtgagctcatcaacaagatgaaactggcccagcagtatgtcatgaccagcctccagcaagagtacaaaaagcaaatgctgactgctgctcacgccctggctgtggatgccaaaaacttactcgatgtcattgaccaagcaagactgaaaatgcttgggcagacgagaccacactgagcctcccctaggagcacgtcttgctaccctcttttgaagatgttctctagccttccaccagcagcgaggaattaaccctgtgtcctcagtcgccagcacttacagctccaacttttttgaatgaccatctggttgaaaaatctttctcatataagtttaaccacactttgatttgggttcattttttgttttgtttttttcaatcatgatattcagaaaaatccaggatccaaaatgtggcgtttttctaagaatgaaaattatatgtaagcttttaagcatcatgaagaacaatttatgttcacattaagatacgttctaaagggggatggccaaggggtgacatcttaattcctaaactaccttagctgcatagtggaagaggagagcatgaagcaaagaattccaggaaacccaagaggctgagaattcttttgtctaccatagaattattatccagactggaatttttgtttgttagaacacccttcagttgcaatatgctaatcccactttacaaagaatataaaagctatattttgaagacttgagttatttcagaaaaaactacagccctttttgtcttacctgccttttactttcgtgtggatatgtgaagcattgggtcgggaactagctgtagaacacaactaaaaactcatgtcttttttcacagaataatgtgccagttttttgtagcaatgttatttctcttggaagcagaaatgctttgtaccagagcacctccaaactgcattgaggagaagttccagaaccatcccctttttccatttttatataatttataaagaaagattaaagccatgttgactattttacagccactggagttaactaacccttccttgtatctgtcttcccaggagagaatgaagcaaaacaggaatttggttttcttttgatgtccagttacaccatccattctgttaattttgaaaaaatataccctccctttagtttgttgggggatataaattattctcaggaagaatataatgaactgtacagttactttgacctattaaaaaggtgttaccagtaaagttcttgttgt

SEQ ID NO: 157867 - protein, 206 aa, Artificial Sequence
  derived and/or modified sequence
MALPCTLGLGMLLALPGALGSGGSAEDSVGSSSVTVVLLLLLLLLLATGLALAWRRLSRDSGGYYHPARLGAALWGRTRRLLWASPPGRWLQARAELGSTDNDLERQEDEQDTDYDHVADGGLQADPGEGEQQCGEASSPEQVPVRAEEARDSDTEGDLVLGSPGPASAGGSAEALLSDLHAFAGSAAWDDSARAAGGQGLHVTAL

SEQ ID NO: 157868 - DNA, 621 bp, Artificial Sequence
  derived and/or modified sequence
atggctctaccttgcaccctaggattaggcatgctgctggccctgcccggggcactaggcagtggcggctctgctgaggattcggtgggcagttcttctgtgacagtagttctacttctgctgctgctcctcctactcgctacaggtctcgcccttgcctggagacgtctttctcgtgatagtggtgggtattaccatccagctcgcttaggcgccgccctctgggggaggaccagaaggttgctgtgggcatcgccccctggccgttggctgcaggctcgcgctgaactgggaagcacggataacgacctggagagacaggaagatgaacaggataccgactacgatcacgtggccgatggcggtctgcaagcagatcctggggagggcgagcagcaatgcggggaggcctcctctccggagcaggtccctgttagggcagaggaagcccgcgactcagacaccgagggagatctcgtgctgggctctccagggcctgcctctgccggcggctccgccgaagccctcctgtctgacctgcatgcattcgctgggagcgcggcgtgggacgacagcgcacgcgccgccggaggccaagggctgcatgtgaccgccctgtag

SEQ ID NO: 157869 - DNA, 621 bp, Artificial Sequence
  derived and/or modified sequence
atggccctgccctgcaccctgggcctgggcatgctgctggccctgcccggggccctgggcagcggcggcagcgctgaggacagcgtgggcagcagctctgtgacagtggtgctgctgctgctgctgctgctgctgctggccaccggcctggccctggcctggaggcggctgagccgggacagcggcggctactaccacccagcccggctgggcgccgccctgtggggccgcacccggcggctgctgtgggccagccccccaggccgctggctgcaggcccgggcagagctgggcagcacagacaatgacctggagcggcaggaggatgagcaggacacagattatgaccacgtggctgatggcggcctgcaggccgaccctggagagggggagcagcagtgtggggaggccagcagccctgagcaggtgcctgtgcgggcagaggaggcccgggacagcgacacagaaggagacctggtgctgggcagccctggccctgccagcgctgggggcagcgctgaggccctgctgagtgacctgcacgcctttgctggcagcgctgcctgggatgacagcgcccgggccgccggcggccagggcctgcacgtgacagccctgtag

SEQ ID NO: 157870 - DNA, 621 bp, Artificial Sequence
  derived and/or modified sequence
atggccctgccctgcaccctgggcctgggcatgctgctggccctgcctggggccctaggctctgggggtagcgcggaggactctgtgggttcctccagcgtgactgtagtcctcctccttttactgttactcctcctggctaccggcttggctttggcctggaggaggctctcaagggactccgggggatactaccatcctgcacgcctgggggccgccctatggggaaggacaaggcggttgctgtgggcttctcctcccggaaggtggctgcaggccagggctgaactgggcagcacagacaacgatctcgaacgtcaggaagacgagcaggatacggactacgatcatgttgcggacggtggtctgcaagccgacccgggtgaaggagagcagcaatgcggcgaggcgagctcccccgagcaggtacccgtcagggccgaggaggccagagactctgacactgagggcgatttagttctgggttccccaggacccgccagtgctgggggatctgccgaggctctgctgtccgacctgcacgcctttgccggttccgctgcctgggacgacagtgcaagggctgccgggggccaaggccttcacgtcaccgccctgtag

SEQ ID NO: 157871 - DNA, 621 bp, Artificial Sequence
  derived and/or modified sequence
atggccttaccttgtacacttgggctcggtatgcttctagccctgcccggtgccttgggtagcggcggatctgctgaggattctgttggaagtagctctgttacagtcgtgctgctcttgctgctcctcctgctgctggccaccggtttagcgcttgcatggagacgcctctcccgggattctggtgggtactaccatccagcgcgactgggggctgctctgtgggggaggacccggaggttattatgggcctctccacctgggagatggctacaggctcgtgccgagctgggctccactgataatgacctcgagcggcaggaggacgagcaggacacagactatgatcacgttgccgatggcggtcttcaggctgatcctggtgagggggagcagcaatgtggggaagcctcctcgcctgaacaggtgccagtgcgtgccgaagaggccagagactccgacaccgaaggggacttagtcctcgggtcgcctgggcctgcaagcgccggaggctcagcggaggccttactgtctgatctgcacgcctttgccggaagcgccgcatgggatgatagcgctagggcagctggcggtcaaggcctgcacgtgaccgcgctatag

SEQ ID NO: 157872 - DNA, 1292 bp, Artificial Sequence
  derived and/or modified sequence
aaattctctttctaaaagccaggctgacctgctgctgcaagggtggggctgagaagtctggaaacctggagacagaggatgtcacaggagtcacacatgtgcagaaggtctgggggcagtgagcagccccacaggcattgctcccctggattgtcaggcagggaaactgaggcagaagacctgagaacacatgcaaggctgcatccagcttcaagttggtgctgcttcttccttggaggacaggcccggcagcccagcctcctccagagagactggggagggtctggtgtggaccaggggtcctgcagcagggaggggcaggtggggtatgtgggcaggaagcggaagcctgggccacccttcactgcagacgagcactgagctcacttctcgctcgacacagccagagctggaggtgggtgcccggcacggaggggcctgcggaccaatggctctgccctgcaccttagggctcgggatgctgctggccctgccaggggccttgggctcgggtggcagcgcggaggacagcgtgggctccagctctgtcaccgttgtcctgctgctgctgctgctcctactgctggccactggcctagcactggcctggcgccgcctcagccgtgactcagggggctactaccacccggcccgcctaggtgccgcgctgtggggccgcacgcggcgcctgctctgggccagccccccaggtcgctggctgcaggcccgagctgagctggggtccacagacaatgaccttgagcgacaggaggatgagcaggacacagactatgaccacgtcgcggatggtggcctgcaggctgaccctggggaaggcgagcagcaatgtggagaggcgtccagcccagagcaggtccccgtgcgggctgaggaagccagagacagtgacacggagggcgacctggtcctcggctccccaggaccagcgagcgcagggggcagtgctgaggccctgctgagtgacctgcacgcctttgctggcagcgcagcctgggatgacagcgccagggcagctgggggccagggcctccatgtcaccgcactgtagaggccggtcttggtgtcccatccctgtcacagccgctcactccccgtgcctctgcttcccaagatgccatggctggactggacccccagcccacatgaccatgcctcagactgtcaccccctaccagttcccaagtccatgtgtaccccgctcaccacgggaacggccccccccaaccacaggcatcaggcaaccatttgaaataaaactccttcagcctgtg

SEQ ID NO: 157873 - DNA, 621 bp, Artificial Sequence
  derived and/or modified sequence
atggccctgccctgcaccctgggcctgggcatgctgctggccctgcccggcgccctgggcagcggcggcagcgccgaggacagcgtgggcagcagcagcgtgaccgtggtgctgctgctgctgctgctgctgctgctggccaccggcctggccctggcctggagaagactgagcagagacagcggcggctactaccaccccgccagactgggcgccgccctgtggggcagaaccagaagactgctgtgggccagcccccccggcagatggctgcaggccagagccgagctgggcagcaccgacaacgacctggagagacaggaggacgagcaggacaccgactacgaccacgtggccgacggcggcctgcaggccgaccccggcgagggcgagcagcagtgcggcgaggccagcagccccgagcaggtgcccgtgagagccgaggaggccagagacagcgacaccgagggcgacctggtgctgggcagccccggccccgccagcgccggcggcagcgccgaggccctgctgagcgacctgcacgccttcgccggcagcgccgcctgggacgacagcgccagagccgccggcggccagggcctgcacgtgaccgccctgtag

SEQ ID NO: 157874 - protein, 842 aa, Artificial Sequence
  derived and/or modified sequence
MSRPLSDQEKRKQISVRGLAGVENVTELKKNFNRHLHFTLVKDRNVATPRDYYFALAHTVRDHLVGRWIRTQQHYYEKDPKRIYYLSLEFYMGRTLQNTMVNLALENACDEATYQLGLDMEELEEIEEDAGLGNGGLGRLAACFLDSMATLGLAAYGYGIRYEFGIFNQKISGGWQMEEADDWLRYGNPWEKARPEFTLPVHFYGHVEHTSQGAKWVDTQVVLAMPYDTPVPGYRNNVVNTMRLWSAKAPNDFNLKDFNVGGYIQAVLDRNLAENISRVLYPNDNFFEGKELRLKQEYFVVAATLQDIIRRFKSSKFGCRDPVRTNFDAFPDKVAIQLNDTHPSLAIPELMRILVDLERMDWDKAWDVTVRTCAYTNHTVLPEALERWPVHLLETLLPRHLQIIYEINQRFLNRVAAAFPGDVDRLRRMSLVEEGAVKRINMAHLCIAGSHAVNGVARIHSEILKKTIFKDFYELEPHKFQNKTNGITPRRWLVLCNPGLAEVIAERIGEDFISDLDQLRKLLSFVDDEAFIRDVAKVKQENKLKFAAYLEREYKVHINPNSLFDIQVKRIHEYKRQLLNCLHVITLYNRIKREPNKFFVPRTVMIGGKAAPGYHMAKMIIRLVTAIGDVVNHDPAVGDRLRVIFLENYRVSLAEKVIPAADLSEQISTAGTEASGTGNMKFMLNGALTIGTMDGANVEMAEEAGEENFFIFGMRVEDVDKLDQRGYNAQEYYDRIPELRQVIEQLSSGFFSPKQPDLFKDIVNMLMHHDRFKVFADYEDYIKCQEKVSALYKNPREWTRMVIRNIATSGKFSSDRTIAQYAREIWGVEPSRQRLPAPDEAI

SEQ ID NO: 157875 - protein, 832 aa, Artificial Sequence
  derived and/or modified sequence
MSRPLSDQEKRKQISVRGLAGVENVTELKKNFNRHLHFTLVKDRNVATPRDYYFALAHTVRDHLVGRWIRTQQHYYEKDPKRIYYLSLEFYMGRTLQNTMVNLALENACDEATYQVGLGRLAACFLDSMATLGLAAYGYGIRYEFGIFNQKISGGWQMEEADDWLRYGNPWEKARPEFTLPVHFYGHVEHTSQGAKWVDTQVVLAMPYDTPVPGYRNNVVNTMRLWSAKAPNDFNLKDFNVGGYIQAVLDRNLAENISRVLYPNDNFFEGKELRLKQEYFVVAATLQDIIRRFKSSKFGCRDPVRTNFDAFPDKVAIQLNDTHPSLAIPELMRILVDLERMDWDKAWDVTVRTCAYTNHTVLPEALERWPVHLLETLLPRHLQIIYEINQRFLNRVAAAFPGDVDRLRRMSLVEEGAVKRINMAHLCIAGSHAVNGVARIHSEILKKTIFKDFYELEPHKFQNKTNGITPRRWLVLCNPGLAEVIAERIGEDFISDLDQLRKLLSFVDDEAFIRDVAKVKQENKLKFAAYLEREYKVHINPNSLFDIQVKRIHEYKRQLLNCLHVITLYNRIKREPNKFFVPRTVMIGGKAAPGYHMAKMIIRLVTAIGDVVNHDPAVGDRLRVIFLENYRVSLAEKVIPAADLSEQISTAGTEASGTGNMKFMLNGALTIGTMDGANVEMAEEAGEENFFIFGMRVEDVDKLDQRGYNAQEYYDRIPELRQVIEQLSSGFFSPKQPDLFKDIVNMLMHHDRFKVFADYEDYIKCQEKVSALYKNPREWTRMVIRNIATSGKFSSDRTIAQYAREIWGVEPSRQRLPAPAPHAEGGVLELDL

SEQ ID NO: 157876 - DNA, 2529 bp, Artificial Sequence
  derived and/or modified sequence
atgagccgcccactgagtgaccaagagaagcgtaagcaaatcagcgtacgaggtctggcaggcgttgaaaatgtaacggagctgaaaaagaactttaatcgacaccttcacttcaccctggtcaaggacaggaacgtcgccacaccccgagactactacttcgccctagcacacactgtgagagaccaccttgttggccgctggatccggacacagcaacattactacgagaaagaccctaagaggatatactacctgagcctggagttttatatgggccgcacattacagaacaccatggtgaacctcgctctggagaacgcctgtgacgaggccacttaccaactgggcctggacatggaggagttggaggagatcgaggaggatgctggcctgggaaacgggggcctgggacgactcgctgcttgcttcctggactctatggctactctagggctcgccgcctatggctacgggatcagatatgaatttggaattttcaatcagaagatctccggggggtggcaaatggaggaggctgacgactggctcaggtatgggaatccttgggagaaggccaggcctgaattcactctgcccgtgcatttctatgggcatgtcgaacacacgtcacagggagccaaatgggtcgatacccaagtggtgttagccatgccatatgatacacccgtccccgggtatcggaacaacgtagtgaatacaatgcggctgtggtcagcaaaagcgcccaacgattttaacctgaaggacttcaacgtcgggggctacatacaggccgtgctcgacagaaatctggccgagaatatatctcgggttctctatccaaatgacaacttcttcgaaggcaaagaattacgcctgaaacaggagtactttgtggtagccgcaactttgcaggacatcattcggcgattcaaatcctccaagtttgggtgtcgagatcccgttcgtacaaactttgacgcctttcccgataaagtggcaattcagttgaacgacactcatccctccctcgccatccccgaactcatgaggatattagtggatctggaaagaatggattgggacaaggcgtgggatgtgaccgtccggacttgcgcctacaccaaccacacagtgctgcctgaagctttagagcgctggcctgtgcatctgctggaaaccctgctgccccgccacctccagatcatttatgaaatcaatcagcgctttctgaatagagtggccgcagcatttccaggtgatgtcgatcggttacgacggatgagcctggtcgaggagggcgcagtgaaaaggatcaacatggcccacctatgcatcgcaggctctcacgcggtgaatggggtggcaaggatccattcggaaattttgaaaaaaaccatcttcaaagacttctatgagctggaaccgcacaagttccagaataagaccaatggcattacgccaagacggtggctggtgctgtgtaatcccggtctggcagaggtgatcgccgagcggatcggggaggatttcatcagtgatctcgaccagctcaggaaactcttgagctttgtagacgacgaagcctttatccgagatgtcgctaaggtgaaacaggagaataagctcaagttcgcggcatatcttgaaagggagtacaaggtgcacatcaatcccaactcgttgtttgatatacaagtgaagaggatccacgaatataaaaggcagctgctgaactgccttcacgtgattacactgtacaataggatcaaacgagaacctaacaagttctttgtcccccgcacagtgatgattggcggaaaggcagcccctggctatcacatggcaaagatgataataaggctcgtgacagcaatcggtgacgtggtgaaccatgatcctgccgtcggagatcggctgcgcgtcatctttctagagaattatcgggtctccctggccgaaaaagtcattcctgccgccgacctaagcgagcagatatccactgcggggactgaggccagtggcaccgggaacatgaaattcatgctcaacggagcactgacaatcgggaccatggatggtgcgaatgttgagatggccgaagaggcgggggaagaaaatttttttatctttggaatgcgggtagaggatgtagacaaactggatcaaagaggttacaacgcacaggagtactatgaccggattcctgaactcaggcaggtcattgagcagctttcatccggcttcttctcacctaagcagcctgacctgtttaaagacatagtaaatatgcttatgcaccatgacaggtttaaggtgtttgccgactacgaggactacattaaatgccaggagaaagtgtccgccttgtataagaaccccagagaatggactcgtatggtgatcagaaacatcgctacttccggcaaatttagtagcgaccgcacaattgcccagtatgctcgggagatctggggagtggagccctctcgtcagaggctacctgcgcctgacgaagccatctag

SEQ ID NO: 157877 - DNA, 2499 bp, Artificial Sequence
  derived and/or modified sequence
atgtctcggccactctcggatcaggagaagagaaaacagatttctgtccgggggctggcgggggtcgaaaacgtcaccgagcttaaaaagaacttcaacagacacctgcatttcacacttgtgaaggatagaaatgtggctactccaagagactactacttcgcgctggctcacaccgtaagggaccacctggtgggacgatggataagaactcagcagcattattatgaaaaagatccaaaaagaatttactaccttagcctcgagttttatatgggacggactttgcaaaatacaatggtaaacctggctctggaaaacgcctgtgacgaggccacctaccaggttgggttaggcagattagctgcctgtttcctggactctatggctactctcggcttagccgcctatgggtatgggatccggtacgaattcggcatcttcaaccaaaaaataagtggagggtggcagatggaggaggccgacgattggctccgatacggcaacccctgggaaaaggccagacccgaattcacactgcctgtacatttttatggacatgtggaacacacgtcacagggggcaaagtgggtggacacacaggtcgtcctcgcaatgccatatgacactcctgtgcccggctacaggaacaacgtggtgaataccatgagactgtggtcagcaaaggcccctaatgacttcaacttgaaagacttcaacgttggcggttacatccaggctgtcctcgaccgtaatttagctgagaacatatctcgtgtgctctacccaaacgacaacttttttgaaggcaaggaactcaggcttaaacaggagtactttgtggttgccgccacccttcaagacataatcagaaggttcaagagtagcaagtttggttgtagagacccagtgagaaccaatttcgatgcattcccagataaagtggcgattcaactgaatgacactcacccttctctcgcaatacccgaattaatgcgtattttggtggatctcgaacgcatggactgggataaagcttgggacgtgacagtaaggacatgcgcctacacaaatcacactgttttaccagaagctttggagcgctggcccgtgcacctgctggaaactctgctacccagacaccttcagatcatttatgaaattaaccagcgattcctgaatagagtagccgccgctttccccggggacgttgatcgtttaaggaggatgtccttagtggaggaaggggctgtgaaacgaattaacatggcccatctctgcattgcagggtcccacgcagtcaatggagtggccaggatccattccgagatcttaaagaagaccatatttaaagacttctatgagctggaaccccataagtttcaaaataagacgaatggcataacaccgcggcgttggctcgtcctctgcaatccaggtctcgccgaggtgatcgccgaacgtatcggcgaagattttataagcgacctcgatcagctcaggaagctgctgagctttgtcgacgatgaagctttcattcgagacgtggcgaaggtgaaacaggaaaataaactgaaatttgccgcctacctggagcgagaatacaaggtccacatcaatccaaacagtttgtttgacattcaggtgaagcggatacacgaatacaaacgtcagttgctgaactgtctgcatgttataacactgtacaatagaattaaaagggagccaaataaattctttgtgcccaggacggttatgattggagggaaggccgcacccgggtatcacatggccaaaatgataattcgactggtgactgctattggtgatgtggttaaccatgatccagcagttggcgatagactgcgggtgatattcctggaaaactacagagtgtcgctcgcagagaaggtgatccccgcagccgacctctcagagcagatctccaccgccggaaccgaagccagtggcaccgggaacatgaagttcatgctcaatggcgctctcactatcggcactatggacggggcaaacgtggagatggcagaagaagcaggcgaagagaattttttcatcttcggaatgcgggttgaggacgtggacaaactggaccagagagggtataacgcccaggaatactacgaccggattcctgagctgcggcaagtgatagaacaactaagtagtggtttcttctcccccaagcagccagatctcttcaaggatatagtgaatatgctgatgcaccacgaccgctttaaggtcttcgctgactatgaggattacatcaaatgccaagaaaaggtctcagcgctttataagaatcctcgggagtggacaaggatggtgattagaaatatcgcaacctcagggaagttttcctccgaccgaaccatcgctcagtacgccagggaaatttggggagttgagccatcccggcagcgattacccgcccccgctccccacgcagagggcggagtgttagagctcgacctttag

SEQ ID NO: 157878 - DNA, 2529 bp, Artificial Sequence
  derived and/or modified sequence
atgagccggcccctgagtgaccaggagaagaggaagcagatctctgtgcggggcctggccggcgtggagaatgtgacagagctgaagaagaacttcaacagacacctgcacttcaccctggtgaaggacagaaatgtggccaccccccgggactactactttgccctggcccacacagtgcgggaccacctggtgggccgctggatccgcacccagcagcactactatgagaaggaccccaagaggatctactacctgagcctggagttctacatgggccgcaccctgcagaacaccatggtgaacctggccctggagaatgcctgtgatgaggccacctaccagctgggcctggacatggaggagctggaggagattgaggaggatgctggcctgggcaatggaggcctgggccgcctggccgcctgcttcctggacagcatggccaccctgggcctggccgcctacggctacggcatccgctatgaatttggcatcttcaaccagaagatcagcggcggctggcagatggaggaggctgatgactggctgcgctatggcaacccctgggagaaggcccggcctgagttcaccctgcctgtgcacttctacggccacgtggagcacaccagccagggcgccaagtgggtggacacccaggtggtgctggccatgccctatgacacccctgtgcccggctacagaaataatgtggtgaacaccatgaggctgtggagcgccaaggccccaaatgacttcaacctgaaggacttcaacgtgggcggctacatccaggccgtgctggacaggaacctggccgagaacatcagccgggtgctgtacccaaatgacaacttctttgagggcaaggagctgcggctgaagcaggagtactttgtggtggccgccaccctgcaggacatcatccgccgcttcaagagcagcaagtttggctgccgggaccctgtgaggaccaactttgatgccttcccagacaaggtggccatccagctgaatgacacccaccccagcctggccatccctgagctgatgaggatcctggtggacctggagaggatggactgggacaaggcctgggatgtgacagtgaggacctgtgcctacaccaaccacacagtgctgcctgaggccctggagcgctggcctgtgcacctgctggagaccctgctgcccaggcacctgcagatcatctatgagatcaaccagcgcttcctgaacagagtggccgccgccttccctggagatgtggaccggctgcggaggatgagcctggtggaggagggcgctgtgaagaggatcaacatggcccacctgtgcatcgccggcagccatgctgtgaatggagtggcccgcatccacagcgagatcctgaagaagaccatcttcaaggacttctatgagctggagccccacaagttccagaacaagaccaacggcatcaccccccggcgctggctggtgctgtgcaaccctggcctggccgaggtgattgctgagcgcatcggggaggacttcatcagtgacctggaccagctgaggaagctgctgagctttgtggatgatgaggccttcatcagagatgtggccaaggtgaagcaggagaacaagctgaagtttgctgcctacctggagcgggagtacaaggtgcacatcaaccccaacagcctgtttgacatccaggtgaagaggatccacgagtacaagaggcagctgctgaactgcctgcacgtgatcaccctgtacaaccgcatcaagcgggagcccaacaagttctttgtgcccaggacagtgatgattggaggcaaggccgcccctggctaccacatggccaagatgatcatccggctggtgacagccatcggagatgtggtgaaccacgaccctgctgtgggggaccggctgcgggtcatcttcctggagaactacagagtgtccctggccgagaaggtgatcccagctgctgacctgtctgagcagatcagcacagctggaacagaggccagcggcactggaaacatgaagttcatgctgaatggagccctgaccatcggcaccatggatggagccaacgtggagatggccgaggaggccggggaggagaacttcttcatcttcggcatgagggtggaggatgtggacaagctggaccagaggggctacaatgcccaggagtactatgaccgcatccctgagctgcggcaggtgattgagcagctgagcagcggcttcttcagccccaagcagcctgacctcttcaaggacatcgtgaacatgctgatgcaccacgaccgcttcaaggtgtttgctgactatgaggactacatcaagtgccaggagaaggtgtctgccctgtacaagaacccccgggagtggaccaggatggtgatccggaacatcgccaccagcggcaagttcagcagtgacaggaccatcgcccagtatgcccgggagatctggggcgtggagcccagccggcagaggctgcctgccccagatgaggccatctag

SEQ ID NO: 157879 - DNA, 2499 bp, Artificial Sequence
  derived and/or modified sequence
atgagccggcccctgagtgaccaggagaagaggaagcagatctctgtgcggggcctggccggcgtggagaatgtgacagagctgaagaagaacttcaacagacacctgcacttcaccctggtgaaggacagaaatgtggccaccccccgggactactactttgccctggcccacacagtgcgggaccacctggtgggccgctggatccgcacccagcagcactactatgagaaggaccccaagaggatctactacctgagcctggagttctacatgggccgcaccctgcagaacaccatggtgaacctggccctggagaatgcctgtgatgaggccacctaccaggtgggcctgggccgcctggccgcctgcttcctggacagcatggccaccctgggcctggccgcctacggctacggcatccgctatgaatttggcatcttcaaccagaagatcagcggcggctggcagatggaggaggctgatgactggctgcgctatggcaacccctgggagaaggcccggcctgagttcaccctgcctgtgcacttctacggccacgtggagcacaccagccagggcgccaagtgggtggacacccaggtggtgctggccatgccctatgacacccctgtgcccggctacagaaacaacgtggtgaacaccatgaggctgtggagcgccaaggccccaaatgacttcaacctgaaggacttcaacgtgggcggctacatccaggccgtgctggacaggaacctggccgagaacatcagccgggtgctgtacccaaatgacaacttctttgagggcaaggagctgcggctgaagcaggagtactttgtggtggccgccaccctgcaggacatcatccgccgcttcaagagcagcaagtttggctgccgggaccctgtgaggaccaactttgatgccttcccagacaaggtggccatccagctgaatgacacccaccccagcctggccatccctgagctgatgaggatcctggtggacctggagaggatggactgggacaaggcctgggatgtgacagtgaggacctgtgcctacaccaaccacacagtgctgcctgaggccctggagcgctggcctgtgcacctgctggagaccctgctgcccaggcacctgcagatcatctatgagatcaaccagcgcttcctgaacagagtggccgccgccttccctggagatgtggaccggctgcggaggatgagcctggtggaggagggcgctgtgaagaggatcaacatggcccacctgtgcatcgccggcagccatgctgtgaatggagtggcccgcatccacagcgagatcctgaagaagaccatcttcaaggacttctatgagctggagccccacaagttccagaacaagaccaacggcatcaccccccggcgctggctggtgctgtgcaaccctggcctggccgaggtgattgctgagagaattggagaggacttcatcagtgacctggaccagctgaggaagctgctgagctttgtggatgatgaggccttcatcagagatgtggccaaggtgaagcaggagaacaagctgaagtttgctgcctacctggagcgggagtacaaggtgcacatcaaccccaacagcctgtttgacatccaggtgaagagaattcatgagtacaagaggcagctgctgaactgcctgcacgtgatcaccctgtacaaccgcatcaagcgggagcccaacaagttctttgtgcccaggacagtgatgattggaggcaaggccgcccctggctaccacatggccaagatgatcatccggctggtgacagccatcggagatgtggtgaaccacgaccctgctgtgggggaccggctgcgggtcatcttcctggagaactacagagtgtccctggccgagaaggtgatcccagctgctgacctgtctgagcagatcagcacagctggaacagaggccagcggcaccggcaacatgaagttcatgctgaatggagccctgaccatcggcaccatggatggagccaacgtggagatggccgaggaggccggggaggagaacttcttcatcttcggcatgagggtggaggatgtggacaagctggaccagaggggctacaatgcccaggagtactatgaccgcatccctgagctgcggcaggtgattgagcagctgagcagcggcttcttcagccccaagcagcctgacctcttcaaggacatcgtgaacatgctgatgcaccacgaccgcttcaaggtgtttgctgactatgaggactacatcaagtgccaggagaaggtgtctgccctgtacaagaacccccgggagtggaccaggatggtgatcagaaatattgccaccagcggcaagttcagcagtgacaggaccatcgcccagtatgcccgggagatctggggcgtggagcccagccggcagaggctgcctgccccagcccctcatgctgagggcggcgtgctggagctggacctgtag

SEQ ID NO: 157880 - DNA, 2529 bp, Artificial Sequence
  derived and/or modified sequence
atgagccggcccctgagcgaccaggagaagcggaagcagatcagcgtccggggactcgctggcgtggagaatgtgaccgaactaaagaaaaacttcaatcgccacctgcacttcactctggttaaagatcggaacgtggctacacctcgcgattactacttcgctctcgcgcacacagtgcgggaccatcttgttggcagatggatccggactcaacagcactactacgaaaaagaccccaaacggatctactatctgagtctcgagttttatatgggccggacattgcagaacactatggttaatctggcactagaaaatgcctgcgatgaggctacataccaactgggactggacatggaggaacttgaagagattgaggaggacgcggggctgggtaatggtggcctcgggagactggcagcatgtttcctggactcaatggccacactaggtctagctgcttacgggtatggcatacgctacgaatttggaatttttaatcagaaaatcagtggtggctggcagatggaagaagccgacgactggctgaggtatggaaatccgtgggaaaaggctcggcccgagtttacccttcccgtgcatttttacggacacgtggagcacacaagtcagggcgcgaagtgggtggatactcaggtggtgctggctatgccctacgacacgcctgttccaggatatagaaacaatgttgtgaacactatgagattgtggtccgcaaaggcccccaacgatttcaacctgaaagactttaatgtgggaggctatattcaggcagttctcgatcggaacctggcggaaaacatcagtcgagttttgtacccaaatgataatttcttcgaaggaaaggagctgcggttgaaacaggaatatttcgtcgtggccgctacattacaggatataatccgcaggttcaagtctagcaagttcgggtgccgcgaccctgttagaactaacttcgacgccttccccgacaaagtggcaatccagcttaacgacactcatccctccctggccatccctgaattgatgcggattctggtagacctggagcgcatggactgggacaaagcttgggacgtgacagtgcggacttgcgcctacacaaaccacacagtgttgcctgaagctcttgagcggtggcccgtgcacctgctggagaccctgctgccacgacacctgcagattatatatgagataaatcaacgattcctaaacagggtggccgctgcattccccggagatgtggacagacttcgtaggatgtccctagtggaagaaggcgcggttaagaggattaacatggcccatttatgcattgcgggttcccacgcagttaacggtgtggcccggattcactcagagattctgaagaaaaccatcttcaaggatttctatgagctggagccacacaaattccagaacaagaccaacgggatcactccaaggaggtggctggtgctgtgtaaccccggactggcggaagtgattgcagagaggatcggcgaagactttatttctgatctggatcaactaaggaagctgttgtcatttgtcgacgatgaagccttcatccgggacgtcgctaaagtgaagcaggaaaataaacttaagtttgccgcttatttggagcgggagtacaaagtgcatatcaaccccaacagcctcttcgatatccaagttaaaaggatccacgaatacaagaggcaattgctcaattgtttgcacgtgatcacactgtataataggataaagcgcgaacctaacaagttttttgtcccaagaacagtgatgatcggggggaaagctgcacctggataccacatggcaaagatgatcattagactggtgactgcaattggtgacgtggtaaaccatgatccggcagtgggcgataggctgagagttatttttctggagaactatcgggttagtttggctgagaaagtgatccctgcagcagacctgtctgaacagatttccaccgctgggaccgaggcctcaggcaccggcaatatgaagtttatgctaaatggggcccttactatagggactatggatggcgccaacgttgagatggccgaggaggctggagaggaaaactttttcatctttggcatgcgcgttgaagacgtggacaaactcgaccagagaggctacaatgcacaggaatactatgacagaatacccgaactgaggcaggtgattgagcagctgagcagcggttttttcagcccaaagcaaccagacctgttcaaagacattgtcaacatgctcatgcaccatgaccggttcaaagtgttcgctgactacgaggattatattaaatgccaggagaaagtaagcgctctctataaaaaccccagggaatggacccgaatggttattaggaatatcgcgacgagcgggaagtttagttctgacagaacaattgcccagtatgcacgcgagatctggggggtcgaaccgtcaaggcagcgcctgcctgctccggacgaggcaatctag

SEQ ID NO: 157881 - DNA, 2499 bp, Artificial Sequence
  derived and/or modified sequence
atgagccggcccctgagcgaccaggagaagcggaagcagatcagcgtaagaggcctagccggggttgagaacgtgactgaacttaaaaaaaattttaatagacacttacactttactctcgtgaaggaccggaacgtcgccacccctcgtgactattacttcgccctggcccataccgtgagggaccacttggtagggcggtggatccgtacccagcagcattactatgagaaggatcccaaaagaatttactatttatctctggagttttatatgggaaggacactgcagaacactatggtcaatttagcactggaaaatgcatgcgatgaggccacttaccaggtcgggcttggtcgcctggcagcctgtttcttggactcgatggccaccctaggactggccgcctacgggtatggcatccggtacgaattcggcatcttcaaccagaagatcagcgggggctggcagatggaagaggccgacgattggctgcgctatggaaacccctgggagaaggccaggcctgaattcacgctcccagtacatttttatggacatgtcgaacacactagccagggggcgaagtgggttgatacacaggtggttctcgcaatgccctatgatacccccgtgcccggctatcgaaataatgtggtgaacactatgcggctctggtcagccaaagcccctaatgatttcaatcttaaggattttaatgtgggagggtacatccaggcagttctcgacagaaacctcgccgaaaacatcagtagagtgttgtaccccaacgataacttcttcgagggcaaagagctccgattgaaacaggaatattttgtggtggccgcaacactgcaggacattatccgtagattcaaaagctcgaaattcggctgtcgcgatcccgttcgtactaactttgatgcattccccgataaagttgcgattcagctgaacgacacccatcctagcctcgccatccctgagctgatgcgaattctcgtagacctcgagcggatggactgggataaggcatgggacgtgacagttcggacgtgcgcttacaccaatcacaccgtgctcccggaggcattagagagatggcccgtacatctgctggaaacactgttacctaggcacctgcagatcatatatgagatcaaccagagattcctgaatagggtcgccgctgccttcccgggagacgttgataggttaaggaggatgagtctggtggaggaaggtgccgtgaagcgaatcaacatggcccacctctgtattgcaggttcgcacgctgtgaatggcgtcgcaaggatccatagcgaaatcctcaagaaaactatatttaaggatttctacgaactggagccacataaatttcagaataagactaatggaatcacgccgaggagatggctggtgctttgtaaccctggcttggcggaagttattgccgaacgcatcggcgaggactttataagtgatttagatcaactcagaaaattgttatcattcgtggacgatgaagcctttatccgagatgtggccaaagtgaaacaggaaaacaaactcaaatttgccgcctatttggaacgcgagtacaaggtccacatcaaccctaatagtctgtttgatatccaggtgaaacgcatccacgaatacaagcggcaactccttaattgcctccacgtgatcacactatacaatagaatcaaacgcgaacccaacaaatttttcgtcccccggacagtcatgattgggggtaaggcagcccccggctatcatatggctaagatgatcatccgcctggtgactgctatcggtgatgtggtgaaccacgatcctgccgtcggagaccgcttacgcgtgatctttctggagaattacagagttagcttagccgagaaggtcatcccagctgccgatttgagtgaacagatctccacagccggaactgaggcaagtgggacaggaaacatgaagtttatgctcaatggagcattgacgatcgggaccatggatggtgcaaatgtggaaatggccgaggaagcaggagaagagaattttttcattttcggaatgcgagttgaggatgtcgataaattggatcagcgcggatacaacgcacaagaatactacgaccgaatcccagagctcagacaagttatagaacagctttcctctggattctttagcccaaaacagcctgaccttttcaaagacatcgtgaatatgctgatgcatcatgaccgtttcaaggtgttcgctgactacgaggactatatcaagtgccaggagaaagtatcagcactctacaagaacccgagagagtggacccgaatggtgataagaaatatcgcaactagcggtaagttttcatccgatcgcaccatcgctcagtacgcccgggagatctggggggtggagccgtcacgccagcggctccctgctcctgcgccccacgctgagggaggtgttctggagctagacttgtag

SEQ ID NO: 157882 - DNA, 3198 bp, Artificial Sequence
  derived and/or modified sequence
ccatcctggttcagccactgacagacagctccccaatccagcactctgcctgctccttcttgtatccaaccctccaaaaggcagggacaagggacagaagaccatgtgcaaggcctggaggaagtgggtcagcacaggcctgtgaacaagccaggccagtcttggcggcccaagtggagctcacctctccctcccctctcctctcctccccttgccctcaaaatagctccctgagctgccaggccaagaccctcccattgcaggggaggcggggcgtgctgcccagagccaggctttaaatccccttgaggctggggagctccactccttggctggaggcagtgctgaggccgccgtcccctctaccatcagtccagtccggcccgccctcctgcagccatgtcccggcccctgtcagaccaagagaaaagaaagcaaatcagtgtgcgtggcctggccggcgtggagaacgtgactgagctgaaaaagaacttcaaccggcacctgcatttcacactcgtaaaggaccgcaatgtggccaccccacgagactactactttgctctggcccataccgtgcgcgaccacctcgtggggcgctggatccgcacgcagcagcactactatgagaaggaccccaagaggatctactacctgtctttagagttctatatgggacggacgctacagaacaccatggtgaacctggccttagagaatgcctgtgacgaggccacctaccagctgggcctggacatggaggagctggaggaaattgaggaggatgcggggctgggcaacgggggcctgggccggctggcagcctgctttcttgactccatggcaacactgggcctggccgcctatggctacgggattcgctatgagtttgggatttttaaccagaagatctccgggggctggcagatggaggaggccgatgactggcttcgctacggcaacccctgggagaaggcccggcccgagttcacgctacctgtgcacttctacggccatgtggagcacaccagccagggtgccaagtgggtggacacacaggtggtactggccatgccctacgatacgcccgtgcctggctatcgcaacaatgttgtcaacaccatgcgcctctggtctgccaaggctcccaatgacttcaacctcaaggacttcaatgtcggtggctacatccaggctgtgttggaccgaaacctggcggagaacatctctcgtgtcctgtaccccaatgataatttcttcgaagggaaggagctgcggctgaagcaggagtatttcgtggtggctgccaccctccaggacatcatccgtcgcttcaagtcttccaagttcggctgccgtgatcccgtgcgcacgaacttcgatgccttcccagataaggtggccatccagctcaatgacacccacccctccctggccatccccgagctgatgaggatcctggtggacctggaacggatggactgggacaaggcgtgggatgtgacagtgaggacctgtgcctacaccaaccacacggtgctgcccgaggccctggagcgctggccggtgcacctcttggagacgctgctgccgcggcacctccagatcatctacgagatcaaccagcgcttcctcaaccgggtggcggccgcattcccaggggacgtagaccggctgcggcgcatgtcgctggtggaggagggcgcagtgaagcgcatcaacatggcacacctgtgcatcgcggggtcgcacgccgtcaacggcgtggcgcgcatccactccgagatcctcaagaagaccatcttcaaagacttctatgagctggagcctcataagttccagaataagaccaacggcatcacccctcggcgctggctggttctgtgtaaccccgggctggcagaggtcattgctgagcgcatcggggaggacttcatctctgacctggaccagctgcgcaaactgctctcctttgtggatgatgaagctttcattcgggatgtggccaaagtgaagcaggaaaacaagttgaagtttgctgcctacctagagagggaatacaaagtccacatcaaccccaactcactcttcgacatccaggtgaagcggattcacgaatataaacgacagctcctcaactgcctccatgtcatcaccctgtacaaccgcatcaagagggagcccaataagttttttgtgcctcggactgtgatgattggagggaaggctgcacctgggtaccacatggccaagatgatcatcagactcgtcacagccatcggggatgtggtcaaccatgacccggcagtgggtgaccgcctccgtgtcatcttcctggagaactaccgagtctcactggccgagaaagtgatcccagctgcagacctctctgagcagatctccactgcgggcactgaagcctcaggcaccggcaacatgaagttcatgctcaacggggctctgaccattggcaccatggacggggccaatgtggagatggcagaagaggcgggagaggaaaacttcttcatctttggcatgcgggtggaggatgtggataagcttgaccaaagagggtacaatgcccaggagtactacgatcgcattcctgagcttcggcaggtcattgagcagctgagcagtggcttcttctcccccaaacagcccgacctgttcaaggacattgtcaatatgctcatgcaccatgaccggtttaaagtcttcgcagattatgaagactacattaaatgccaggagaaagtcagcgccttgtacaagaacccaagagagtggacgcggatggtgatccggaacatagccacctctggcaagttctccagtgaccgcaccattgcccagtatgcccgggagatctggggtgtggagccttcccgccagcgcctgccagccccggatgaggccatctgagcctccagaccagaccccaaaccagcccttgagtctgtcacactctcttgggccagccccagcacctcatgcagagggtggggtactggagttagatctctaagcccctcctggaaccctcattttccccactctcaatgtcccagtgtccagcgtgactaaggacacgggcccccttccgtcctcgggctcccggtcccctcctatttatggggtctgaccaactgcacccactccctaataaattcattctccttgggagcctcctta

SEQ ID NO: 157883 - DNA, 2594 bp, Artificial Sequence
  derived and/or modified sequence
actccttggctggaggcagtgctgaggccgccgtcccctctaccatcagtccagtccggcccgccctcctgcagccatgtcccggcccctgtcagaccaagagaaaagaaagcaaatcagtgtgcgtggcctggccggcgtggagaacgtgactgagctgaaaaagaacttcaaccggcacctgcatttcacactcgtaaaggaccgcaatgtggccaccccacgagactactactttgctctggcccataccgtgcgcgaccacctcgtggggcgctggatccgcacgcagcagcactactatgagaaggaccccaagaggatctactacctgtctttagagttctatatgggacggacgctacagaacaccatggtgaacctggccttagagaatgcctgtgacgaggccacctaccaggtgggcctgggccggctggcagcctgctttcttgactccatggcaacactgggcctggccgcctatggctacgggattcgctatgagtttgggatttttaaccagaagatctccgggggctggcagatggaggaggccgatgactggcttcgctacggcaacccctgggagaaggcccggcccgagttcacgctacctgtgcacttctacggccatgtggagcacaccagccagggtgccaagtgggtggacacacaggtggtactggccatgccctacgatacgcccgtgcctggctatcgcaacaatgttgtcaacaccatgcgcctctggtctgccaaggctcccaatgacttcaacctcaaggacttcaatgtcggtggctacatccaggctgtgttggaccgaaacctggcggagaacatctctcgtgtcctgtaccccaatgataatttcttcgaagggaaggagctgcggctgaagcaggagtatttcgtggtggctgccaccctccaggacatcatccgtcgcttcaagtcttccaagttcggctgccgtgatcccgtgcgcacgaacttcgatgccttcccagataaggtggccatccagctcaatgacacccacccctccctggccatccccgagctgatgaggatcctggtggacctggaacggatggactgggacaaggcgtgggatgtgacagtgaggacctgtgcctacaccaaccacacggtgctgcccgaggccctggagcgctggccggtgcacctcttggagacgctgctgccgcggcacctccagatcatctacgagatcaaccagcgcttcctcaaccgggtggcggccgcattcccaggggacgtagaccggctgcggcgcatgtcgctggtggaggagggcgcagtgaagcgcatcaacatggcacacctgtgcatcgcggggtcgcacgccgtcaacggcgtggcgcgcatccactccgagatcctcaagaagaccatcttcaaagacttctatgagctggagcctcataagttccagaataagaccaacggcatcacccctcggcgctggctggttctgtgtaaccccgggctggcagaggtcattgctgagcgcatcggggaggacttcatctctgacctggaccagctgcgcaaactgctctcctttgtggatgatgaagctttcattcgggatgtggccaaagtgaagcaggaaaacaagttgaagtttgctgcctacctagagagggaatacaaagtccacatcaaccccaactcactcttcgacatccaggtgaagcggattcacgaatataaacgacagctcctcaactgcctccatgtcatcaccctgtacaaccgcatcaagagggagcccaataagttttttgtgcctcggactgtgatgattggagggaaggctgcacctgggtaccacatggccaagatgatcatcagactcgtcacagccatcggggatgtggtcaaccatgacccggcagtgggtgaccgcctccgtgtcatcttcctggagaactaccgagtctcactggccgagaaagtgatcccagctgcagacctctctgagcagatctccactgcgggcactgaagcctcaggcaccggcaacatgaagttcatgctcaacggggctctgaccattggcaccatggacggggccaatgtggagatggcagaagaggcgggagaggaaaacttcttcatctttggcatgcgggtggaggatgtggataagcttgaccaaagagggtacaatgcccaggagtactacgatcgcattcctgagcttcggcaggtcattgagcagctgagcagtggcttcttctcccccaaacagcccgacctgttcaaggacattgtcaatatgctcatgcaccatgaccggtttaaagtcttcgcagattatgaagactacattaaatgccaggagaaagtcagcgccttgtacaagaacccaagagagtggacgcggatggtgatccggaacatagccacctctggcaagttctccagtgaccgcaccattgcccagtatgcccgggagatctggggtgtggagccttcccgccagcgcctgccagccccagcacctcatgcagagggtggggtactggagttagatctctaagcccctcctggaaccctca

SEQ ID NO: 157884 - DNA, 2529 bp, Artificial Sequence
  derived and/or modified sequence
atgagcaggcctctgagtgaccaggagaagagaaagcagatttctgtccgaggtctggctggagtcgagaatgtgactgagctgaagaaaaattttaataggcaccttcactttacactggtgaaggatagaaacgtggccacgccgagggactactactttgcattggctcatactgttcgcgatcacctggtcggtagatggatcagaacgcagcagcactattatgaaaaagatcctaagcggatttattacctctccctggaattctatatgggcagaaccctccagaacacaatggtgaacctggctctggaaaacgcatgcgacgaagccacctatcaacttgggttggacatggaggaattggaggaaatcgaggaagacgccggactgggcaacggcggattaggtaggctggcagcatgctttttagattccatggcgacgttgggtctggcagcatatggctatggaattcgctacgagtttgggatcttcaatcagaaaatctcagggggatggcagatggaggaagctgatgattggctgagatacggaaatccttgggaaaaagctcggccagagtttacgttgcctgttcacttttacgggcacgtggagcatacttcacagggtgctaaatgggtggacacccaggtcgtgcttgctatgccttatgacacaccagtgccgggttacaggaataatgtggttaacacaatgcggttatggtccgcaaaggctcccaatgactttaatctgaaagattttaatgtggggggatacatacaagctgtattggatcgcaatttggcagagaatatcagccgagtgttatacccaaacgacaatttctttgaaggaaaggaactgcgtctgaagcaagagtatttcgtcgtagcagccacccttcaagatattattcgacgatttaaaagttccaagttcggctgccgcgaccccgtcaggacaaatttcgacgcgttcccggacaaggtggctattcagttaaacgacacacacccttccctggcaattcccgagctgatgcggatcctggttgatctggagcgcatggactgggataaggcttgggacgtgaccgttaggacctgcgcctacactaatcataccgtcctccccgaagcacttgaacggtggcctgtgcatctgcttgagactttattaccaaggcacctgcaaataatttacgaaatcaaccagcggttccttaaccgggtcgccgctgctttccctggcgatgttgaccgcctgcggcgaatgagtctcgttgaagaaggcgctgtcaaacggataaatatggcacacctgtgtattgctgggtcccacgcagtgaacggcgtcgccagaattcattccgagattctgaagaaaactattttcaaggacttttacgagttggaaccccacaagtttcagaacaagacaaacgggatcacgccgagacggtggcttgtcctctgtaatcctgggctggccgaagtgatagcggagcggatcggcgaggactttatttccgatctcgatcagttgcggaaacttctgtcgtttgtggatgacgaggccttcatccgggacgtagctaaagtgaaacaggaaaataagttaaaattcgccgcttatctggagagggagtataaggtgcacattaatccaaatagcctctttgacatccaagtgaagagaatccacgaatacaagcgtcagcttcttaactgtctccatgtgatcaccttatacaacagaattaaacgcgagcccaacaagttttttgtgcctcggactgtaatgatcggaggcaaggctgctccaggctatcacatggcaaaaatgattatacgtcttgtcaccgccatcggcgacgtagtgaatcatgacccagccgtcggtgacagactgcgggtgatatttctcgagaactaccgagtgagcctggctgagaaggttatccccgctgccgacctttcagagcagatcagtactgccggaaccgaggcttccggcactggcaacatgaagttcatgctcaacggtgctctgactatcgggacaatggatggcgctaatgtggaaatggctgaagaggccggagaggaaaatttctttatctttggcatgcgcgttgaagacgtcgacaagctagatcagaggggatataacgcccaggagtattatgacaggatcccagaactccgccaggtgattgaacagcttagttcaggatttttcagccctaagcaacctgacctattcaaggacatcgtgaatatgcttatgcaccacgatcggttcaaggtatttgcggactacgaagactacatcaagtgccaagagaaggttagcgccttatataagaatccccgagagtggacccggatggtgattagaaatatcgccacaagtggaaagttttcatctgatcgtacaatcgcgcagtacgcaagagaaatatggggcgtagagccgtcacgccaaagacttcccgcacctgatgaggccatttag

SEQ ID NO: 157885 - DNA, 2499 bp, Artificial Sequence
  derived and/or modified sequence
atgtccagacccctgagcgaccaggagaaacgtaaacaaatctccgtccggggactggccggagtcgagaacgtcacagagctcaagaaaaactttaaccggcatctgcacttcacactggtgaaagaccgcaacgtggctacacccagggattactatttcgcacttgcgcacactgtgcgcgaccatttagtcgggagatggattcggacacagcagcactactacgaaaaagatcccaaacgcatctactatctctccctcgagttctacatgggcagaacactacagaataccatggtgaacctcgcactagagaatgcctgtgacgaggccacatatcaggtgggactgggcagattagctgcctgctttctcgacagtatggccacacttgggctggccgcttacggctacggtatccgctatgagttcgggatttttaatcagaagatatccggcggttggcaaatggaggaggccgatgactggctacggtacggtaatccatgggagaaagccaggcccgagttcactttgcccgtacatttctacgggcatgttgaacatacttcccagggcgcaaagtgggttgacactcaggtggtgctggcaatgccctacgacacacctgtcccgggttacagaaataacgtggttaacacaatgagactttggagcgcgaaagctccaaatgatttcaacctaaaagacttcaatgtggggggatacattcaagccgtcttagacaggaacctggctgaaaacattagcagagtgttgtatccaaatgacaactttttcgagggcaaagaactacggctgaagcaggagtatttcgtcgtggcggcaaccctgcaagatattatcagacgctttaagtcatcaaaattcggttgccgcgaccccgtgaggaccaactttgacgctttcccagataaggtcgctatccagttaaatgacactcacccgtcactggccattcctgagctgatgagaatcctcgtcgacctggagcggatggactgggataaggcttgggacgtgacagttaggacatgcgcctacactaaccacacagtgctaccagaagcactggagaggtggccggtacacctcctggagacactgctgccccgacatctgcagatcatttacgaaataaatcagcggtttctgaatagagtagcggctgcttttccaggggatgtcgatcggctgcgacggatgtctctggtggaagagggcgctgtgaagcggattaatatggcacacctatgcatagcaggctctcacgctgttaacggagtggcgaggatccactccgaaattctgaagaagacaatctttaaggatttctacgaacttgagccccataagttccaaaataagaccaacggaattacacccaggcggtggctcgtcttgtgtaatccaggattagctgaggtcattgccgagaggatcggcgaagatttcattagcgacctagaccagctgcgtaaactgctctcattcgtggatgatgaggcatttataagggacgttgcaaaggtaaaacaggagaacaaattgaagttcgccgcatatctggaaagggaatacaaggtccacatcaacccaaattccttgttcgacatccaagttaaacgtattcacgagtacaaacgacagctgctgaattgcctgcacgtaattacactgtacaaccggatcaaaagagaacctaacaaatttttcgtgcctaggacagtgatgatagggggtaaagcagcacctggttatcacatggccaagatgattatccgtctggtgaccgcaattggcgacgtcgttaatcatgatcccgctgtgggggatcgccttagggtgatctttttagagaactatagggtgtctctcgcagaaaaggtgattccggctgcggatctttctgaacagatttcaacagcaggcactgaggcctctggaaccggaaacatgaagttcatgctaaacggtgcactgactatcgggactatggacggcgctaacgtggagatggcagaggaagccggagaagagaatttcttcatctttggtatgagggttgaggatgtggacaagctggatcagcggggttacaacgcccaagagtattacgacaggattccagagctacggcaggtcatcgagcagctttcgtccggctttttttctcctaagcagcctgatctcttcaaggacatagtcaatatgcttatgcatcacgaccgcttcaaagtgtttgccgactacgaagactatatcaagtgtcaggagaaagtttctgctctgtacaagaaccccagagagtggacccgaatggtgattcgcaatattgccacctctggcaaattttcttctgatcggaccatagctcagtacgcccgtgaaatttggggggtggaaccttcccgccagcgcttgccggctcccgcaccacacgcggagggaggcgtgctggagctggacctgtag

SEQ ID NO: 157886 - DNA, 2529 bp, Artificial Sequence
  derived and/or modified sequence
atgtcaaggcctctgagcgaccaagaaaaacggaagcagatttcggtgagggggctcgccggcgtagagaacgtaactgagctgaagaaaaattttaatagacatctccatttcactctcgtaaaggatagaaacgtggccactcccagggactattacttcgccctggcccacaccgtaagggatcacctggttggcaggtggataaggacccagcagcattattacgagaaagacccaaaaagaatctactatttgtcattggaattttatatgggcaggaccctgcagaatacaatggtgaatttggcccttgagaatgcatgcgacgaggcaacctatcagttgggcttagatatggaggagctagaggaaattgaagaagacgccggacttgggaatggagggctcggccgcttggccgcatgtttccttgacagtatggccaccttaggtttggctgcttacggatacggcatacggtacgaatttggcatcttcaatcagaaaattagcggtggatggcaaatggaagaggcagatgattggcttagatatggcaacccatgggaaaaagcccgcccagaattcactttaccagtgcatttctacggtcatgtcgaacacacttcgcagggcgccaaatgggtggacactcaagtcgtcctggccatgccctatgacaccccagttccggggtatcgcaataacgtcgtgaacactatgaggctgtggtccgccaaagctccaaacgacttcaacctcaaggacttcaacgtggggggctacattcaggctgttttggaccggaacctggccgaaaacatttctagggtgctctaccccaatgacaatttcttcgaagggaaagagctgagactgaagcaggaatacttcgtagttgctgctactctgcaggacattataagaagattcaaatccagtaaattcggctgcagagatcctgtgcggacgaacttcgatgccttcccggacaaagtcgccatccagctgaacgatacacatccatcactggcaattcccgagctcatgcgaatcctggttgatctggaacgcatggattgggacaaggcctgggacgtgacagtccgtacctgcgcctacacaaatcacaccgttctaccagaggctctggaaaggtggcctgtccacctgttggagacactactgcctcgtcacctccagatcatatacgagatcaatcagcgcttcctcaatagggtggccgccgcgtttcccggtgacgtcgaccgccttaggcgaatgtctctcgttgaagaaggcgccgtgaaaaggatcaatatggcccatctgtgcatagccggatcccacgccgtgaatggagttgcgcgcatccacagcgagattttgaaaaaaactatttttaaggacttttatgagttagagccccacaagttccagaataagaccaacggcataactccaagacggtggctggtactgtgtaatccgggtctcgctgaagtaatcgccgaaaggattggggaggattttattagcgacctggaccagctccgcaaactcctgtccttcgtcgacgacgaggcctttatccgggatgtagcaaaggtgaaacaagaaaataaactgaagtttgccgcgtacctcgaaagggaatacaaagtgcacattaatcctaacagcctgttcgatatccaggtgaagcggatccatgaatataagcgccagcttttaaactgcctgcacgtcatcactctgtacaacaggataaaaagagagcctaacaagttcttcgtacccaggactgtcatgatcggcgggaaggctgctccaggataccatatggccaaaatgataattcggctggttaccgccattggcgatgtcgttaatcatgatccagctgtcggcgacagactcagagtcatcttcttggaaaactacagggtatcgctagccgagaaagtcatcccggccgccgatctctcagagcagatcagcaccgccggaaccgaggccagtggaacaggtaatatgaagtttatgctcaacggagctcttactattggcaccatggacggcgcaaacgtggagatggccgaggaggccggggaagaaaacttttttatattcgggatgagagtggaggacgttgataaactggatcagagggggtataatgcacaggagtactatgacaggattccagagcttcgtcaggtgattgaacagctgagctccggttttttcagccccaagcaacccgacctgtttaaggacattgttaacatgctcatgcaccacgatcggttcaaagttttcgctgattacgaagattacatcaagtgtcaggagaaggtgtccgcactgtacaagaatccccgggaatggaccagaatggttatccggaatatcgctacttcaggaaaattcagtagcgaccggacaatcgctcaatacgctcgcgagatttggggagtggagccaagtaggcagcgtctgcccgctcctgacgaagccatttag

SEQ ID NO: 157887 - DNA, 2529 bp, Artificial Sequence
  derived and/or modified sequence
atgtccagacctctgtctgatcaggagaagagaaagcagatctctgttcgaggactcgctggcgtggagaacgtgaccgagctgaagaaaaattttaatcgacacttacactttacccttgttaaagaccgcaacgtcgccactccccgcgactattatttcgccctggcacacaccgtaagagaccatctggttggcagatggataagaacccagcagcattactacgagaaagaccccaaaaggatctattacctgtcactcgaattttatatggggagaaccttgcagaacactatggtgaatctcgctctcgagaacgcctgtgacgaagcaacatatcagttaggcctggacatggaggagttagaagaaatagaggaagacgcgggacttgggaatggcggactcggcaggttggcggcgtgctttcttgattcaatggccacactcggactagctgcatacggatacgggatcaggtatgagttcggtatttttaatcagaaaattagcgggggctggcagatggaagaagccgatgattggctcaggtacggaaatccatgggagaaagctaggcctgagtttacactaccagtgcacttttacggtcatgtagagcatacctcacaaggggccaagtgggtagatacacaagtcgtgttggctatgccatatgatacaccagtgccaggttatcgaaacaatgtcgtcaatactatgagactttggagcgccaaagccccaaatgacttcaatttgaaagattttaatgtgggcggctacatccaggcagtgctggacaggaacctcgccgagaatatcagccgggtactttatcctaatgacaactttttcgagggaaaggagctgaggttaaagcaggagtatttcgtggtcgccgcaaccttgcaggacattattcgcagatttaagagctcaaaatttggctgcagagaccccgtgaggacaaattttgatgcctttccagacaaggtagcaatacaattaaacgatacacatccatccttagcaattcccgaactaatgcgcatcttagttgacctggaacgaatggactgggataaagcttgggacgttacagtaaggacatgtgcatacaccaatcacacagtgctccctgaggcactcgaaagatggcccgtgcacctgctagagactttgttgcccaggcatttgcagattatctacgaaatcaaccagcgtttcctgaatagagttgcagctgctttccccggtgatgtggatcgacttcgtaggatgtccctcgttgaggaaggagccgttaaacggataaatatggcacacctttgtatagctggaagtcacgcagtgaacggcgtcgcacggatccactccgagattctcaagaagaccatcttcaaagatttctatgagctggagcctcacaaattccagaataagacaaatggcatcacaccacgaagatggctggtactatgcaatcccgggcttgcggaggtaatcgcagagcgcatcggagaagattttataagcgacttggaccagcttcggaaactgctgagtttcgtggacgacgaagccttcattagggacgtggctaaggtcaagcaggaaaacaaactaaaatttgcagcatacttagagagagaatataaggtgcacataaatcctaactcgttgttcgacatacaagtgaagcgaattcatgagtataaaaggcagctgttaaattgcctgcacgtcattactttgtataacagaataaaacgggagcctaacaaattttttgtacctaggacagtgatgataggtgggaaggctgcccccggctatcacatggccaaaatgattatcagactggtaacagcaatcggagacgtagtaaatcacgatccagctgttggcgatagactccgcgtcatcttccttgaaaattacagggtatccttggcagagaaagttatccccgcagcagacttatccgaacagatctccaccgcgggaaccgaagcatctgggacggggaatatgaaatttatgctgaatggagcactgacaatcggcaccatggacggagctaacgtggagatggcagaggaggcaggagaggaaaatttttttatcttcgggatgagagtagaggatgtggacaagttggatcagcgtggctacaacgcacaggagtattacgatcgtatacccgaattgcgccaggttatagaacaattatcgagcggttttttctcacctaaacaacccgatctattcaaggatatcgtgaatatgcttatgcatcatgacagatttaaggtgtttgctgactacgaagattatattaaatgccaggagaaggtctcagcattgtataagaaccctagggagtggacgaggatggtcatccggaatatcgcaacctccggtaagtttagttctgatcgcaccatagcccaatatgctagggaaatttggggagtggaaccctctagacaacggctgcctgcacctgacgaggcaatttag

SEQ ID NO: 157888 - DNA, 2529 bp, Artificial Sequence
  derived and/or modified sequence
atgagcagacccctgagcgaccaggagaagagaaagcagatcagcgtgagaggcctggccggcgtggagaacgtgaccgagctgaagaagaacttcaacagacacctgcacttcaccctggtgaaggacagaaacgtggccacccccagagactactacttcgccctggcccacaccgtgagagaccacctggtgggcagatggatcagaacccagcagcactactacgagaaggaccccaagagaatctactacctgagcctggagttctacatgggcagaaccctgcagaacaccatggtgaacctggccctggagaacgcctgcgacgaggccacctaccagctgggcctggacatggaggagctggaggagatcgaggaggacgccggcctgggcaacggcggcctgggcagactggccgcctgcttcctggacagcatggccaccctgggcctggccgcctacggctacggcatcagatacgagttcggcatcttcaaccagaagatcagcggcggctggcagatggaggaggccgacgactggctgagatacggcaacccctgggagaaggccagacccgagttcaccctgcccgtgcacttctacggccacgtggagcacaccagccagggcgccaagtgggtggacacccaggtggtgctggccatgccctacgacacccccgtgcccggctacagaaacaacgtggtgaacaccatgagactgtggagcgccaaggcccccaacgacttcaacctgaaggacttcaacgtgggcggctacatccaggccgtgctggacagaaacctggccgagaacatcagcagagtgctgtaccccaacgacaacttcttcgagggcaaggagctgagactgaagcaggagtacttcgtggtggccgccaccctgcaggacatcatcagaagattcaagagcagcaagttcggctgcagagaccccgtgagaaccaacttcgacgccttccccgacaaggtggccatccagctgaacgacacccaccccagcctggccatccccgagctgatgagaatcctggtggacctggagagaatggactgggacaaggcctgggacgtgaccgtgagaacctgcgcctacaccaaccacaccgtgctgcccgaggccctggagagatggcccgtgcacctgctggagaccctgctgcccagacacctgcagatcatctacgagatcaaccagagattcctgaacagagtggccgccgccttccccggcgacgtggacagactgagaagaatgagcctggtggaggagggcgccgtgaagagaatcaacatggcccacctgtgcatcgccggcagccacgccgtgaacggcgtggccagaatccacagcgagatcctgaagaagaccatcttcaaggacttctacgagctggagccccacaagttccagaacaagaccaacggcatcacccccagaagatggctggtgctgtgcaaccccggcctggccgaggtgatcgccgagagaatcggcgaggacttcatcagcgacctggaccagctgagaaagctgctgagcttcgtggacgacgaggccttcatcagagacgtggccaaggtgaagcaggagaacaagctgaagttcgccgcctacctggagagagagtacaaggtgcacatcaaccccaacagcctgttcgacatccaggtgaagagaatccacgagtacaagagacagctgctgaactgcctgcacgtgatcaccctgtacaacagaatcaagagagagcccaacaagttcttcgtgcccagaaccgtgatgatcggcggcaaggccgcccccggctaccacatggccaagatgatcatcagactggtgaccgccatcggcgacgtggtgaaccacgaccccgccgtgggcgacagactgagagtgatcttcctggagaactacagagtgagcctggccgagaaggtgatccccgccgccgacctgagcgagcagatcagcaccgccggcaccgaggccagcggcaccggcaacatgaagttcatgctgaacggcgccctgaccatcggcaccatggacggcgccaacgtggagatggccgaggaggccggcgaggagaacttcttcatcttcggcatgagagtggaggacgtggacaagctggaccagagaggctacaacgcccaggagtactacgacagaatccccgagctgagacaggtgatcgagcagctgagcagcggcttcttcagccccaagcagcccgacctgttcaaggacatcgtgaacatgctgatgcaccacgacagattcaaggtgttcgccgactacgaggactacatcaagtgccaggagaaggtgagcgccctgtacaagaaccccagagagtggaccagaatggtgatcagaaacatcgccaccagcggcaagttcagcagcgacagaaccatcgcccagtacgccagagagatctggggcgtggagcccagcagacagagactgcccgcccccgacgaggccatctag

SEQ ID NO: 157889 - DNA, 2499 bp, Artificial Sequence
  derived and/or modified sequence
atgagcagacccctgagcgaccaggagaagagaaagcagatcagcgtgagaggcctggccggcgtggagaacgtgaccgagctgaagaagaacttcaacagacacctgcacttcaccctggtgaaggacagaaacgtggccacccccagagactactacttcgccctggcccacaccgtgagagaccacctggtgggcagatggatcagaacccagcagcactactacgagaaggaccccaagagaatctactacctgagcctggagttctacatgggcagaaccctgcagaacaccatggtgaacctggccctggagaacgcctgcgacgaggccacctaccaggtgggcctgggcagactggccgcctgcttcctggacagcatggccaccctgggcctggccgcctacggctacggcatcagatacgagttcggcatcttcaaccagaagatcagcggcggctggcagatggaggaggccgacgactggctgagatacggcaacccctgggagaaggccagacccgagttcaccctgcccgtgcacttctacggccacgtggagcacaccagccagggcgccaagtgggtggacacccaggtggtgctggccatgccctacgacacccccgtgcccggctacagaaacaacgtggtgaacaccatgagactgtggagcgccaaggcccccaacgacttcaacctgaaggacttcaacgtgggcggctacatccaggccgtgctggacagaaacctggccgagaacatcagcagagtgctgtaccccaacgacaacttcttcgagggcaaggagctgagactgaagcaggagtacttcgtggtggccgccaccctgcaggacatcatcagaagattcaagagcagcaagttcggctgcagagaccccgtgagaaccaacttcgacgccttccccgacaaggtggccatccagctgaacgacacccaccccagcctggccatccccgagctgatgagaatcctggtggacctggagagaatggactgggacaaggcctgggacgtgaccgtgagaacctgcgcctacaccaaccacaccgtgctgcccgaggccctggagagatggcccgtgcacctgctggagaccctgctgcccagacacctgcagatcatctacgagatcaaccagagattcctgaacagagtggccgccgccttccccggcgacgtggacagactgagaagaatgagcctggtggaggagggcgccgtgaagagaatcaacatggcccacctgtgcatcgccggcagccacgccgtgaacggcgtggccagaatccacagcgagatcctgaagaagaccatcttcaaggacttctacgagctggagccccacaagttccagaacaagaccaacggcatcacccccagaagatggctggtgctgtgcaaccccggcctggccgaggtgatcgccgagagaatcggcgaggacttcatcagcgacctggaccagctgagaaagctgctgagcttcgtggacgacgaggccttcatcagagacgtggccaaggtgaagcaggagaacaagctgaagttcgccgcctacctggagagagagtacaaggtgcacatcaaccccaacagcctgttcgacatccaggtgaagagaatccacgagtacaagagacagctgctgaactgcctgcacgtgatcaccctgtacaacagaatcaagagagagcccaacaagttcttcgtgcccagaaccgtgatgatcggcggcaaggccgcccccggctaccacatggccaagatgatcatcagactggtgaccgccatcggcgacgtggtgaaccacgaccccgccgtgggcgacagactgagagtgatcttcctggagaactacagagtgagcctggccgagaaggtgatccccgccgccgacctgagcgagcagatcagcaccgccggcaccgaggccagcggcaccggcaacatgaagttcatgctgaacggcgccctgaccatcggcaccatggacggcgccaacgtggagatggccgaggaggccggcgaggagaacttcttcatcttcggcatgagagtggaggacgtggacaagctggaccagagaggctacaacgcccaggagtactacgacagaatccccgagctgagacaggtgatcgagcagctgagcagcggcttcttcagccccaagcagcccgacctgttcaaggacatcgtgaacatgctgatgcaccacgacagattcaaggtgttcgccgactacgaggactacatcaagtgccaggagaaggtgagcgccctgtacaagaaccccagagagtggaccagaatggtgatcagaaacatcgccaccagcggcaagttcagcagcgacagaaccatcgcccagtacgccagagagatctggggcgtggagcccagcagacagagactgcccgcccccgccccccacgccgagggcggcgtgctggagctggacctgtag

SEQ ID NO: 157890 - DNA, 618 bp, Artificial Sequence
  derived and/or modified sequence
atgtgcaaaggactggcaggcctgccagctagctgcttgagatctgccaaggatatgaagcacagactcggttttttattacagaaatccgactcttgcgagcataattcgagccataacaagaaggataaagtcgtcatatgccagagagtaagccaggaggaagtgaagaagtgggccgagtctctggagaatctgatcagccacgagtgcggtttagcagcatttaaagcttttctgaagagtgagtacagcgaggagaacatagacttctggatttcctgcgaagagtataagaagatcaagagcccgtccaagctgtcgcctaaggcaaagaagatttacaatgagtttatatccgtgcaggctactaaggaggtgaatttagattcttgcacacgggaggagactagtcggaacatgttggagccgacgatcacctgcttcgatgaagctcagaaaaagatcttcaacctaatggagaaagacagctatcggcgctttctgaagagcagattttacctagacctggttaatccgtctagttgtggggctgagaagcagaagggggccaagagctctgcagactgtgcctcccttgttccacagtgcgcgtag

SEQ ID NO: 157891 - DNA, 618 bp, Artificial Sequence
  derived and/or modified sequence
atgtgcaagggcctggccggcctgcctgccagctgcctgcggagcgccaaggacatgaagcaccggctgggcttcctgctgcagaagagtgacagctgtgagcacaacagcagccacaacaagaaggacaaggtggtgatctgccagagggtgtcccaggaggaggtgaagaagtgggccgagagcctggagaacctgatcagccatgaatgtggcctggccgccttcaaggccttcctgaagtctgagtacagtgaagaaaatattgacttctggatcagctgtgaggagtacaagaagatcaagagccccagcaagctgagccccaaggccaagaagatctacaatgagttcatctctgtgcaggccaccaaggaggtgaacctggacagctgcacccgggaggagaccagcaggaacatgctggagcccaccatcacctgctttgatgaggcccagaagaagatcttcaacctgatggagaaggacagctaccgccgcttcctgaagagccgcttctacctggacctggtgaaccccagcagctgtggggctgagaagcagaagggggccaagagcagcgctgactgtgccagcctggtgccccagtgtgcctag

SEQ ID NO: 157892 - DNA, 618 bp, Artificial Sequence
  derived and/or modified sequence
atgtgcaagggcctggccggcctgcccgccagctgcctgcggagcgccaaggatatgaagcacagactgggctttctgctgcaaaaaagcgattcctgcgagcacaattctagccacaataagaaggataaggtagtgatttgccagagagtcagccaggaagaagtgaaaaagtgggcagaaagcttggagaacctgattagccacgagtgcgggctggcagctttcaaggcattccttaaatcagagtacagcgaggaaaacatcgatttttggatcagctgtgaggagtacaagaagatcaagtccccctcaaaactctctccaaaggcgaagaagatttacaacgagtttatctctgtgcaggcgacaaaggaggtcaacctcgattcctgtacgagagaggagacctcacgcaatatgcttgagccaactattacgtgtttcgacgaggcccagaaaaaaattttcaacctgatggagaaggatagttatagacgcttcttgaaatctcgattctatctggacttggtgaacccatcttcgtgtggcgcagagaaacaaaagggagcgaagtcctccgccgattgtgcaagcctggtgcctcagtgtgcctag

SEQ ID NO: 157893 - DNA, 618 bp, Artificial Sequence
  derived and/or modified sequence
atgtgtaagggcttggccggtctgcctgcgagctgcctgaggagtgccaaggatatgaagcacagattgggctttctgttacaaaaaagtgacagctgtgagcacaactctagccataacaagaaggataaagttgtgatttgccagcgggtttcccaagaggaggtcaagaagtgggccgagtccctggaaaacctcatctcgcacgaatgtggtctggctgcttttaaggcattcttaaaatcggagtactcagaagaaaacattgacttctggatttcatgcgaggaatataagaaaataaagagcccctctaaactctcccccaaggcaaagaagatttacaatgagtttatcagtgtgcaagcaactaaggaggtgaatttggattcctgcacgcgcgaagaaacgagcaggaatatgctggaacccactattacctgcttcgacgaagcccagaagaagatatttaatctgatggagaaggacagctataggcggttcttaaaaagccggttctacctggacctcgtgaaccctagtagttgtggcgctgagaaacagaaaggagctaagtccagcgcggattgcgcctcattagtgccccagtgcgcgtag

SEQ ID NO: 157894 - DNA, 930 bp, Artificial Sequence
  derived and/or modified sequence
agatcactcatgtgttcagtgattcaggttctgttgaagataccaaagatattcggttggtcaaaatgacgggcatataaaggcttctcaggtttctgagtgcaaaagatatgaaacatcggctaggtttcctgctgcaaaaatctgattcctgtgaacacaattcttcccacaacaagaaggacaaagtggttatttgccagagagtgagccaagaggaagtcaagaaatgggctgaatcactggaaaacctgattagtcatgaatgtgggctggcagctttcaaagctttcttgaagtctgaatatagtgaggagaatattgacttctggatcagctgtgaagagtacaagaaaatcaaatcaccatctaaactaagtcccaaggccaaaaagatctataatgaattcatctcagtccaggcaaccaaagaggtgaacctggattcttgcaccagggaagagacaagccggaacatgctagagcctacaataacctgctttgatgaggcccagaagaagattttcaacctgatggagaaggattcctaccgccgcttcctcaagtctcgattctatcttgatttggtcaacccgtccagctgtggggcagaaaagcagaaaggagccaagagttcagcagactgtgcttccctggtccctcagtgtgcctaattctcacctgaaggcagagggatgaaatgccaagactctatgctctggaaaacctgaggccaaatattgatctgtattaagctccagtgctttatccacattgtagcctaatattcatgctgcctgccatgtgtgagtcacttctacgcataaactagatatagcttttggtgtttgagtgttcatcagggtgggaccccattccagtccaattttcctaagtttctttgagggttccatgggagcaaatatctaa

SEQ ID NO: 157895 - DNA, 551 bp, Artificial Sequence
  derived and/or modified sequence
aaactgaagggtcagaattccagttgtggatgaaggaaatggtgttatgactgcctcaaggttttgtagcaagtcatagggaaccaagaggaatcttgttttcctcagagtgcaaaagatatgaaacatcggctaggtttcctgctgcaaaaatctgattcctgtgaacacaattcttcccacaacaagaaggacaaagtggttatttgccagagagtgagccaagaggaagtcaagaaatgggctgaatcactggaaaacctgattagtcatgaatgtgggctggcagctttcaaagctttcttgaagtctgaatatagtgaggagaatattgacttctggatcagctgtgaagagtacaagaaaatcaaatcaccatctaaactaagtcccaaggccaaaaagatctataatgaattcatctcagtccaggcaaccaaagaggtgaacctggattcttgcaccagggaagagacaagccggaacatgctagagcctacaataacctgctttgatgaggcccagaagaagattttcaacctgatggagaa

SEQ ID NO: 157896 - DNA, 618 bp, Artificial Sequence
  derived and/or modified sequence
atgtgcaagggcctggccggcctgcccgccagctgcctgagaagcgccaaggacatgaagcacagactgggcttcctgctgcagaagagcgacagctgcgagcacaacagcagccacaacaagaaggacaaggtggtgatctgccagagagtgagccaggaggaggtgaagaagtgggccgagagcctggagaacctgatcagccacgagtgcggcctggccgccttcaaggccttcctgaagagcgagtacagcgaggagaacatcgacttctggatcagctgcgaggagtacaagaagatcaagagccccagcaagctgagccccaaggccaagaagatctacaacgagttcatcagcgtgcaggccaccaaggaggtgaacctggacagctgcaccagagaggagaccagcagaaacatgctggagcccaccatcacctgcttcgacgaggcccagaagaagatcttcaacctgatggagaaggacagctacagaagattcctgaagagcagattctacctggacctggtgaaccccagcagctgcggcgccgagaagcagaagggcgccaagagcagcgccgactgcgccagcctggtgccccagtgcgcctag

SEQ ID NO: 157897 - protein, 184 aa, Artificial Sequence
  derived and/or modified sequence
MPQSKSRKIAILGYRSVGKSSLTIQFVEGQFVDSYDPTIENTFTKLITVNGQEYHLQLVDTAGQDEYSIFPQTYSIDINGYILVYSVTSIKSFEVIKVIHGKLLDMVGKVQIPIMLVGNKKDLHMERVISYEEGKALAESWNAAFLESSAKENQTAVDVFRRIILEAEKMDGAASQGKSSCSVM

SEQ ID NO: 157898 - DNA, 555 bp, Artificial Sequence
  derived and/or modified sequence
atgccccagagcaagagcagaaagatcgccatcctgggctacagaagcgtgggcaagagcagcctgaccatccagttcgtggagggccagttcgtggacagctacgaccccaccatcgagaacaccttcaccaagctgatcaccgtgaacggccaggagtaccacctgcagctggtggacaccgccggccaggacgagtacagcatcttcccccagacctacagcatcgacatcaacggctacatcctggtgtacagcgtgaccagcatcaagagcttcgaggtgatcaaggtgatccacggcaagctgctggacatggtgggcaaggtgcagatccccatcatgctggtgggcaacaagaaggacctgcacatggagagagtgatcagctacgaggagggcaaggccctggccgagagctggaacgccgccttcctggagagcagcgccaaggagaaccagaccgccgtggacgtgttcagaagaatcatcctggaggccgagaagatggacggcgccgccagccagggcaagagcagctgcagcgtgatgtag

SEQ ID NO: 157899 - DNA, 555 bp, Artificial Sequence
  derived and/or modified sequence
atgcctcaatctaaatcccgaaaaatcgctatactaggctacagatctgttggcaagtccagcctcactatccaattcgtggaggggcaatttgtcgactcctatgaccccactatcgaaaacacctttacaaagttgatcaccgtgaatggtcaagagtaccaccttcagctggtggatactgctggtcaggatgaatatagcatctttccacagacttatagcattgacatcaacggttacatcttggtgtactccgtgactagcattaaatccttcgaggtcattaaggtgattcatggaaagctactggacatggtcggcaaagtgcagatacccataatgttagttggcaacaagaaagacctgcacatggagagggtcatctcctatgaggaaggcaaagctctggcggagtcgtggaatgctgcgttcctagagtccagcgccaaagaaaatcaaaccgcagtcgatgtgttccgtagaatcatcttagaagctgaaaaaatggacggcgccgctagccagggaaaatcaagctgttcagtgatgtag

SEQ ID NO: 157900 - DNA, 555 bp, Artificial Sequence
  derived and/or modified sequence
atgccccagagcaagagcaggaagatcgccatcctgggctacagatctgtgggcaagagcagcctgaccatccagtttgtggagggccagtttgtggacagctatgaccccaccatcgagaacaccttcaccaagctgatcaccgtgaatggccaggagtaccacctgcagctggtggacacagctggccaggatgagtacagcatcttcccccagacctacagcattgacatcaatggctacatcctggtgtacagcgtgaccagcatcaagagctttgaagtcatcaaggtgatccacggcaagctgctggacatggtgggcaaggtgcagatccccatcatgctggtgggcaacaagaaggacctgcacatggagagggtcatctcctatgaggagggcaaggccctggccgagagctggaatgctgccttcctggagagcagcgccaaggagaaccagacagctgtggatgtgttccgccgcatcatcctggaggccgagaagatggatggagctgccagccagggcaagagcagctgcagcgtgatgtag

SEQ ID NO: 157901 - DNA, 555 bp, Artificial Sequence
  derived and/or modified sequence
atgccccagagcaagagccggaagatcgccatcctgggctaccggagtgtgggcaagtccagcctgacaatccagttcgtcgagggccagtttgtggattcctatgatccaaccatagaaaatacattcaccaaattaattacagtgaacgggcaggagtatcacctgcagctcgtggatactgctgggcaggatgagtacagtatctttccccaaacatacagtatcgatattaacggttacatcctcgtatattccgtgacctcaatcaaaagctttgaggtgatcaaagttatccacggaaagctcttggatatggtcgggaaggttcagatacctataatgctcgtgggcaataaaaaggacctgcacatggaacgggtcatatcctatgaggaaggcaaggccttggctgaatcctggaatgcagcctttctggagtctagtgccaaggaaaatcagacggccgtggacgtgtttaggcgtataattctggaagcagaaaagatggacggtgctgcctctcagggcaagagtagttgtagtgtaatgtag

SEQ ID NO: 157902 - DNA, 555 bp, Artificial Sequence
  derived and/or modified sequence
atgccacagtccaagagccgaaagatcgcaattcttggataccgttctgtgggcaagtcctcactgactatccagttcgttgaaggccagttcgttgacagttacgatccaacaatagaaaatacctttaccaaactgattaccgtgaatggacaggaatatcatctacaactcgtggacaccgctgggcaggacgagtattccatctttcctcaaacctatagcattgatattaatggctacatcttggtatatagcgtgacgtcaattaaatcgttcgaggtcattaaagtgatccacggaaagctgttggatatggtcggcaaggtgcagatccctatcatgttggtcggcaataaaaaagacctgcatatggagcgcgtgataagctacgaagaaggcaaagctctggctgaaagctggaatgcggcttttctcgagtctagcgctaaagagaatcagaccgctgtggatgttttcagacggatcatcctggaggctgaaaagatggacggggctgccagccagggaaaatcttcatgctctgtcatgtag

SEQ ID NO: 157903 - DNA, 2075 bp, Artificial Sequence
  derived and/or modified sequence
ggcgtaattaaaaagcggcggaagaaggtgggagggtcatgacgcagcgagtttcagtcgtgacttttctgggggcatcgcggcgtcccctttttttgcctttaaagtaaaacgtcgccccgacgcaccccccgcgtatttcggggggcggaggcggcgggccacggcgcgaagaggggcggtgctgacgccggccggtcacgtgggcgtgttgtgggggggaggggcgccgccgcgcggtcggttccgggcggttgggagcgcgcgagctagcgagcgagaggcagccgcgcccgccgccgcccctgctctgtatgccgctctctcccggcgcggccgccgccgatcacagcagcaggagccaccgccgccgcggttgatgtggttgggccggggctgaggaggccgccaagatgccgcagtccaagtcccggaagatcgcgatcctgggctaccggtctgtggggaaatcctcattgacgattcaatttgttgaaggccaatttgtggactcctacgatccaaccatagaaaacacttttacaaagttgatcacagtaaatggacaagaatatcatcttcaacttgtagacacagccgggcaagatgaatattctatctttcctcagacatactccatagatattaatggctatattcttgtgtattctgttacatcaatcaaaagttttgaagtgattaaagttatccatggcaaattgttggatatggtggggaaagtacaaatacctattatgttggttgggaataagaaagacctgcatatggaaagggtgatcagttatgaagaagggaaagctttggcagaatcttggaatgcagcttttttggaatcttctgctaaagaaaatcagactgctgtggatgtttttcgaaggataattttggaggcagaaaaaatggacggggcagcttcacaaggcaagtcttcatgctcggtgatgtgattctgctgcaaagcctgaggacactgggaatatattctacctgaagaagcaaactgcccgttctccttgaagataaactatgcttcttttttcttctgttaacctgaaagatatcatttgggtcagagctcccctcccttcagattatgttaactctgagtctgtccaaatgagttcacttccattttcaaattttaagcaatcatattttcaatttatatattgtatttcttaatattatgaccaagaattttatcggcattaatttttcagtgtagtttgttgtttaaaataatgtaatcatcaaaatgatgcatattgttacactactattaactaggcttcagtatatcagtgtttatttcattgtgttaaatgtatacttgtaaataaaatagctgcaaacctcagtcctttgtgctacttgatgtggctttcaaagaagagaagccttgtcctgagtttctcacttggcttcaggaaggccccaggttggattccagaaaccagtgaagatgtggccacaggaggaggtgtgctgaggtggctgctgaccgtggactccctgcgcagtggcctgcagatgttggggctgggttacagctgattgaagctgagtggccctggggggtctgtgaggggagttcctccccagtgatgaaattctctccttccaccctcaaatccctagaccttgactgaaatgctccgtggtcgggagcctggtcaaggaggaggagctgctgagaggcattgttcgcccttgctcatagcttagctcgatgtccgtgtcagacaggagatgattgagaacagccttgcctgtcactgtcctagaacaccctggagtttagtgttctgtgtcagagtcttgggagcctccttcagacccagatgacgggcctccctctgtccaaggagcagctgtaaaggagaagagggatttcatttgtttggtggctgttaccttgtctgtaagtcaaacttggagttgagcagtgctttttaaacgattcccttttgcagctaaaatttcacagggctatttctaatacgtaagcaaatgttaccattgactttattaataaaatatagttttgctttgca

SEQ ID NO: 157904 - protein, 150 aa, Artificial Sequence
  derived and/or modified sequence
MVLCFPLLLLLLVLWGPVCPLHAWPKRLTKAHWFEIQHIQPSPLQCNRAMSGINNYTQHCKHQNTFLHDSFQNVAAVCDLLSIVCKNRRHNCHQSSKPVNMTDCRLTSGKYPQCRYSAAAQYKFFIVACDPPQKSDPPYKLVPVHLDSIL

SEQ ID NO: 157905 - DNA, 453 bp, Artificial Sequence
  derived and/or modified sequence
atggttctttgttttcccctgctgctcttgctcctggtactgtggggaccggtctgtccgttgcatgcttggcctaaacgcctcactaaggcgcactggtttgagatccagcatattcaaccgagtcccttgcaatgtaatagagccatgtccggcatcaataactacactcagcactgcaagcatcagaatacattcctgcacgactccttccagaacgtcgccgccgtgtgtgacctgctctcaattgtgtgcaagaatcgtaggcataattgccatcagagtagtaaacctgttaatatgacagattgccggttgacatccggtaagtacccgcagtgcagatactctgcggcagcccagtataaatttttcatcgttgcttgcgaccctccacagaagtctgaccctccatacaaattagtgcccgtccaccttgattccattctatag

SEQ ID NO: 157906 - DNA, 453 bp, Artificial Sequence
  derived and/or modified sequence
atggtgctgtgcttccccctgctgctgctgctgctggtgctgtggggccctgtgtgccccctgcacgcctggcccaagaggctgaccaaggcccactggtttgagatccagcacatccagcccagccccctgcagtgcaacagagccatgagcggcatcaacaactacacccagcactgcaagcaccagaacaccttcctgcatgacagcttccagaatgtggccgctgtgtgtgacctgctgagcatcgtgtgcaagaacagaagacacaactgccaccagagcagcaagcctgtgaacatgacagactgccgcctgaccagcggcaagtacccccagtgccgctacagcgctgctgcccagtacaagttcttcatcgtggcctgtgaccccccccagaagagtgaccccccctacaagctggtgcctgtgcacctggacagcatcctgtag

SEQ ID NO: 157907 - DNA, 453 bp, Artificial Sequence
  derived and/or modified sequence
atggtgctgtgcttccccctgctgctgctgctgctggtgctgtggggacccgtgtgccccctgcacgcatggcccaagaggctgactaaggcacactggtttgaaatccaacacatccaacccagtccccttcagtgtaaccgcgcaatgtccgggattaacaactacacccaacactgtaaacaccagaacacttttttgcacgatagtttccagaatgtggcagcagtgtgcgatctgctgtcgatcgtgtgcaaaaatcggcgacacaactgccatcagtcctccaagcctgtcaatatgacagactgcagactgacttctgggaagtatcctcagtgcaggtattctgctgcagcccagtacaaattttttattgtggcgtgcgaccccccccaaaaatcggatcccccatacaagctggtcccggtccaccttgacagcatcctgtag

SEQ ID NO: 157908 - DNA, 453 bp, Artificial Sequence
  derived and/or modified sequence
atggttctctgcttccccctcctgttgcttctgctcgtgctctggggaccagtgtgtcctctgcacgcctggcctaaacgcctaacaaaggcccattggtttgaaattcagcacatccagccttcccccctccaatgtaaccgcgcaatgtccggaatcaataactatacccagcactgcaagcaccagaataccttcctccacgacagtttccagaacgttgccgcagtatgcgacctcctctctatcgtgtgtaagaatcggcgacacaattgtcaccaaagttccaaacctgtaaatatgactgactgtagattaacaagtggtaaataccctcagtgtcggtattccgccgcagctcagtacaagtttttcattgttgcttgcgatccgccacagaaaagtgaccccccatataagctggttccagtacacctagactctattctatag

SEQ ID NO: 157909 - DNA, 1061 bp, Artificial Sequence
  derived and/or modified sequence
gttttcagtcatgttgtttctttaagttggtttagccttcctgtatacatgtgataatgatactgttttaaagaacaggtgtgaaagtctaagagtttaatccagactctgcacaagaagttaatctgccaaaccctaggattctccttctgaaagctcagaatatttcttccccttccctatacacacagggctcgaagggttagagaagaaaggcagacaacagcttctgagctttggactaatcacagcctctgttctcagcaggagccccaacactgagaccagaaaagatggtgctatgctttcctcttcttttactgctgctggttctatggggaccagtgtgtccacttcatgcttggcctaagcgtctcaccaaggctcactggtttgaaattcagcatatacagccaagtcctctccaatgcaacagggcaatgagtggcatcaacaattatacccagcactgtaagcatcaaaatacctttctgcatgactctttccagaatgtggctgctgtctgtgatttgctcagcattgtctgcaaaaatcgtcggcacaactgccaccagagctcaaagcctgtcaacatgactgactgcagactcacttcaggaaagtatccccagtgccgctatagtgctgctgcccagtacaaattcttcattgttgcctgtgacccccctcagaagagcgatcccccctacaagttggttcctgtacacttagatagtattctctaaggcatccactgcatttcctttcatttgacatagcttctgttacaattgcatccatgttttcttttcttttgttgattttcttgttcccgtagaagaaagaagaaaggtgtttggagaattcgagtgcctaggatgccagaccagagttgagacaaaaagaaataagattattttctgctttgtagttctgtacttttcgagagaagggaatagggaagacagcaaagaaagattcagatttctaaccctgcaacttttgccaagctttattgccctgtgttcacagcaataaaaccacttcctgctgcattctaa

SEQ ID NO: 157910 - DNA, 453 bp, Artificial Sequence
  derived and/or modified sequence
atggtgctgtgcttccccctgctgctgctgctgctggtgctgtggggccccgtgtgccccctgcacgcctggcccaagagactgaccaaggcccactggttcgagatccagcacatccagcccagccccctgcagtgcaacagagccatgagcggcatcaacaactacacccagcactgcaagcaccagaacaccttcctgcacgacagcttccagaacgtggccgccgtgtgcgacctgctgagcatcgtgtgcaagaacagaagacacaactgccaccagagcagcaagcccgtgaacatgaccgactgcagactgaccagcggcaagtacccccagtgcagatacagcgccgccgcccagtacaagttcttcatcgtggcctgcgaccccccccagaagagcgaccccccctacaagctggtgcccgtgcacctggacagcatcctgtag

SEQ ID NO: 157911 - protein, 545 aa, Artificial Sequence
  derived and/or modified sequence
MGQVLPVFAHCKEAPSTASSTPDSTEGGNDDSDFRELHTAREFSEEDEEETTSQDWGTPRELTFSYIAFDGVVGSGGRRDSTARRPRPQGRSVSEPRDQHPQPSLGDSLESIPSLSQSPEPGRRGDPDTAPPSERPLEDLRLRLDHLGWVARGTGSGEDSSTSSSTPLEDEEPQEPNRLETGEAGEELDLRLRLAQPSSPEVLTPQLSPGSGTPQAGTPSPSRSRDSNSGPEEPLLEEEEKQWGPLEREPVRGQCLDSTDQLEFTVEPRLLGTAMEWLKTSLLLAVYKTVPILELSPPLWTAIGWVQRGPTPPTPVLRVLLKWAKSPRSSGVPSLSLGADMGSKVADLLYWKDTRTSGVVFTGLMVSLLCLLHFSIVSVAAHLALLLLCGTISLRVYRKVLQAVHRGDGANPFQAYLDVDLTLTREQTERLSHQITSRVVSAATQLRHFFLVEDLVDSLKLALLFYILTFVGAIFNGLTLLILGVIGLFTIPLLYRQHQAQIDQYVGLVTNQLSHIKAKIRAKIPGTGALASAAAAVSGSKAKAE

SEQ ID NO: 157912 - protein, 205 aa, Artificial Sequence
  derived and/or modified sequence
MGSKVADLLYWKDTRTSGVVFTGLMVSLLCLLHFSIVSVAAHLALLLLCGTISLRVYRKVLQAVHRGDGANPFQAYLDVDLTLTREQTERLSHQITSRVVSAATQLRHFFLVEDLVDSLKLALLFYILTFVGAIFNGLTLLILGVIGLFTIPLLYRQHQAQIDQYVGLVTNQLSHIKAKIRAKIPGTGALASAAAAVSGSKAKAE

SEQ ID NO: 157913 - DNA, 1638 bp, Artificial Sequence
  derived and/or modified sequence
atgggccaagtcctccccgtgtttgctcattgtaaagaggcccccagcactgcttcatcaaccccggacagtacggaaggaggtaatgacgactcagacttccgcgagctccacaccgcccgcgaatttagcgaagaagatgaagaggaaaccaccagccaggattggggcactccaagggagctgaccttttcttatatcgctttcgacggcgttgttggttccggaggaagaagagacagcactgctcgccgtcccaggccacagggacgttcagtctctgagccccgcgaccagcacccacagccctccttaggggactccctggagagcattccatccctatcacaatcaccggaaccggggaggagaggggatccagacactgctccaccatccgaacgtccattggaggatctgaggttgcgacttgaccatctgggctgggtggcaagggggacaggctcaggcgaagattcaagtacatccagctctactcctctggaggatgaggagccacaagaaccaaaccgcctagagaccggggaggcaggagaagagctggacttaagactgaggttggcacagcctagctcccctgaagttttgacaccacagttgtctcctggctctgggacacctcaagcgggtaccccctccccgtctcggtctagggattcaaacagcggtcctgaggagcccctcctggaggaggaagagaaacagtggggcccccttgagcgagaacctgtacggggccagtgcctggacagcaccgaccagctggagttcacagttgaacctagactgcttggaaccgccatggagtggctgaaaacctcccttttactggctgtctataaaacggtcccaattcttgagctcagcccacctttgtggacggctattgggtgggtccagcgcgggccaacccctcctactcctgtcttgcgggtcctgctgaagtgggccaagagcccacgatcaagcggagtgcctagcctctccctgggcgcagacatgggctctaaagtggccgatctgctgtactggaaagacaccaggacctcaggagtggtgtttacaggcctgatggtgtcccttctctgcctgttacacttctcaattgtttcagtggccgctcatttggccctgctgctcctctgcgggactataagcctgcgtgtgtacagaaaagtgttgcaggctgtgcataggggggacggtgccaaccctttccaagcctatctcgacgttgatctgacgctgactcgcgagcaaaccgaaaggctctcccaccagattacgtctcgtgttgtgtccgctgcgacgcagcttaggcacttctttctggtggaagacctggtggactccctgaagctggccttgcttttttatatcctgacttttgtgggggccattttcaatggcttaacactccttattctcggcgtaattggcttgtttacaatcccccttttataccgacaacatcaagcacagattgatcaatatgtagggctggtgactaaccagctgtcccacatcaaagccaaaattagggccaagatccctgggaccggggctctggctagcgccgctgcagccgtttccggctcgaaggccaaagctgagtag

SEQ ID NO: 157914 - DNA, 1638 bp, Artificial Sequence
  derived and/or modified sequence
atgggccaggtgctgcctgtgtttgcccactgcaaggaggcccccagcacagccagcagcaccccagacagcacagaaggaggaaatgatgacagcgacttccgggagctgcacacagcccgggagttcagcgaggaggatgaggaggagaccaccagccaggactggggcaccccccgggagctgaccttctcctacatcgcctttgatggagtggtgggcagcggcggccggcgggacagcacagcccggcggccccggccccagggccgctctgtgtctgagccccgggaccagcacccccagcccagcctgggggacagcctggagagcatccccagcctgagccagagccctgagcctggaagaagaggagaccctgacacagcccctccttctgagcggcccctggaggacctgcggctgcggctggaccacctgggctgggtggcccggggcaccggcagcggggaggacagcagcaccagcagcagcacccccctggaggatgaggagccccaggagcccaaccggctggagactggagaggccggggaggagctggacctgcggctgcggctggcccagcccagcagccctgaggtgctgaccccccagctgagccctggcagcggcaccccccaggccggcacccccagccccagccgcagccgggacagcaacagcggccctgaggagcccctgctggaggaggaggagaagcagtggggccccctggagcgggagcctgtgcggggccagtgcctggacagcacagaccagctggagttcaccgtggagccccggctgctgggcacagccatggagtggctgaagaccagcctgctgctggccgtgtacaagacagtgcccatcctggagctgagcccccccctgtggacagccatcggctgggtgcagaggggccccaccccacccacccctgtgctgcgggtgctgctgaagtgggccaagagccccaggagcagcggcgtgcccagcctgagcctgggcgctgacatgggcagcaaggtggccgacctgctgtactggaaggacaccaggaccagcggcgtggtgttcaccggcctgatggtgtccctgctgtgcctgctgcacttcagcatcgtgtctgtggccgcccacctggccctgctgctgctgtgtggcaccatcagcctgcgggtgtacaggaaggtgctgcaggccgtgcacagaggagatggagccaaccccttccaggcctacctggatgtggacctgaccctgacccgggagcagacagagcggctgagccaccagatcaccagccgggtggtgtctgctgccacccagctgcggcacttcttcctggtggaggacctggtggacagcctgaagctggccctgctcttctacatcctgacctttgtgggcgccatcttcaacggcctgaccctgctgatcctgggcgtcatcggcctcttcaccatccccctgctgtaccggcagcaccaggcccagattgaccagtatgtgggcctggtgaccaaccagctgagccacatcaaggccaagatccgggccaagatccctggcactggagccctggccagcgctgctgctgctgtgtctggcagcaaggccaaggccgagtag

SEQ ID NO: 157915 - DNA, 1638 bp, Artificial Sequence
  derived and/or modified sequence
atgggccaggtgctgcccgtgttcgcccactgcaaggaggccccctccactgcatccagtacacctgacagtactgaggggggaaatgatgacagcgacttccgggaactgcatactgcccgcgaattttctgaggaagatgaggaggagaccacatcccaggactgggggacccctagggagttaactttctcttacattgcatttgacggagtggtggggtccggcggacgccgggactctaccgcacgccggcctaggccacaaggccgatcagtttccgagccaagagatcaacacccccagccaagtctcggggattctttggagtcaattccctctctctcccagtccccagagccaggcaggagaggggatcctgacaccgctcctccatctgaacggccattagaagatcttcggctccgacttgatcaccttggctgggtcgcgcgaggcacgggaagtggtgaagacagctccacctcgagcagcacacccctcgaagatgaggagccccaagagccaaaccgcttggaaacgggcgaagccggtgaggaactggaccttagacttagactggctcagccatcatcgcctgaggtgctcacacctcagttgtccccaggcagtgggactccccaagctggcaccccctctccgagtcgctcaagggacagcaatagtggaccagaggagcctctcttggaagaagaggagaagcagtggggccctctggagcgggagcccgtacgaggccaatgtctcgactctactgatcagttggagttcaccgtggaaccaaggttgctgggcaccgcaatggaatggctgaaaacctctttactgcttgccgtttacaaaactgtcccaattttggaactgtcgccgcctctgtggacagctatcgggtgggttcagcgtgggccaacccctccgactccagtgctgcgggtactcctgaaatgggcaaagtctcctcgatcaagcggcgttcccagcttatcattgggcgccgatatgggatcgaaggtcgcagacctgctatattggaaagacacccgcactagcggcgtggtgtttactggcctcatggtttccttgctgtgcctactgcatttttccatcgtgagtgttgctgctcatttggccttgctgctgttgtgcggaacaatatctctacgcgtgtaccgaaaggtgctgcaggccgtgcacaggggagacggtgcgaacccatttcaggcttatcttgacgtcgaccttacacttacgagagaacagacagaacggcttagccatcaaattacaagtcgtgttgtgagcgcagccacccagctgcgtcactttttcttagtggaagatctcgtcgattccctgaagcttgcgcttctcttttacattctcaccttcgtcggtgccatatttaatgggcttaccctcctgatcttaggcgtgattgggctcttcaccatcccattactgtaccgccagcaccaggcgcagattgatcagtatgtgggtctggtcaccaaccagcttagccacatcaaggctaagatacgggccaagatccctgggaccggggccctggcaagtgctgccgctgctgtgtctgggtccaaagctaaagcagaatag

SEQ ID NO: 157916 - DNA, 1638 bp, Artificial Sequence
  derived and/or modified sequence
atgggccaggttctaccagtgtttgctcactgtaaggaagccccaagtacggcttcaagcacgcccgatagcaccgaaggcggaaatgatgatagcgattttcgggaactgcataccgcccgagagtttagcgaggaggatgaggaggaaactacatcgcaagattggggcacccctagggagctaacattctcttacattgcattcgatggggtggtaggtagcgggggacgtcgtgactctactgccaggagacctcgtccgcaaggtagatctgtctctgagcctagggaccaacatccccagccttctctcggtgactctctcgaatctattccaagtttgtcgcagagtcctgaacccggaagaagaggtgacccagataccgcgccaccttctgaaaggccccttgaggatcttaggctgcgtctcgatcatctcgggtgggtcgccagaggtacaggctcaggcgaagactcatcaacatcttcttccactccactcgaggacgaagagccccaggaaccaaacaggctggagactggggaggcaggggaagagttggacctccgcctacgactggcccagcccagcagcccagaagtgcttacccctcagctgagccctgggtcaggcacgcctcaagccggaacgcctagtcccagcaggagcagggatagtaactcgggcccagaggagcctctgctcgaggaggaggagaaacagtggggtccactggaaagagaacccgttagaggacagtgcttggactccactgaccagctggagttcacggttgagcccagactcttggggactgccatggagtggctcaaaacttctctattgctggcagtgtacaagacagtccctatattggagctgagccccccactgtggactgcaattggatgggtgcagcgaggacctacccccccaacgcccgtgcttcgcgtgttgttgaagtgggctaaaagccctagaagcagcggagtcccaagtttaagtcttggagctgatatggggtccaaggtggccgacctactgtactggaaagatacgagaacaagcggggtcgtattcacggggcttatggtttctctgctgtgtcttctccacttctccatagtttcagttgccgcacatctggcactgctcctgctgtgcggtacaatttccttgcgggtgtataggaaggtgctacaggccgtgcaccgcggagacggcgcaaaccccttccaggcataccttgacgtggacctcactttgacaagggagcagaccgagagactttcacatcagatcacgtctcgcgtagtcagcgcggctacccagctccggcatttcttcctcgtcgaggatctggttgactctctaaaattggctcttctcttttatatactgactttcgtgggcgcaattttcaacggcttaaccctactcatcttaggcgttatcgggttgtttaccatcccactactgtaccgccaacaccaggcgcagatcgatcaatacgttggactggtgactaatcagctgtcccacattaaggcaaagattcgggcaaagatacctgggaccggggctttagcctctgcggctgcagccgtttccggctcaaaggccaaagctgaatag

SEQ ID NO: 157917 - DNA, 2282 bp, Artificial Sequence
  derived and/or modified sequence
cgcgctgcagtgccttccccacctcggccccgcccgcccccgccgagccgagcaccagggcggcggcggcggcggcggcggcggcggcggctggagcagcccgggaggaggaggcggcgagaatggcagcggcgtcgtgggcgcggcggagatgagcgcccgcgaccccgggcccagggcggcacagccggagtgggcgggggtcccgatgcaggcccgaggggggccatggggcaggtcctgccggtcttcgcccactgcaaagaagctccgtctacagcctcctcaactcctgattccacagaaggagggaacgacgactctgattttcgagagctgcacacagcccgggaattctcagaggaggacgaggaggagaccacgtcgcaggactggggcaccccccgggagctgaccttctcctacatcgcctttgatggtgtagtgggctccgggggccgcagggattcaactgcccgccgcccccgcccccagggccgctcagtctcggaaccacgagaccagcaccctcagcccagcctgggcgacagcttggagagcatccccagcctgagccaatccccggagcctggacgacggggtgatcctgacaccgcgcctccatccgagcgccctctggaagacctgaggcttcggttggaccatctgggctgggtggcccggggaacgggatccggggaggactcttccaccagcagctccaccccgctggaagacgaagaaccccaagaacccaacagattggagacaggagaagctggggaagaactggacctacgactccgacttgctcagccctcatcgcccgaggtcttgactccccagctcagtccgggctctgggacaccccaggccggtactccgtccccatcccgatcgcgagattcgaactctgggcccgaagagccattgctggaagaggaagaaaagcagtgggggccactggagcgagagccagtaaggggacagtgcctcgatagcacggaccaattagaattcacggtggagccacgccttctaggaacagctatggaatggttaaagacatcattgcttttggctgtttacaagacggttccaattttggaattgtccccacctctgtggacagccattggctgggtccaaaggggccccaccccccctactcctgtcctccgggttctactgaagtgggcaaaatccccgagaagcagcggtgtccccagcctctcactcggagccgatatggggagtaaagtggcggacctgctgtactggaaggacacgaggacgtcaggagtggtcttcacaggcctgatggtctccctcctctgcctcctgcactttagcatcgtgtccgtggccgcgcacttggctctgttgctgctctgcggcaccatctctctcagggtttaccgcaaagtgctgcaggccgtgcaccggggggatggagccaaccctttccaggcctacctggatgtggacctcaccctgactcgggagcagacggaacgtttgtcccaccagatcacctcccgcgtggtctcggcggccacgcagctgcggcacttcttcctggtagaagacctcgtggattccctcaagctggccctcctcttctacatcttgaccttcgtgggtgccatcttcaatggtttgactcttctcattctgggagtgattggtctattcaccatccccctgctgtaccggcagcaccaggctcagatcgaccaatatgtggggttggtgaccaatcagttgagccacatcaaagctaagatccgagctaaaatcccagggaccggagccctggcctctgcagcagccgcagtctccggatccaaagccaaagccgaatgagaacggtgtctctgcccgcaggacgcctgcccccagcccccgcagccctctggccccctccatctcttgtccgttcccacccacccccctcctcggcccgagccttttcccggtgggtgtcaggatcactcccactagggactctgcgctaattacctgagcgaccaggactacatttcccaagaggctctgctccaggagtccaggaaagacgaggcaccttggccgcggggcctgctgggacttgtagttgcctagacagggcaccaccctgcacttccggacccgccgctggaggcgccgtgaggcgttggtgtctcctggatgctactagccccaacgccggggctttgcatggggcccaggggaggcctgagcttggatttacactgtaataaagactcctgtggaaaacc

SEQ ID NO: 157918 - DNA, 1078 bp, Artificial Sequence
  derived and/or modified sequence
ccccgagaagcagcggtgtccccagcctctcactcggagccgatatggggagtaaagtggcggacctgctgtactggaaggacacgaggacgtcaggagtggtcttcacaggcctgatggtctccctcctctgcctcctgcactttagcatcgtgtccgtggccgcgcacttggctctgttgctgctctgcggcaccatctctctcagggtttaccgcaaagtgctgcaggccgtgcaccggggggatggagccaaccctttccaggcctacctggatgtggacctcaccctgactcgggagcagacggaacgtttgtcccaccagatcacctcccgcgtggtctcggcggccacgcagctgcggcacttcttcctggtagaagacctcgtggattccctcaagctggccctcctcttctacatcttgaccttcgtgggtgccatcttcaatggtttgactcttctcattctgggagtgattggtctattcaccatccccctgctgtaccggcagcaccaggctcagatcgaccaatatgtggggttggtgaccaatcagttgagccacatcaaagctaagatccgagctaaaatcccagggaccggagccctggcctctgcagcagccgcagtctccggatccaaagccaaagccgaatgagaacggtgtctctgcccgcaggacgcctgcccccagcccccgcagccctctggccccctccatctcttgtccgttcccacccacccccctcctcggcccgagccttttcccggtgggtgtcaggatcactcccactagggactctgcgctaattacctgagcgaccaggactacatttcccaagaggctctgctccaggagtccaggaaagacgaggcaccttggccgcggggcctgctgggacttgtagttgcctagacagggcaccaccctgcacttccggacccgccgctggaggcgccgtgaggcgttggtgtctcctggatgctactagccccaacgccggggctttgcatggggcccaggggaggcctgagcttggatttacactgtaataaagactcctgtggaaaacc

SEQ ID NO: 157919 - DNA, 1638 bp, Artificial Sequence
  derived and/or modified sequence
atgggccaggtgctgcccgtgttcgcccactgcaaggaggcccccagcaccgccagcagcacccccgacagcaccgagggcggcaacgacgacagcgacttcagagagctgcacaccgccagagagttcagcgaggaggacgaggaggagaccaccagccaggactggggcacccccagagagctgaccttcagctacatcgccttcgacggcgtggtgggcagcggcggcagaagagacagcaccgccagaagacccagaccccagggcagaagcgtgagcgagcccagagaccagcacccccagcccagcctgggcgacagcctggagagcatccccagcctgagccagagccccgagcccggcagaagaggcgaccccgacaccgccccccccagcgagagacccctggaggacctgagactgagactggaccacctgggctgggtggccagaggcaccggcagcggcgaggacagcagcaccagcagcagcacccccctggaggacgaggagccccaggagcccaacagactggagaccggcgaggccggcgaggagctggacctgagactgagactggcccagcccagcagccccgaggtgctgaccccccagctgagccccggcagcggcaccccccaggccggcacccccagccccagcagaagcagagacagcaacagcggccccgaggagcccctgctggaggaggaggagaagcagtggggccccctggagagagagcccgtgagaggccagtgcctggacagcaccgaccagctggagttcaccgtggagcccagactgctgggcaccgccatggagtggctgaagaccagcctgctgctggccgtgtacaagaccgtgcccatcctggagctgagcccccccctgtggaccgccatcggctgggtgcagagaggccccaccccccccacccccgtgctgagagtgctgctgaagtgggccaagagccccagaagcagcggcgtgcccagcctgagcctgggcgccgacatgggcagcaaggtggccgacctgctgtactggaaggacaccagaaccagcggcgtggtgttcaccggcctgatggtgagcctgctgtgcctgctgcacttcagcatcgtgagcgtggccgcccacctggccctgctgctgctgtgcggcaccatcagcctgagagtgtacagaaaggtgctgcaggccgtgcacagaggcgacggcgccaaccccttccaggcctacctggacgtggacctgaccctgaccagagagcagaccgagagactgagccaccagatcaccagcagagtggtgagcgccgccacccagctgagacacttcttcctggtggaggacctggtggacagcctgaagctggccctgctgttctacatcctgaccttcgtgggcgccatcttcaacggcctgaccctgctgatcctgggcgtgatcggcctgttcaccatccccctgctgtacagacagcaccaggcccagatcgaccagtacgtgggcctggtgaccaaccagctgagccacatcaaggccaagatcagagccaagatccccggcaccggcgccctggccagcgccgccgccgccgtgagcggcagcaaggccaaggccgagtag

SEQ ID NO: 157920 - protein, 105 aa, Artificial Sequence
  derived and/or modified sequence
MAKISSPTETERCIESLIAVFQKYAGKDGYNYTLSKTEFLSFMNTELAAFTKNQKDPGVLDRMMKKLDTNSDGQLDFSEFLNLIGGLAMACHDSFLKAVPSQKRT

SEQ ID NO: 157921 - DNA, 318 bp, Artificial Sequence
  derived and/or modified sequence
atggctaaaatcagtagcccgacagaaactgagcgttgtattgaatcgctcattgctgtcttccagaaatacgcggggaaggatggatacaattataccctcagtaagacagagtttctttcctttatgaatacagaacttgcggctttcactaagaaccagaaagaccccggcgttctggaccgtatgatgaagaaactagatactaactctgatggccagttggacttctccgagtttctcaacttgataggcggactagccatggcctgccatgactccttcctgaaggccgtcccttctcagaagagaacttag

SEQ ID NO: 157922 - DNA, 318 bp, Artificial Sequence
  derived and/or modified sequence
atggccaagatcagcagccccacagaaacagagcgctgcatcgagagcctgattgctgtgttccagaagtatgccggcaaggatggctacaactacaccctgagcaagacagagttcctgtccttcatgaacacagagctggccgccttcaccaagaaccagaaggaccccggggtgctggacaggatgatgaagaagctggacaccaacagtgatggccagctggacttcagcgagttcctgaacctgattggaggcctggccatggcctgccacgacagcttcctgaaggctgtgcccagccagaagaggacatag

SEQ ID NO: 157923 - DNA, 318 bp, Artificial Sequence
  derived and/or modified sequence
atggccaagatcagcagccccaccgagaccgagcggtgcatcgagtcccttatcgccgttttccaaaaatatgcggggaaagatggatacaactatacattatctaaaaccgagtttctcagctttatgaacacagaattagcagcgttcaccaaaaatcagaaagatccaggagtgcttgatcgcatgatgaagaagttagataccaactcagatgggcagctggactttagtgaattcctgaacttgatcggcggcctggccatggcctgccatgacagttttctcaaggcggtgccatcccaaaaacgcacctag

SEQ ID NO: 157924 - DNA, 318 bp, Artificial Sequence
  derived and/or modified sequence
atggcaaagatctccagccccacggagacggaaaggtgcatagagtctcttatcgcggtctttcagaaatacgctggtaaagatggatacaattatacgctatcgaaaaccgagttcttaagttttatgaatacagagctggctgctttcaccaagaatcagaaagatcccggtgtacttgacaggatgatgaaaaagttggatactaacagcgatgggcagctcgacttctccgagttcctgaatctaatagggggactcgctatggcttgccacgactcgtttttaaaagccgtcccatcccagaagcgaacatag

SEQ ID NO: 157925 - DNA, 594 bp, Artificial Sequence
  derived and/or modified sequence
gggcaaggctgggccgggaagggcgtgggttgaggagaggctccagacccgcacgccgcgcgcacagagctctcagcgccgctcccagccacagcctcccgcgcctcgctcagctccaacatggcaaaaatctccagccctacagagactgagcggtgcatcgagtccctgattgctgtcttccagaagtatgctggaaaggatggttataactacactctctccaagacagagttcctaagcttcatgaatacagaactagctgccttcacaaagaaccagaaggaccctggtgtccttgaccgcatgatgaagaaactggacaccaacagtgatggtcagctagatttctcagaatttcttaatctgattggtggcctagctatggcttgccatgactccttcctcaaggctgtcccttcccagaagcggacctgaggaccccttggccctggccttcaaacccaccccctttccttccagcctttctgtcatcatctccacagcccacccatcccctgagcacactaaccacctcatgcaggccccacctgccaatagtaataaagcaatgtcacttttttaaaacatgaa

SEQ ID NO: 157926 - DNA, 318 bp, Artificial Sequence
  derived and/or modified sequence
atggccaagatcagcagccccaccgagaccgagagatgcatcgagagcctgatcgccgtgttccagaagtacgccggcaaggacggctacaactacaccctgagcaagaccgagttcctgagcttcatgaacaccgagctggccgccttcaccaagaaccagaaggaccccggcgtgctggacagaatgatgaagaagctggacaccaacagcgacggccagctggacttcagcgagttcctgaacctgatcggcggcctggccatggcctgccacgacagcttcctgaaggccgtgcccagccagaagagaacctag

SEQ ID NO: 157927 - protein, 15 aa, Artificial Sequence
  derived and/or modified sequence
VAIALKAAHYHTHKE

SEQ ID NO: 157928 - protein, 83 aa, Artificial Sequence
  derived and/or modified sequence
AGKMTKLEEHLEGIVNIFHQYSVRKGHFDTLSKGELKQLLTKELANTIKRPKKGSSVIDEIFQGLDANQDEQVDFQEFISLVA

SEQ ID NO: 157929 - protein, 92 aa, Artificial Sequence
  derived and/or modified sequence
MTKLEEHLEGIVNIFHQYSVRKGHFDTLSKGELKQLLTKELANTIKNIKDKAVIDEIFQGLDANQDEQVDFQEFISLVAIALKAAHYHTHKE

SEQ ID NO: 157930 - DNA, 252 bp, Artificial Sequence
  derived and/or modified sequence
gctggcaaaatgacgaaactggaagagcatctcgaagggatcgtcaacatttttcatcagtattccgttcggaaaggccactttgacactctctcgaagggtgagttaaaacagttacttaccaaggagttggccaataccatcaaaagaccgaagaagggtagttctgtgattgatgaaatcttccagggtttggacgccaaccaggacgaacaggtggattttcaggagtttatcagtctggtcgcttag

SEQ ID NO: 157931 - DNA, 279 bp, Artificial Sequence
  derived and/or modified sequence
atgaccaagctcgaagagcatctggagggaattgtgaacatttttcaccagtacagcgtgagaaaaggacattttgacaccctgtctaagggtgagttgaaacagttgctgaccaaggagctggcgaatacgataaaaaacattaaagataaagcagttatcgacgaaatttttcagggcttagatgctaatcaagacgagcaggtggacttccaggaatttatcagcctcgtagctattgccctgaaagctgcccactaccacacccataaagaatag

SEQ ID NO: 157932 - DNA, 252 bp, Artificial Sequence
  derived and/or modified sequence
gctgggaagatgaccaagctggaggagcacctggagggcatcgtgaacatcttccaccagtacagcgtgaggaagggccactttgacaccctgagcaaaggagagctgaagcagctgctgaccaaggagctggccaacaccatcaagaggcccaagaagggcagctctgtgattgatgagatcttccagggcctggatgccaaccaggatgagcaggtggacttccaggagttcatcagcctggtggcctag

SEQ ID NO: 157933 - DNA, 279 bp, Artificial Sequence
  derived and/or modified sequence
atgaccaagctggaggagcacctggagggcatcgtgaacatcttccaccagtacagcgtgaggaagggccactttgacaccctgagcaagggggagctgaagcagctgctgaccaaggagctggccaacaccatcaagaacatcaaggacaaggctgtgattgatgagatcttccagggcctggatgccaaccaggatgagcaggtggacttccaggagttcatcagcctggtggccatcgccctgaaggccgcccactaccacacccacaaggagtag

SEQ ID NO: 157934 - DNA, 252 bp, Artificial Sequence
  derived and/or modified sequence
gccggcaagatgaccaagctggaggagcacctggagggcatcgtgaatatcttccaccagtactcagtgagaaaaggccactttgacactctgtccaagggagaattgaaacagctccttacaaaggaactcgccaacactatcaagcgtcccaaaaagggctcctccgtgattgacgaaatctttcagggattggacgcaaaccaagacgagcaggtggatttccaagaatttatctcactggttgcatag

SEQ ID NO: 157935 - DNA, 279 bp, Artificial Sequence
  derived and/or modified sequence
atgaccaagctggaggagcacctggagggcatcgtgaacatcttccatcagtatagtgtgaggaaaggtcatttcgacactctcagcaaaggcgagcttaagcaactgctgaccaaagagctggctaacacaattaagaacatcaaagataaagctgtcattgacgagatcttccaaggccttgatgccaaccaagacgaacaggtggactttcaagaatttatctccctagtcgcgatcgcactcaaagctgcccactatcacacccacaaggagtag

SEQ ID NO: 157936 - DNA, 252 bp, Artificial Sequence
  derived and/or modified sequence
gcgggtaaaatgaccaagctggaggagcatctggaagggatcgtgaatatcttccaccaatattccgtcagaaaaggtcattttgacacactaagtaaaggggaattgaaacaactgttgacaaaagagctggctaacactattaagagacccaagaaaggatcatctgtgattgacgagatcttccagggtctggatgcgaaccaggacgagcaggtggattttcaggagtttatctctctcgtcgcatag

SEQ ID NO: 157937 - DNA, 279 bp, Artificial Sequence
  derived and/or modified sequence
atgacaaagttggaagaacatttggagggcatcgtgaacatctttcatcaatactctgtgagaaaggggcactttgatacactgagtaagggcgagctgaaacagttgctgacaaaagagctggccaacaccattaaaaacataaaggacaaagccgtgatagacgagatattccagggactggacgccaatcaagacgaacaggtggattttcaggaattcatctctctggttgccatcgccctgaaagccgctcactaccacactcacaaggagtag

SEQ ID NO: 157938 - DNA, 308 bp, Artificial Sequence
  derived and/or modified sequence
accactgctggctttttgctgtagctccacattcctgtgcattgaggggttaacattaggctgggaagatgacaaaacttgaagagcatctggagggaattgtcaatatcttccaccaatactcagttcggaaggggcattttgacaccctctctaagggtgagctgaagcagctgcttacaaaggagcttgcaaacaccatcaagaggcctaagaaagggtcttctgtcattgatgaaatattccaaggcctggatgctaatcaagatgaacaggtcgactttcaagaattcatatccctggtagcc

SEQ ID NO: 157939 - DNA, 516 bp, Artificial Sequence
  derived and/or modified sequence
aagatgaagcctgaactgattataaaaccttccttggctcagtgcccttcaccactgctggctttttgctgtagctccacattcctgtgcattgaggggttaacattaggctgggaagatgacaaaacttgaagagcatctggagggaattgtcaatatcttccaccaatactcagttcggaaggggcattttgacaccctctctaagggtgagctgaagcagctgcttacaaaggagcttgcaaacaccatcaagaatatcaaagataaagctgtcattgatgaaatattccaaggcctggatgctaatcaagatgaacaggtcgactttcaagaattcatatccctggtagccattgcgctgaaggctgcccattaccacacccacaaagagtaggtagctctctgaaggctttttacccagcaatgtcctcaatgagggtcttttctttccctcaccaaaacccagccttgcccgtggggagtaagagttaataaacacactcacgaaaagtt

SEQ ID NO: 157940 - DNA, 252 bp, Artificial Sequence
  derived and/or modified sequence
gccggcaagatgaccaagctggaggagcacctggagggcatcgtgaacatcttccaccagtacagcgtgagaaagggccacttcgacaccctgagcaagggcgagctgaagcagctgctgaccaaggagctggccaacaccatcaagagacccaagaagggcagcagcgtgatcgacgagatcttccagggcctggacgccaaccaggacgagcaggtggacttccaggagttcatcagcctggtggcctag

SEQ ID NO: 157941 - DNA, 279 bp, Artificial Sequence
  derived and/or modified sequence
atgaccaagctggaggagcacctggagggcatcgtgaacatcttccaccagtacagcgtgagaaagggccacttcgacaccctgagcaagggcgagctgaagcagctgctgaccaaggagctggccaacaccatcaagaacatcaaggacaaggccgtgatcgacgagatcttccagggcctggacgccaaccaggacgagcaggtggacttccaggagttcatcagcctggtggccatcgccctgaaggccgcccactaccacacccacaaggagtag

SEQ ID NO: 157942 - protein, 586 aa, Artificial Sequence
  derived and/or modified sequence
MLARVTRKMLRHAKCFQRLAIFGSVRALHKDNRTATPQNFSNYESMKQDFKLGIPEYFNFAKDVLDQWTDKEKAGKKPSNPAFWWINRNGEEMRWSFEELGSLSRKFANILSEACSLQRGDRVILILPRVPEWWLANVACLRTGTVLIPGTTQLTQKDILYRLQSSKANCIITNDVLAPAVDAVASKCENLHSKLIVSENSREGWGNLKELMKHASDSHTCVKTKHNEIMAIFFTSGTSGYPKMTAHTHSSFGLGLSVNGRFWLDLTPSDVMWNTSDTGWAKSAWSSVFSPWIQGACVFTHHLPRFEPTSILQTLSKYPITVFCSAPTVYRMLVQNDITSYKFKSLKHCVSAGEPITPDVTEKWRNKTGLDIYEGYGQTETVLICGNFKGMKIKPGSMGKPSPAFDVKIVDVNGNVLPPGQEGDIGIQVLPNRPFGLFTHYVDNPSKTASTLRGNFYITGDRGYMDKDGYFWFVARADDVILSSGYRIGPFEVENALNEHPSVAESAVVSSPDPIRGEVVKAFVVLNPDYKSHDQEQLIKEIQEHVKKTTAPYKYPRKVEFIQELPKTISGKTKRNELRKKEWKTI

SEQ ID NO: 157943 - DNA, 1761 bp, Artificial Sequence
  derived and/or modified sequence
atgctggcgagggtgacccgtaagatgctcaggcatgctaaatgttttcaacgtctggcaatttttgggtcagtccgtgctctgcacaaggataaccgcaccgctactcctcaaaacttctcaaattacgaatccatgaagcaggactttaagctgggaataccagaatatttcaactttgctaaggatgttctggatcaatggaccgataaggagaaagcaggtaagaaaccgagcaatcctgccttttggtggatcaaccgcaatggggaagagatgcggtggagtttcgaggaacttggaagtctaagcaggaagtttgccaacatactgagtgaggcatgctcactgcaacgaggagaccgggtaattctgattcttcctcgagtccctgagtggtggttagcaaacgttgcctgtttgagaaccggaaccgtgctgatcccaggcacaacccagcttacccagaaagatatcttatatcgactacagtcgtcaaaggcaaactgcattatcactaatgacgtgctggcaccagccgtagatgccgtggctagcaaatgcgaaaatctccattcgaaattaattgtctcagagaattcaagggaggggtggggcaatctcaaggagctaatgaagcatgcatctgactctcacacttgtgtgaaaacaaagcacaatgagattatggctatcttcttcactagtggaacctccggctatccaaagatgacggcccacacccattcctcctttggcctgggcttaagtgttaacggccgattctggcttgacctcacaccatctgatgtgatgtggaacacctccgacacaggttgggccaagtccgcttggtcctctgtattcagtccgtggattcagggtgcatgtgtcttcacccaccacctgccaaggttcgagcctacgtccatcctgcagacactgtcaaagtaccccattaccgtcttctgctcagcccccactgtgtatagaatgctagtgcagaatgacattacttcttataagttcaagtctctgaagcactgcgtctctgcaggggagccaatcactccagacgtgacggagaagtggcgcaataagaccggtttagacatttacgaaggctacggccagaccgagaccgtactaatctgtggtaacttcaagggcatgaagatcaagccaggcagcatgggaaagccctctcctgcttttgacgttaagatcgttgatgtcaatgggaacgtactcccacctggccaggaaggagatattggcatccaggttctacctaacagaccatttggtctgttcacccactacgtggacaacccctcaaagactgcttctaccctgaggggcaacttctacataaccggagaccgtggatatatggataaggacggctacttttggttcgtggccagggctgatgatgtcattcttagctccggttaccgcatcggtccattcgaggtcgaaaatgcgctgaacgagcacccgtctgttgctgagagtgccgtggtgagtagcccagaccccattcggggcgaagttgtcaaggcatttgtagtcctcaaccccgattataaaagccatgatcaggaacagctgataaaagagatccaggagcatgttaagaaaaccaccgctccctacaagtacccccgcaaggtggagttcatacaggaattgcctaagactatttcagggaaaactaagaggaacgagctgcgcaagaaagagtggaagaccatatag

SEQ ID NO: 157944 - DNA, 1761 bp, Artificial Sequence
  derived and/or modified sequence
atgctggcccgggtgaccaggaagatgctgcggcatgccaagtgcttccagaggctggccatcttcggctctgtgcgggccctgcacaaggacaacagaacagccaccccccagaacttcagcaactatgaatccatgaagcaggacttcaagctgggcatccctgagtacttcaactttgccaaggatgtgctggaccagtggacagacaaggagaaggccggcaagaagcccagcaacccagccttctggtggatcaacagaaatggagaggagatgcgctggagctttgaggagctgggcagcctgagcaggaagtttgccaacatcctgtctgaggcctgcagcctgcagagaggagacagagtcatcctgatcctgccccgggtgcctgagtggtggctggccaacgtggcctgcctgaggactggaacagtgctgatccctggcaccacccagctgacccagaaggacatcctgtaccgcctgcagagcagcaaggccaactgcatcatcaccaatgatgtgctggccccagctgtggatgctgtggccagcaaatgtgagaacctgcacagcaagctgattgtgtctgagaacagccgggagggctggggcaacctgaaggagctgatgaagcacgccagtgacagccacacctgtgtgaagaccaagcacaatgagatcatggccatcttcttcaccagcggcaccagcggctaccccaagatgacagcccacacccacagcagctttggcctgggcctgtctgtgaatggccgcttctggctggacctgacccccagtgatgtgatgtggaacaccagtgacaccggctgggccaagagcgcctggagctctgtgttcagcccctggatccagggcgcctgtgtgttcacccaccacctgcccaggtttgagcccaccagcatcctgcagaccctgagcaagtaccccatcaccgtcttctgcagcgcccccaccgtgtacaggatgctggtgcagaatgacatcaccagctacaagttcaagagcctgaagcactgtgtgtctgctggggagcccatcaccccagatgtgacagagaagtggaggaacaagacaggcctggacatctatgagggctacggccagacagaaacagtgctgatctgtggcaacttcaagggcatgaagatcaagccaggctccatgggcaagcccagccctgcctttgatgtgaagatcgtggatgtgaatggaaatgtgctgcccccaggccaggagggggacatcggcatccaggtgctgcccaaccggcccttcggcctcttcacccactacgtggacaaccccagcaagacagccagcaccctgcggggcaacttctacatcactggagaccggggctacatggacaaggatggctacttctggtttgtggcccgggcagatgatgtgatcctgagcagcggctaccgcatcggcccctttgaggtggagaatgccctgaatgagcaccccagcgtggccgagagcgctgtggtgagcagcccagaccccatccggggggaggtggtgaaggcctttgtggtgctgaacccagactacaagagccatgaccaggagcagctgatcaaggagatccaggagcacgtgaagaagaccacagccccctacaagtaccccaggaaggtggagttcatccaggagctgcccaagaccatcagcggcaagaccaagagaaatgagctgaggaagaaggagtggaagaccatctag

SEQ ID NO: 157945 - DNA, 1761 bp, Artificial Sequence
  derived and/or modified sequence
atgctggcccgggtgacccggaagatgctgcggcacgccaagtgctttcagcggcttgccatattcggctcagtcagagctttgcataaggacaataggaccgccaccccgcaaaacttcagtaactatgaatctatgaaacaagactttaaattggggataccggaatatttcaattttgctaaagacgttctagaccaatggactgataaagaaaaggccggcaagaaacccagtaaccccgctttctggtggatcaataggaatggagaggaaatgagatggtctttcgaggagttaggctctcttagccgtaagttcgccaacatcctgtccgaggcctgctccttgcagcgcggagacagagtgattttaatcttaccccgggtgccagagtggtggcttgccaatgtggcctgccttagaactgggaccgtgttgatacccgggaccacacagttgacccagaaggacatcctgtaccgtttgcagagcagcaaagccaactgtattattaccaatgatgtactggcccctgccgtcgatgcagttgcttcgaagtgcgagaacctgcacagtaagctgatcgtgtccgaaaacagccgggagggctggggcaacctgaaagaactgatgaagcatgcaagcgattcccacacatgtgtgaagaccaagcacaatgagatcatggctatcttcttcacctccggcactagtggttaccctaagatgaccgctcatacgcacagctcttttggcttaggtctgtctgtcaacggtaggttttggctcgacctgacgcctagcgacgtgatgtggaacacaagcgacactggatgggccaaatccgcttggagttccgtgttcagcccctggatccaaggcgcctgcgtctttacacaccacctccctcgattcgaacctacctcaatactgcagactctgagtaagtaccccattacagttttctgtagtgccccgacggtttatcggatgttagttcagaatgacattacctcttacaaatttaagagtttaaagcactgtgtgtcagcgggagaaccaattacgcccgatgtgactgagaaatggcggaacaaaaccggcttggatatatatgagggctatggccagaccgaaaccgtgctgatttgcgggaacttcaagggaatgaagatcaagcccggaagcatgggcaagcccagcccagcctttgatgttaagatagtcgacgtaaatggtaacgtgttgccaccagggcaggagggggatatagggatccaggtattgccaaaccggcctttcggccttttcacccattatgtggacaaccctagcaagactgcctccacactgagagggaacttttacatcacaggcgataggggctatatggataaggacggttatttctggtttgttgcgcgcgccgatgacgtgattctgagttcagggtacagaattggaccttttgaagtcgagaacgcactgaacgaacacccatccgtcgctgagtccgctgtggtcagctcccctgatcccatcaggggggaagtcgtgaaggcatttgtggttctcaaccctgattataaatcccacgatcaggagcagcttataaaagaaattcaggagcacgtgaagaagacgacggcaccatataagtacccccgcaaggtggagttcatccaggagctgccaaagacaataagcggaaagacaaaacgcaacgagctgcgcaagaaagagtggaaaacaatatag

SEQ ID NO: 157946 - DNA, 1761 bp, Artificial Sequence
  derived and/or modified sequence
atgcttgctagggtcaccagaaagatgttgagacatgcgaaatgcttccagagactggccatctttgggtccgttagagccctccacaaggacaacaggacagccaccccacagaacttcagcaactatgaaagtatgaagcaggattttaagttgggaatcccagagtatttcaacttcgccaaggatgtgctcgatcagtggaccgataaagaaaaggcgggtaaaaaaccgagtaatcctgccttttggtggataaacagaaatggcgaagaaatgaggtggagctttgaggaactgggttcattgagccgcaagttcgcgaacattctgagtgaggcctgcagcctgcagcggggagaccgcgtgattctaatcctcccgagggtccctgaatggtggctggctaacgtggcgtgtctccggaccggcaccgttctgataccaggcacaactcagctgacacagaaggacatcctgtacagactgcagagtagcaaggccaactgcatcataactaatgacgtgctagctcccgctgtggatgcagtggccagtaaatgcgagaacctgcactccaaactgattgtttctgagaacagtcgcgaggggtggggtaacctcaaagagctgatgaagcacgcgtccgatagccatacatgtgtaaaaaccaaacacaatgaaatcatggccatcttctttacatctggcacttcgggctatcccaagatgactgcccatacccactctagctttggactgggcctgtccgtgaatggccgtttttggcttgacctgacgcccagcgacgtaatgtggaacacgtctgacacgggatgggcaaagtccgcctggtccagcgtattcagcccctggatccagggtgcttgcgtgtttactcaccatcttccacgcttcgagcccacatctattttacagacgctttccaagtaccctatcacagttttttgcagtgctcctactgtttacaggatgctggtgcagaatgacattacctcgtataagtttaagtccctgaagcactgtgtgagcgccggagagccaatcactcctgatgttacggagaaatggcggaacaagacggggcttgacatatatgagggatacggtcagacggagaccgtgctaatctgtggtaacttcaagggcatgaagatcaagcccggatccatggggaagccctcccccgcattcgacgtgaaaatcgttgacgtcaacgggaacgttctccctcctgggcaggaaggggatatcggcatccaggtgctgcctaatcggcctttcggattgtttactcactacgtggacaatccttccaaaacagcatccaccctccgcggaaatttttacatcacgggcgatcgcggatatatggataaagatggctacttttggttcgtggccagagccgacgacgtgattctcagcagtgggtacagaattggacccttcgaggtagagaacgctctcaatgaacaccccagtgtggccgaaagcgctgtggtcagtagcccagaccctataagaggcgaggtagttaaggcatttgtcgtattgaatccagattataagtcccatgatcaggaacagctgatcaaggaaattcaggaacacgtgaagaaaactactgccccttacaagtacccgagaaaagtagagttcatccaggagttaccaaagacaatcagcggcaaaaccaaacgaaacgagctccggaagaaggagtggaagacaatctag

SEQ ID NO: 157947 - DNA, 1761 bp, Artificial Sequence
  derived and/or modified sequence
atgctggccagagtgaccagaaagatgctgagacacgccaagtgcttccagagactggccatcttcggcagcgtgagagccctgcacaaggacaacagaaccgccaccccccagaacttcagcaactacgagagcatgaagcaggacttcaagctgggcatccccgagtacttcaacttcgccaaggacgtgctggaccagtggaccgacaaggagaaggccggcaagaagcccagcaaccccgccttctggtggatcaacagaaacggcgaggagatgagatggagcttcgaggagctgggcagcctgagcagaaagttcgccaacatcctgagcgaggcctgcagcctgcagagaggcgacagagtgatcctgatcctgcccagagtgcccgagtggtggctggccaacgtggcctgcctgagaaccggcaccgtgctgatccccggcaccacccagctgacccagaaggacatcctgtacagactgcagagcagcaaggccaactgcatcatcaccaacgacgtgctggcccccgccgtggacgccgtggccagcaagtgcgagaacctgcacagcaagctgatcgtgagcgagaacagcagagagggctggggcaacctgaaggagctgatgaagcacgccagcgacagccacacctgcgtgaagaccaagcacaacgagatcatggccatcttcttcaccagcggcaccagcggctaccccaagatgaccgcccacacccacagcagcttcggcctgggcctgagcgtgaacggcagattctggctggacctgacccccagcgacgtgatgtggaacaccagcgacaccggctgggccaagagcgcctggagcagcgtgttcagcccctggatccagggcgcctgcgtgttcacccaccacctgcccagattcgagcccaccagcatcctgcagaccctgagcaagtaccccatcaccgtgttctgcagcgcccccaccgtgtacagaatgctggtgcagaacgacatcaccagctacaagttcaagagcctgaagcactgcgtgagcgccggcgagcccatcacccccgacgtgaccgagaagtggagaaacaagaccggcctggacatctacgagggctacggccagaccgagaccgtgctgatctgcggcaacttcaagggcatgaagatcaagcccggcagcatgggcaagcccagccccgccttcgacgtgaagatcgtggacgtgaacggcaacgtgctgccccccggccaggagggcgacatcggcatccaggtgctgcccaacagacccttcggcctgttcacccactacgtggacaaccccagcaagaccgccagcaccctgagaggcaacttctacatcaccggcgacagaggctacatggacaaggacggctacttctggttcgtggccagagccgacgacgtgatcctgagcagcggctacagaatcggccccttcgaggtggagaacgccctgaacgagcaccccagcgtggccgagagcgccgtggtgagcagccccgaccccatcagaggcgaggtggtgaaggccttcgtggtgctgaaccccgactacaagagccacgaccaggagcagctgatcaaggagatccaggagcacgtgaagaagaccaccgccccctacaagtaccccagaaaggtggagttcatccaggagctgcccaagaccatcagcggcaagaccaagagaaacgagctgagaaagaaggagtggaagaccatctag

SEQ ID NO: 157948 - DNA, 2557 bp, Artificial Sequence
  derived and/or modified sequence
cggattgtcagactgctcctccctcttctttagactgccacgaggaaaaagcagatgtgagaactcaaggttcagggctgctcttctaagaaacaagtctgccataatctccatctgtgttggaatctgttaactaatgaactggtctctgtgcaaatcctgagtgctaaagcttccaacaagactgatgctagctcgtgtcaccaggaagatgctacgtcatgccaagtgttttcagcgcctagcaatttttggttctgtgagggcactgcataaagataatagaacagcaacccctcagaatttctccaactatgaatccatgaaacaggacttcaaactggggattccagagtatttcaactttgctaaagatgtcctggaccaatggactgataaggaaaaggctggaaagaaaccttcaaatccagccttctggtggatcaacagaaatggagaagagatgcgatggagttttgaggaactgggatctctgtccagaaaatttgccaatatactttcagaagcctgttccctacaaagaggagatcgggtaattctgattctgcccagggtcccagagtggtggcttgcaaatgtggcctgtctgcgaacagggacagttttaattccaggaaccactcagctgacccagaaagacattctctacagactacaatcttcaaaagcaaactgcattatcaccaatgatgttttagccccagcagtagacgctgttgcatccaaatgtgaaaatctgcactccaagctgattgtatcagagaactccagagaggggtgggggaacctcaaggagttgatgaaacatgccagtgacagccacacctgtgtgaagacaaaacacaatgagatcatggccatattctttaccagtggaacaagtggatatccgaaaatgactgcacacacccacagcagttttggtttaggattatctgtaaatggaaggttctggctagatttgacaccctcagatgtgatgtggaatacctcagatacgggctgggcaaagtctgcatggagtagtgttttttctccgtggatccagggagcatgtgtattcacacaccatttaccccgttttgagccgacttctatcttgcaaacactctccaagtaccccatcacagtcttctgttcagcaccaactgtataccgaatgcttgtacagaatgatataaccagctataagtttaaaagcttaaagcactgtgtgagtgctggggaaccaattacccctgacgtgactgaaaaatggagaaacaagacgggcctggatatctacgaaggatatggacagactgaaacggtgctaatctgtggaaattttaagggaatgaaaattaaacctggctcaatgggaaaaccttctcctgctttcgatgttaagattgtagatgtaaatggcaatgttctacctcctggacaagaaggagatattggcattcaagttctacccaaccgaccatttggcctttttactcattacgtagataatccttcaaaaacagcttcaactctacgaggcaatttctatatcactggggacagaggatatatggataaagatgggtatttctggtttgttgcaagagcagatgatgtcatattatcctctggctatcgaattggaccatttgaggtagaaaatgccctgaatgaacacccttcagttgcagagtcagctgttgtcagcagcccagaccccatcagaggagaggtagtaaaggcttttgtcgttctaaatcctgattacaagtcacatgatcaagaacaactaataaaggagattcaggagcatgttaaaaaaactacagcaccttacaaatatcccagaaaggtagaatttattcaagagctgccaaagactatcagtgggaagacaaaaagaaatgaactgaggaagaaagaatggaagacaatttaaagttgtttcattaattaccatatctataaaacaaacatagtatctgtcaatctctagaaaccacaagatgatggagaggtcataaaaactgtggtagtatgcttagaaactgttgatttaaaatatcttgtggttatgatatcagaggctaaattttgaaataaaatatttggcaaattcctccacattagtgtcaatgttcctatcatttcttaatataaaaataataccatcaattgctgattaatttttaaatgtatagtatagaagcagtttctgaaccagatctctgctacataggttttcaaactttagttgactaattcttctgatatgttgatatacaaatcagaaccaatgttcaagcctgaaataaaactaaagaacttataaaagtttttagaaaaatataaaatatcagttagaagattatgataatctcaaagtacaagaatctacctgaaaatagactagggatttttattagtcacattttttgcaaataatttaaaaatagtttagacttgtttcaaggtctaactataaaagaaggatcatatactattgttgcttattatatgtaatctaataaatactgtttacaaaaga

SEQ ID NO: 157949 - protein, 99 aa, Artificial Sequence
  derived and/or modified sequence
MKVSAALLCLLLMAATFSPQGLAQPDSVSIPITCCFNVINRKIPIQRLESYTRITNIQCPKEAVIFKTKRGKEVCADPKERWVRDSMKHLDQIFQNLKP

SEQ ID NO: 157950 - protein, 109 aa, Artificial Sequence
  derived and/or modified sequence
MLKLTPLPSKMKVSAALLCLLLMAATFSPQGLAQPDSVSIPITCCFNVINRKIPIQRLESYTRITNIQCPKEAVIFKTKRGKEVCADPKERWVRDSMKHLDQIFQNLKP

SEQ ID NO: 157951 - DNA, 132 bp, Artificial Sequence
  derived and/or modified sequence
agaatgagatcaagcagtataataaaggaagaagtagcaaaattacaacagagcagtgaaatggatatgctttctggcaataattgtgaaaggtctggtaatgagaaagtagcaacagctagtggctgccac

SEQ ID NO: 157952 - DNA, 300 bp, Artificial Sequence
  derived and/or modified sequence
atgaaggtttccgcggccctgttgtgtttgcttctgatggccgctactttctctcctcagggcctggcccagcccgacagcgtgtctattcctattacctgctgcttcaacgtcattaatagaaaaataccaattcaacgattggaatcttacacccgcattacaaatatacagtgcccaaaagaggccgtaatcttcaagaccaaacgagggaaggaggtgtgcgcagaccccaaggagcgctgggtgagagacagcatgaaacaccttgatcaaatttttcagaacctcaagccctag

SEQ ID NO: 157953 - DNA, 330 bp, Artificial Sequence
  derived and/or modified sequence
atgttaaagctgacccctctgccaagcaaaatgaaagtctctgctgctcttctgtgcctattgctgatggccgctaccttcagcccccaaggattggcccagcctgatagcgtgagtattcctattacatgctgctttaacgtcatcaatagaaaaattcctatccaacgcctggagtcatatacaaggatcaccaatattcagtgtcccaaagaggccgtcatctttaagaccaagagaggtaaggaggtgtgcgccgaccccaaagaacgatgggtacgcgactccatgaagcacctcgaccagattttccagaacctcaaaccatag

SEQ ID NO: 157954 - DNA, 300 bp, Artificial Sequence
  derived and/or modified sequence
atgaaggtgtctgctgccctgctgtgcctgctgctgatggccgccaccttcagcccccagggcctggcccagccagattctgtgtccatccccatcacctgctgcttcaacgtcatcaacaggaagatccccatccagaggctggagagctacacccgcatcaccaacatccagtgccccaaggaggccgtcatcttcaagaccaagaggggcaaggaggtgtgtgccgaccccaaggagcgctgggtgcgggacagcatgaagcacctggaccagatcttccagaacctgaagccctag

SEQ ID NO: 157955 - DNA, 330 bp, Artificial Sequence
  derived and/or modified sequence
atgctgaagctgacccccctgcccagcaagatgaaggtgtctgctgccctgctgtgcctgctgctgatggccgccaccttcagcccccagggcctggcccagccagattctgtgtccatccccatcacctgctgcttcaacgtcatcaacaggaagatccccatccagaggctggagagctacacccgcatcaccaacatccagtgccccaaggaggccgtcatcttcaagaccaagaggggcaaggaggtgtgtgccgaccccaaggagcgctgggtgcgggacagcatgaagcacctggaccagatcttccagaacctgaagccctag

SEQ ID NO: 157956 - DNA, 300 bp, Artificial Sequence
  derived and/or modified sequence
atgaaggtgagcgccgccctgctgtgcctgctgctgatggccgccacgttctcgccacaaggccttgcacagcccgattccgtgtcaatcccaattacttgttgtttcaacgttataaatcgcaagatacctattcaacgattagagtcttatactaggattactaacatccagtgcccaaaagaggctgttatcttcaaaactaaacgcgggaaagaagtttgcgccgaccccaaggaacggtgggttcgagacagcatgaagcacctggatcagatcttccaaaacctgaaaccttag

SEQ ID NO: 157957 - DNA, 330 bp, Artificial Sequence
  derived and/or modified sequence
atgctgaagctgacccccctgcccagcaagatgaaggtgagcgccgcacttctttgcctgctcttgatggccgccaccttcagcccgcaaggccttgctcagcctgactccgtatcgatcccaatcacgtgttgtttcaatgtaatcaatcgtaagatccccatacaacggctggagtcctacacgaggataaccaacatccagtgcccaaaagaggccgtgatcttcaagaccaaacgggggaaggaggtgtgcgcagatccaaaagagcggtgggtgagggactctatgaaacatctggatcagatctttcagaatcttaagccctag

SEQ ID NO: 157958 - DNA, 300 bp, Artificial Sequence
  derived and/or modified sequence
atgaaggtgagtgccgcacttttatgtctgttgctgatggctgccaccttcagtccacaagggctcgcgcagcccgactctgtatcgatcccaatcacttgttgtttcaatgtcattaatcgaaagatcccaattcagcggctagagtcatataccaggatcactaatatccaatgcccaaaggaagccgtcatatttaagaccaaacgaggaaaggaggtgtgcgccgaccctaaagagaggtgggttcgggacagtatgaagcacctggaccaaatttttcagaatttgaaaccctag

SEQ ID NO: 157959 - DNA, 330 bp, Artificial Sequence
  derived and/or modified sequence
atgctgaaactcacccctttgccaagtaaaatgaaagtgagcgctgccctgctttgtctcctgcttatggccgctactttctcgccacaaggactcgcccaaccagatagcgtttccatacctattacatgttgctttaacgtgatcaatcgcaagattccgatacagagactggaatcctacacacggattactaacatacagtgcccgaaagaggctgtgatattcaagaccaagcggggaaaggaggtatgcgccgaccccaaagagcgatgggtcagggacagtatgaagcacctggaccaaatcttccagaatctgaagccctag

SEQ ID NO: 157960 - DNA, 1249 bp, Artificial Sequence
  derived and/or modified sequence
gtgatggagagcaccagcaaagccttagggcccatccctggcctcctgttacccacagaggggtaggcccttggctctcttccactatgacgtcagcttccattcttcctttcttatagacaattttccatttcaaggaaatcagagcccttaatagttcagtgaggtcactttgctgagcacaatcccatacccttcagcctctgctccacagagcctaagcaaaagatagaaactcacaacttccttgttttgttatctggaaattatcccaggatctggtgcttactcagcatattcaaggaaggtcttacttcattcttccttgattgtgaccatgcccaggctctctgctccctataaaaggcaggcagagccaccgaggagcagagaggttgagaacaacccagaaaccttcacctctcatgctgaagctcacacccttgccctccaagatgaaggtttctgcagcgcttctgtgcctgctgctcatggcagccactttcagccctcagggacttgctcagccagattcagtttccattccaatcacctgctgctttaacgtgatcaataggaaaattcctatccagaggctggagagctacacaagaatcaccaacatccaatgtcccaaggaagctgtgatcttcaagaccaaacggggcaaggaggtctgtgctgaccccaaggagagatgggtcagggattccatgaagcatctggaccaaatatttcaaaatctgaagccatgagccttcatacatggactgagagtcagagcttgaagaaaagcttatttattttccccaacctcccccaggtgcagtgtgacattattttattataacatccacaaagagattatttttaaataatttaaagcataatatttcttaaaaagtatttaattatatttaagttgttgatgttttaactctatctgtcatacatcctagtgaatgtaaaatgcaaaatcctggtgatgtgttttttgtttttgttttcctgtgagctcaactaagttcacggcaaaatgtcattgttctccctcctacctgtctgtagtgttgtggggtcctcccatggatcatcaaggtgaaacactttggtattctttggcaatcagtgctcctgtaagtcaaatgtgtgctttgtactgctgttgttgaaattgatgttactgtatataactatggaattttgaaaaaaaatttcaaaaagaaaaaaatatatataatttaaaact

SEQ ID NO: 157961 - DNA, 1261 bp, Artificial Sequence
  derived and/or modified sequence
gtgactctagtgtgatggagagcaccagcaaagccttagggcccatccctggcctcctgttacccacagaggggtaggcccttggctctcttccactatgacgtcagcttccattcttcctttcttatagacaattttccatttcaaggaaatcagagcccttaatagttcagtgaggtcactttgctgagcacaatcccatacccttcagcctctgctccacagagcctaagcaaaagatagaaactcacaacttccttgttttgttatctggaaattatcccaggatctggtgcttactcagcatattcaaggaaggtcttacttcattcttccttgattgtgaccatgcccaggctctctgctccctataaaaggcaggcagagccaccgaggagcagagaggttgagaacaacccagaaaccttcacctctcatgctgaagctcacacccttgccctccaagatgaaggtttctgcagcgcttctgtgcctgctgctcatggcagccactttcagccctcagggacttgctcagccagattcagtttccattccaatcacctgctgctttaacgtgatcaataggaaaattcctatccagaggctggagagctacacaagaatcaccaacatccaatgtcccaaggaagctgtgatcttcaagaccaaacggggcaaggaggtctgtgctgaccccaaggagagatgggtcagggattccatgaagcatctggaccaaatatttcaaaatctgaagccatgagccttcatacatggactgagagtcagagcttgaagaaaagcttatttattttccccaacctcccccaggtgcagtgtgacattattttattataacatccacaaagagattatttttaaataatttaaagcataatatttcttaaaaagtatttaattatatttaagttgttgatgttttaactctatctgtcatacatcctagtgaatgtaaaatgcaaaatcctggtgatgtgttttttgtttttgttttcctgtgagctcaactaagttcacggcaaaatgtcattgttctccctcctacctgtctgtagtgttgtggggtcctcccatggatcatcaaggtgaaacactttggtattctttggcaatcagtgctcctgtaagtcaaatgtgtgctttgtactgctgttgttgaaattgatgttactgtatataactatggaattttgaaaaaaaatttcaaaaagaaaaaaatatatataatttaaaacta

SEQ ID NO: 157962 - DNA, 300 bp, Artificial Sequence
  derived and/or modified sequence
atgaaggtgagcgccgccctgctgtgcctgctgctgatggccgccaccttcagcccccagggcctggcccagcccgacagcgtgagcatccccatcacctgctgcttcaacgtgatcaacagaaagatccccatccagagactggagagctacaccagaatcaccaacatccagtgccccaaggaggccgtgatcttcaagaccaagagaggcaaggaggtgtgcgccgaccccaaggagagatgggtgagagacagcatgaagcacctggaccagatcttccagaacctgaagccctag

SEQ ID NO: 157963 - DNA, 330 bp, Artificial Sequence
  derived and/or modified sequence
atgctgaagctgacccccctgcccagcaagatgaaggtgagcgccgccctgctgtgcctgctgctgatggccgccaccttcagcccccagggcctggcccagcccgacagcgtgagcatccccatcacctgctgcttcaacgtgatcaacagaaagatccccatccagagactggagagctacaccagaatcaccaacatccagtgccccaaggaggccgtgatcttcaagaccaagagaggcaaggaggtgtgcgccgaccccaaggagagatgggtgagagacagcatgaagcacctggaccagatcttccagaacctgaagccctag

SEQ ID NO: 157964 - protein, 298 aa, Artificial Sequence
  derived and/or modified sequence
MSLYPSLEDLKVDKVIQAQTAFSANPANPAILSEASAPIPHDGNLYPRLYPELSQYMGLSLNEEEIRANVAVVSGAPLQGQLVARPSSINYMVAPVTGNDVGIRRAEIKQGIREVILCKDQDGKIGLRLKSIDNGIFVQLVQANSPASLVGLRFGDQVLQINGENCAGWSSDKAHKVLKQAFGEKITMTIRDRPFERTITMHKDSTGHVGFIFKNGKITSIVKDSSAARNGLLTEHNICEINGQNVIGLKDSQIADILSTSGTVVTITIMPAFIFEHIIKRMAPSIMKSLMDHTIPEV

SEQ ID NO: 157965 - DNA, 897 bp, Artificial Sequence
  derived and/or modified sequence
atgagcctgtaccccagcctggaggacctgaaggtggacaaggtgatccaggcccagaccgccttcagcgccaaccccgccaaccccgccatcctgagcgaggccagcgcccccatcccccacgacggcaacctgtaccccagactgtaccccgagctgagccagtacatgggcctgagcctgaacgaggaggagatcagagccaacgtggccgtggtgagcggcgcccccctgcagggccagctggtggccagacccagcagcatcaactacatggtggcccccgtgaccggcaacgacgtgggcatcagaagagccgagatcaagcagggcatcagagaggtgatcctgtgcaaggaccaggacggcaagatcggcctgagactgaagagcatcgacaacggcatcttcgtgcagctggtgcaggccaacagccccgccagcctggtgggcctgagattcggcgaccaggtgctgcagatcaacggcgagaactgcgccggctggagcagcgacaaggcccacaaggtgctgaagcaggccttcggcgagaagatcaccatgaccatcagagacagacccttcgagagaaccatcaccatgcacaaggacagcaccggccacgtgggcttcatcttcaagaacggcaagatcaccagcatcgtgaaggacagcagcgccgccagaaacggcctgctgaccgagcacaacatctgcgagatcaacggccagaacgtgatcggcctgaaggacagccagatcgccgacatcctgagcaccagcggcaccgtggtgaccatcaccatcatgcccgccttcatcttcgagcacatcatcaagagaatggcccccagcatcatgaagagcctgatggaccacaccatccccgaggtgtag

SEQ ID NO: 157966 - DNA, 897 bp, Artificial Sequence
  derived and/or modified sequence
atgtccctctacccgtccttagaggatctaaaagtcgacaaagttatccaggcccaaactgcgttcagtgcaaatcctgccaacccggctattctgagtgaggcttccgcgccaatccctcatgatgggaacttgtatccccggctatacccagaactatctcagtacatgggcctatcgttaaacgaggaagagatcagagccaacgttgccgtggtcagcggtgcacccctgcagggtcagcttgtcgctaggccttcttccatcaactacatggtcgcaccagtgacaggtaatgatgtaggcatccgccgcgccgaaatcaaacagggcatcagggaggtgatattatgcaaagatcaggacggcaaaatcgggctgaggttgaagtccatagataacggtatttttgtgcagctggtgcaggctaacagtcccgctagtctagtgggccttcggtttggcgaccaggtgctccaaatcaacggggagaactgtgccggctggtctagcgataaagcacataaagtattaaagcaggctttcggggagaagataacaatgacaatcagagatcgccctttcgagagaacaataacgatgcacaaggacagcacgggacatgtgggctttatctttaaaaatggtaaaataacgtccattgtgaaggacagctccgccgctcggaacggcctactgactgaacacaatatctgcgagataaatggccaaaatgtaataggtttaaaggactctcagatcgccgatatcttgtccacctcaggaaccgtggtaactataactatcatgcccgccttcatctttgaacacatcattaaacgtatggcacccagcatcatgaagtcgctcatggaccacaccatcccagaagtgtag

SEQ ID NO: 157967 - DNA, 897 bp, Artificial Sequence
  derived and/or modified sequence
atgagcctgtacccttcgttagaggacctgaaggttgacaaagtgatccaggcgcaaacagccttctccgccaatcccgcaaatcctgctatcttatcagaagccagcgcgccaattcctcatgatgggaatctttaccccaggctgtacccagaactttctcagtacatgggcctgagtttgaatgaggaggagattagggcaaacgttgctgtagtgtctggggcccctcttcagggccagcttgtggcacgaccttcttcaattaattatatggtggcccccgtaactggcaatgacgtgggaatccggcgagctgagatcaaacaggggattcgagaggtgatcctgtgcaaggaccaggatgggaagatcggtctgcgtctgaaaagcatcgacaacggcatctttgtgcagctcgtgcaggcaaatagcccggcttctctggtcggtctccggttcggcgaccaggtgctccaaatcaatggggagaactgcgctgggtggtcaagtgacaaagctcacaaagtactcaaacaagcattcggggaaaagattaccatgacaattcgggatcggccattcgaacgcacaataactatgcacaaggactcaacaggacacgtggggttcatctttaagaatggtaagattactagcatcgtgaaagactcaagtgccgccaggaatggtctgctgactgaacataacatttgtgaaattaacggccagaacgtgataggtctcaaggattcgcagatagcagacatcctcagcacttcgggaacagtcgtgaccatcacgattatgcctgcattcatcttcgagcatataataaagcgtatggccccttctattatgaagagcttaatggatcacacgatacccgaggtgtag

SEQ ID NO: 157968 - DNA, 897 bp, Artificial Sequence
  derived and/or modified sequence
atgagcctgtaccccagcctggaggacctgaaggtggacaaggtgatccaggcccagacagccttcagcgccaacccagccaacccagccatcctgtctgaggccagcgcccccatcccccatgatggcaacctgtacccccggctgtacccagagctgagccagtacatgggcctgagcctgaatgaggaggagatccgggccaacgtggccgtggtgtctggggcccccctgcagggccagctggtggcccggcccagcagcatcaactacatggtggcccctgtgactggaaatgatgtgggcatccggcgggcagagatcaagcagggcatccgggaggtgatcctgtgcaaggaccaggacggcaagattggcctgcggctgaagagcattgacaatggcatctttgtgcagctggtgcaggccaacagccctgccagcctggtgggcctgcgctttggagaccaggtgctgcagatcaacggggagaactgtgccggctggagcagtgacaaggcccacaaggtgctgaagcaggccttcggggagaagatcaccatgaccatccgggaccggccctttgagaggaccatcaccatgcacaaggacagcacaggccacgtgggcttcatcttcaagaatggcaagatcaccagcatcgtgaaggacagcagcgctgccagaaatggcctgctgacagagcacaacatctgtgagatcaatggccagaatgtgattggcctgaaggacagccagattgctgacatcctgagcaccagcggcaccgtggtgaccatcaccatcatgcctgccttcatctttgagcacatcatcaagaggatggcccccagcatcatgaagagcctgatggaccacaccatccctgaggtgtag

SEQ ID NO: 157969 - DNA, 897 bp, Artificial Sequence
  derived and/or modified sequence
atgagcctgtaccccagcctggaggacctgaaggtggacaaggtgatccaggcccagacagccttttccgccaatcccgctaacccagctatcctaagcgaggcgagcgcccccattcctcacgatgggaatttatatcctcgcctgtatccagagctttctcagtatatgggtctcagtctgaatgaggaggagattagggccaacgtggccgtggtctccggtgcacctctgcagggacagctggtggcaagaccaagctcaatcaattatatggtggccccagtcaccgggaatgatgtaggaatacggagggccgaaatcaaacagggcattagagaggttatcctttgtaaagatcaggatggcaagatcggacttcggctgaagtctatcgataacgggattttcgttcagctggtccaagctaatagtcctgcatcattggtcggcctgcgatttggtgaccaagtgcttcagattaatggcgagaactgtgctggatggagctccgataaggcccataaggttctaaaacaagctttcggggaaaagatcaccatgactattagggatcgtcccttcgaaagaaccatcacaatgcacaaagactcaactggacacgtgggcttcattttcaagaacggaaagattacctctatcgtgaaagactcctccgccgcccgcaatgggcttcttactgagcacaacatttgtgagatcaatggtcagaacgtgattggcttgaaggacagccaaatagccgatatcctgtcaacctccggaacggttgtgacaattacaatcatgccagcatttatttttgagcatatcattaaacgcatggcccctagcattatgaaatcacttatggatcacactattcctgaggtgtag

SEQ ID NO: 157970 - DNA, 897 bp, Artificial Sequence
  derived and/or modified sequence
atgagcctgtaccccagcctggaggacctgaaggtggacaaggtgatacaggcccagacagctttctcagcgaacccagcaaacccagctattctttccgaagccagcgcacctatcccccacgacggaaatttataccccagactgtatcccgagctgtcccagtatatgggcctgtcattgaatgaggaggagatcagggccaacgtcgccgtggtgagcggagcccctttgcagggccaactggttgccaggccctccagcattaattatatggttgcaccagtgacaggtaatgatgtaggtattcggagagccgagatcaaacaaggtatacgcgaggtgatcctgtgcaaggaccaagatggcaagattggcctgcgactgaagtcaattgacaacgggattttcgtacagcttgttcaggcaaatagtcccgcctccttggttggactccggttcggggaccaagtgctccagatcaatggtgagaactgcgcaggctggtcctccgataaggcacataaggtgcttaagcaggccttcggggagaaaattaccatgactattcgcgaccgcccattcgagagaacaatcacgatgcataaagactccacagggcatgtggggtttatctttaaaaacggtaagataacttctatagtaaaggacagtagcgcggcccgcaacgggctcctaactgagcataacatttgtgagattaacggccagaacgtcattggtctcaaagattcccagatcgcggacatactctccacgagcggcaccgtagtgactatcaccattatgcctgccttcatcttcgagcacatcataaagcgcatggcaccttctattatgaagagtctgatggatcatacaataccagaagtgtag

SEQ ID NO: 157971 - DNA, 897 bp, Artificial Sequence
  derived and/or modified sequence
atgtcactatacccctctttagaagacctgaaggtggacaaggtgattcaggcacagacagccttttccgccaatcccgctaaccctgcaatcctttctgaggcttcagcacctattccacacgatgggaatttataccccagactctacccagagctgtcacaatacatggggctgtccctgaatgaagaagagattcgcgctaatgtggcagtcgttagtggggcacctctccagggccagctggtcgccaggccaagttccatcaattatatggtggcgccagttaccggtaacgacgtgggaatcaggcgcgctgagattaagcaagggatccgagaagtgattctttgtaaggatcaggacgggaagattggcctaagactcaagagcatcgacaacggaattttcgtgcagttggtacaggccaacagtccggctagtctcgtgggtctgcggtttggggatcaggtgttacaaatcaacggagagaattgtgccggatggtccagcgacaaagcccataaagtgctgaagcaggcctttggggaaaaaatcactatgaccattagggatagaccatttgagcgtacgattaccatgcacaaggattcaacagggcacgtgggatttatatttaaaaacggcaaaataactagcattgtgaaggatagctctgctgctaggaatggcttattgaccgagcacaacatctgcgaaattaatggtcaaaacgtcattgggctcaaagactctcagatcgcagacattctctccactagtggcaccgtagtcaccataaccataatgcctgctttcatcttcgagcacattatcaaacggatggcaccttctattatgaaatccctgatggatcatacaatccccgaggtgtag

SEQ ID NO: 157972 - DNA, 897 bp, Artificial Sequence
  derived and/or modified sequence
atgtccctgtatccctcactggaagacctgaaggttgacaaggtcattcaagcccaaactgcattctccgctaatcctgctaaccctgcaatcctgtcagaggcttctgctcccattccacacgacggaaacttataccccaggctgtatccggagctctctcaatacatggggctctctctgaacgaggaagaaattagggccaatgtggcggttgtatctggggctccgttgcagggccaactcgtggcgaggccctcgtctattaattacatggtcgcaccagtgacaggcaacgatgttggcatccgcagagctgaaataaagcagggcattcgcgaggtgattctctgcaaagatcaggacggcaaaataggactccgcctaaaatcaatcgacaatggtattttcgtccagctggtgcaagccaacagccccgcaagcttggtgggcctgcgatttggagatcaggtgttgcagatcaacggcgagaattgcgcaggctggtctagcgataaggcacacaaagtccttaaacaggctttcggtgagaagataacaatgactatcagggaccgacccttcgaacgaacaatcaccatgcacaaggactccaccggccatgtgggttttatatttaaaaatggtaagatcaccagcatagtcaaagattccagcgcggcaaggaacgggctcctaactgaacataacatttgtgaaatcaacgggcaaaatgttatagggttaaaggattcccagatagccgacatactaagtacttctgggaccgtcgtgactattactatcatgccagcctttatcttcgaacatataatcaagcgaatggccccttccattatgaagagcctgatggaccatacaatccctgaagtctag

SEQ ID NO: 157973 - protein, 431 aa, Artificial Sequence
  derived and/or modified sequence
MTVKTEAAKGTLTYSRMRGMVAILIAFMKQRRMGLNDFIQKIANNSYACKHPEVQSILKISQPQEPELMNANPSPPPSPSQQINLGPSSNPHAKPSDFHFLKVIGKGSFGKVLLARHKAEEVFYAVKVLQKKAILKKKEEKHIMSERNVLLKNVKHPFLVGLHFSFQTADKLYFVLDYINGGELFYHLQRERCFLEPRARFYAAEIASALGYLHSLNIVYRDLKPENILLDSQGHIVLTDFGLCKENIEHNSTTSTFCGTPEYLAPEVLHKQPYDRTVDWWCLGAVLYEMLYGLPPFYSRNTAEMYDNILNKPLQLKPNITNSARHLLEGLLQKDRTKRLGAKDDFMEIKSHVFFSLINWDDLINKKITPPFNPNVSGPNDLRHFDPEFTEEPVPNSIGKSPDSVLVTASVKEAAEAFLGFSYAPPTDSFL

SEQ ID NO: 157974 - protein, 421 aa, Artificial Sequence
  derived and/or modified sequence
MKPSKRFFISPPSSTAFMKQRRMGLNDFIQKIANNSYACKHPEVQSILKISQPQEPELMNANPSPPPSPSQQINLGPSSNPHAKPSDFHFLKVIGKGSFGKVLLARHKAEEVFYAVKVLQKKAILKKKEEKHIMSERNVLLKNVKHPFLVGLHFSFQTADKLYFVLDYINGGELFYHLQRERCFLEPRARFYAAEIASALGYLHSLNIVYRDLKPENILLDSQGHIVLTDFGLCKENIEHNSTTSTFCGTPEYLAPEVLHKQPYDRTVDWWCLGAVLYEMLYGLPPFYSRNTAEMYDNILNKPLQLKPNITNSARHLLEGLLQKDRTKRLGAKDDFMEIKSHVFFSLINWDDLINKKITPPFNPNVSGPNDLRHFDPEFTEEPVPNSIGKSPDSVLVTASVKEAAEAFLGFSYAPPTDSFL

SEQ ID NO: 157975 - DNA, 1296 bp, Artificial Sequence
  derived and/or modified sequence
atgacagtgaaaactgaagcggccaagggcacactgacttacagccgcatgcggggtatggtggcgatcctcattgcattcatgaaacagagacgcatggggctgaacgactttattcagaaaattgcgaacaatagttacgcctgcaagcaccccgaagtccagagcattctcaagattagccagccacaagagcctgagctcatgaacgcaaacccttcgccccctcctagtccaagtcagcagattaacttgggcccatcctcaaatccccatgccaaaccttcagattttcacttcttaaaagtgatcgggaaaggcagctttggaaaagtgctgctagcacgacacaaagccgaggaggtgttctatgcggtgaaggtccttcagaagaaagcaatcttgaagaaaaaggaagagaagcacattatgtcagaacgcaatgtactcctcaaaaacgtgaagcacccttttctagtgggcctgcattttagttttcagaccgccgacaaactttactttgtactcgactatatcaacggcggggagctgttttatcacctccagagagaacggtgcttcctggagccgcgggctcggttctacgccgctgagatcgcgtcggccctaggctaccttcactccttaaacatagtgtatagggatctgaagccggagaatatccttctggactcccaagggcacatcgtgctgacagattttggcctctgcaaagaaaacatcgagcataattcaactacctcgacattttgcggaactcctgaatacctggcacctgaggtgctccacaagcagccttatgacaggaccgtggattggtggtgcctcggtgccgtgctgtatgaaatgctgtacggactgccccccttctacagtcgcaacacagccgagatgtacgacaatattctcaataagccactgcagctgaagccaaacatcacaaatagcgctagacatctgctcgaaggactgcttcaaaaagaccgaacaaagcgactgggcgccaaggacgacttcatggagatcaaatctcatgtctttttttccctgataaactgggacgacttgataaataaaaagatcacgccacccttcaatccaaatgttagcggtcccaacgacttgcggcattttgatcctgagttcaccgaggaacccgtaccaaacagtattggaaaatcacccgacagtgtgctggtgactgcctcagttaaagaagctgccgaggcattcctgggcttctcttacgccccacccactgactcctttctgtag

SEQ ID NO: 157976 - DNA, 1296 bp, Artificial Sequence
  derived and/or modified sequence
atgacagtgaagacagaagctgccaagggcaccctgacctacagcaggatgaggggcatggtggccatcctgattgccttcatgaagcagaggaggatgggcctgaatgacttcatccagaagatcgccaacaacagctatgcctgcaagcaccctgaggtgcagagcatcctgaagatcagccagccccaggagcctgagctgatgaatgccaaccccagccccccacccagccccagccagcagatcaacctgggccccagcagcaacccccacgccaagcccagcgacttccacttcctgaaggtgattggcaagggcagctttgggaaggtgctgctggcccggcacaaggccgaggaggtgttctatgctgtgaaggtgctgcagaagaaggccatcctgaagaagaaggaggagaagcacatcatgtctgaaagaaatgtgctgctgaagaatgtgaagcaccccttcctggtgggcctgcacttctccttccagacagctgacaagctgtactttgtgctggactacatcaatggaggagagctgttctaccacctgcagcgggagcgctgcttcctggagccccgggcccgcttctatgctgctgagatcgccagcgccctgggctacctgcacagcctgaacatcgtgtacagagacctgaagccagagaacatcctgctggacagccagggccacatcgtgctgacagactttggcctgtgcaaggagaacatcgagcacaacagcaccaccagcaccttctgtggcaccccagagtacctggcccctgaggtgctgcacaagcagccctatgacagaacagtggactggtggtgcctgggcgctgtgctgtatgagatgctgtatggcctgccccccttctacagcaggaacacagctgagatgtatgacaacatcctgaacaagcccctgcagctgaagcccaacatcaccaacagcgcccggcacctgctggagggcctgctgcagaaggacaggaccaagaggctgggcgccaaggatgacttcatggagatcaagagccacgtgttcttcagcctcatcaactgggatgacctgatcaacaagaagatcaccccacccttcaaccccaacgtgtctggccccaatgacctgcggcactttgatcctgagttcacagaggagcctgtgcccaacagcatcggcaagagcccagacagcgtgctggtgacagcctctgtgaaggaggccgctgaggccttcctgggcttctcctatgccccacccacagacagcttcctgtag

SEQ ID NO: 157977 - DNA, 1296 bp, Artificial Sequence
  derived and/or modified sequence
atgaccgtgaagaccgaggccgccaagggcaccctgacctacagccgcatgcggggcatggtggcaatcctgattgctttcatgaagcagcggcggatgggcctgaacgactttatccaaaaaattgccaacaatagttacgcctgtaagcatccggaagtgcaatcaatcctgaagatttcccagccccaggaaccggagcttatgaatgccaacccttctcctccaccgagcccatcccagcagattaacctgggaccatccagcaatccccacgccaaacccagtgattttcactttcttaaggtgatcggcaagggttcgttcgggaaggtcctgctagctcgtcacaaagctgaggaagtcttttatgctgtgaaagttctgcagaagaaggccattctcaagaagaaggaggagaaacacataatgagcgaacgcaacgtgttgctgaaaaacgtgaaacatcctttcctggtgggattgcactttagctttcagactgctgataaattatactttgtgctggactatatcaacgggggcgaattgttctaccacctccagcgggagaggtgtttcttggagcctagggcacgcttctacgccgccgagattgcctcggccctcggctacttgcatagtctgaatatagtgtaccgcgacctgaagccagagaacatcctgttagactctcaaggtcacatcgttctcactgacttcggactgtgcaaggagaacattgagcacaattccaccacttccacattttgtggaaccccggagtacctagcccctgaggtgcttcacaagcagccatatgacaggacagtggattggtggtgcctcggtgctgtactgtatgagatgctgtatgggctgccgcccttctatagccggaacactgctgagatgtacgacaatatcttaaataaacctttgcaattgaaacctaatattaccaactctgccaggcacttgctagagggccttctacaaaaggaccggacaaagcgactgggtgccaaagacgactttatggagatcaaatcacatgttttcttttcgttgattaattgggatgacttgattaataagaagataactcctccctttaaccctaatgtgagcggcccaaatgacttgcgccacttcgatccagagttcaccgaggagcctgtgcccaattctattgggaagagccctgattctgtgctggttactgcttcagttaaagaggccgcagaggcatttttgggcttctcatacgctcctcctacggacagtttcctatag

SEQ ID NO: 157978 - DNA, 1296 bp, Artificial Sequence
  derived and/or modified sequence
atgacggtgaagactgaagccgctaaaggcacactgacatattctcgtatgcggggaatggtcgccatcctcatagcttttatgaaacagcgtaggatgggcctaaatgacttcatccagaagattgccaataatagctacgcctgcaagcacccagaggtccagagtattttgaagattagtcagccgcaggaaccagaattgatgaacgccaaccctagccctcccccatcaccgtcccagcagattaatcttggtcccagcagcaatccgcatgctaagccttccgacttccacttcttgaaagtcatcgggaaaggctcattcggaaaggtgctcctggctaggcataaggcggaggaggtgttctacgcagtgaaagtactacagaaaaaggcaattctgaagaagaaagaggaaaaacacataatgagcgaacgtaacgttctattaaagaacgtcaaacatccattcttagttggactgcatttcagtttccagaccgcggataagctgtactttgtccttgattatattaacggaggggagctattttaccatctacagcgggagaggtgtttcttggagccacgggctcggttttatgccgcagagattgcctcagccttaggctacctccactccctgaacatcgtttacagagatctaaagcccgaaaatatccttttagatagccagggccatatcgtgttgactgacttcgggctgtgcaaggagaatatcgaacataattctacaacctccacattttgtgggacgcccgaatacctggctccagaggttctgcataaacagccctacgaccggactgtggactggtggtgcctgggcgcagtactgtatgagatgttatatgggctgccccctttctactccaggaatacagccgagatgtatgataacattttgaataaaccgcttcagctgaaaccgaacatcacaaattcagctagacatctgttggaggggcttcttcagaaagacaggaccaaacggctgggagccaaagacgatttcatggagatcaaaagccacgtattcttctctcttattaattgggatgatctgattaataagaagatcacaccgccttttaatccaaatgtaagtgggcctaacgatctgagacattttgaccccgagtttaccgaggagcctgtccctaactcaatcggcaagagccccgattctgttctggtcacagcatcagtgaaggaagctgccgaggccttcctagggtttagctacgctcccccaacagattccttcctttag

SEQ ID NO: 157979 - DNA, 2401 bp, Artificial Sequence
  derived and/or modified sequence
ttttttataaggccgagcgcgcggcctggcgcagcatacgccgagccggtctttgagcgctaacgtctttctgtctccccgcggtggtgatgacggtgaaaactgaggctgctaagggcaccctcacttactccaggatgaggggcatggtggcaattctcatcgctttcatgaagcagaggaggatgggtctgaacgactttattcagaagattgccaataactcctatgcatgcaaacaccctgaagttcagtccatcttgaagatctcccaacctcaggagcctgagcttatgaatgccaacccttctcctccaccaagtccttctcagcaaatcaaccttggcccgtcgtccaatcctcatgctaaaccatctgactttcacttcttgaaagtgatcggaaagggcagttttggaaaggttcttctagcaagacacaaggcagaagaagtgttctatgcagtcaaagttttacagaagaaagcaatcctgaaaaagaaagaggagaagcatattatgtcggagcggaatgttctgttgaagaatgtgaagcaccctttcctggtgggccttcacttctctttccagactgctgacaaattgtactttgtcctagactacattaatggtggagagttgttctaccatctccagagggaacgctgcttcctggaaccacgggctcgtttctatgctgctgaaatagccagtgccttgggctacctgcattcactgaacatcgtttatagagacttaaaaccagagaatattttgctagattcacagggacacattgtccttactgacttcggactctgcaaggagaacattgaacacaacagcacaacatccaccttctgtggcacgccggagtatctcgcacctgaggtgcttcataagcagccttatgacaggactgtggactggtggtgcctgggagctgtcttgtatgagatgctgtatggcctgccgcctttttatagccgaaacacagctgaaatgtacgacaacattctgaacaagcctctccagctgaaaccaaatattacaaattccgcaagacacctcctggagggcctcctgcagaaggacaggacaaagcggctcggggccaaggatgacttcatggagattaagagtcatgtcttcttctccttaattaactgggatgatctcattaataagaagattactcccccttttaacccaaatgtgagtgggcccaacgacctacggcactttgaccccgagtttaccgaagagcctgtccccaactccattggcaagtcccctgacagcgtcctcgtcacagccagcgtcaaggaagctgccgaggctttcctaggcttttcctatgcgcctcccacggactctttcctctgaaccctgttagggcttggttttaaaggattttatgtgtgtttccgaatgttttagttagccttttggtggagccgccagctgacaggacatcttacaagagaatttgcacatctctggaagcttagcaatcttattgcacactgttcgctggaagctttttgaagagcacattctcctcagtgagctcatgaggttttcatttttattcttccttccaacgtggtgctatctctgaaacgagcgttagagtgccgccttagacggaggcaggagtttcgttagaaagcggacgctgttctaaaaaaggtctcctgcagatctgtctgggctgtgatgacgaatattatgaaatgtgccttttctgaagagattgtgttagctccaaagcttttcctatcgcagtgtttcagttctttattttcccttgtggatatgctgtgtgaaccgtcgtgtgagtgtggtatgcctgatcacagatggattttgttataagcatcaatgtgacacttgcaggacactacaacgtgggacattgtttgtttcttccatatttggaagataaatttatgtgtagacttttttgtaagatacggttaataactaaaatttattgaaatggtcttgcaatgactcgtattcagatgcttaaagaaagcattgctgctacaaatatttctatttttagaaagggtttttatggaccaatgccccagttgtcagtcagagccgttggtgtttttcattgtttaaaatgtcacctgtaaaatgggcattatttatgtttttttttttgcattcctgataattgtatgtattgtataaagaacgtctgtacattgggttataacactagtatatttaaacttacaggcttatttgtaatgtaaaccaccattttaatgtactgtaattaacatggttataatacgtacaatccttccctcatcccatcacacaactttttttgtgtgtgataaactgattttggtttgcaataaaaccttgaaaaatattta

SEQ ID NO: 157980 - DNA, 1296 bp, Artificial Sequence
  derived and/or modified sequence
atgaccgtgaagaccgaggccgccaagggcaccctgacctacagcagaatgagaggcatggtggccatcctgatcgccttcatgaagcagagaagaatgggcctgaacgacttcatccagaagatcgccaacaacagctacgcctgcaagcaccccgaggtgcagagcatcctgaagatcagccagccccaggagcccgagctgatgaacgccaaccccagccccccccccagccccagccagcagatcaacctgggccccagcagcaacccccacgccaagcccagcgacttccacttcctgaaggtgatcggcaagggcagcttcggcaaggtgctgctggccagacacaaggccgaggaggtgttctacgccgtgaaggtgctgcagaagaaggccatcctgaagaagaaggaggagaagcacatcatgagcgagagaaacgtgctgctgaagaacgtgaagcaccccttcctggtgggcctgcacttcagcttccagaccgccgacaagctgtacttcgtgctggactacatcaacggcggcgagctgttctaccacctgcagagagagagatgcttcctggagcccagagccagattctacgccgccgagatcgccagcgccctgggctacctgcacagcctgaacatcgtgtacagagacctgaagcccgagaacatcctgctggacagccagggccacatcgtgctgaccgacttcggcctgtgcaaggagaacatcgagcacaacagcaccaccagcaccttctgcggcacccccgagtacctggcccccgaggtgctgcacaagcagccctacgacagaaccgtggactggtggtgcctgggcgccgtgctgtacgagatgctgtacggcctgccccccttctacagcagaaacaccgccgagatgtacgacaacatcctgaacaagcccctgcagctgaagcccaacatcaccaacagcgccagacacctgctggagggcctgctgcagaaggacagaaccaagagactgggcgccaaggacgacttcatggagatcaagagccacgtgttcttcagcctgatcaactgggacgacctgatcaacaagaagatcaccccccccttcaaccccaacgtgagcggccccaacgacctgagacacttcgaccccgagttcaccgaggagcccgtgcccaacagcatcggcaagagccccgacagcgtgctggtgaccgccagcgtgaaggaggccgccgaggccttcctgggcttcagctacgccccccccaccgacagcttcctgtag

SEQ ID NO: 157981 - protein, 548 aa, Artificial Sequence
  derived and/or modified sequence
ETPVLPIMVADPPRDSKGLAAAEPTANGGLALASIEDQGAAAGGYCGSRDQVRRCLRANLLVLLTVVAVVAGVALGLGVSGAGGALALGPERLSAFVFPGELLLRLLRMIILPLVVCSLIGGAASLDPGALGRLGAWALLFFLVTTLLASALGVGLALALQPGAASAAINASVGAAGSAENAPSKEVLDSFLDLARNIFPSNLVSAAFRSYSTTYEERNITGTRVKVPVGQEVEGMNILGLVVFAIVFGVALRKLGPEGELLIRFFNSFNEATMVLVSWIMWYAPVGIMFLVAGKIVEMEDVGLLFARLGKYILCCLLGHAIHGLLVLPLIYFLFTRKNPYRFLWGIVTPLATAFGTSSSSATLPLMMKCVEENNGVAKHISRFILPIGATVNMDGAALFQCVAAVFIAQLSQQSLDFVKIITILVTATASSVGAAGIPAGGVLTLAIILEAVNLPVDHISLILAVDWLVDRSCTVLNVEGDALGAGLLQNYVDRTESRSTEPELIQVKSELPLDPLPVPTEEGNPLLKHYRGPAGDATVASEKESVM

SEQ ID NO: 157982 - protein, 313 aa, Artificial Sequence
  derived and/or modified sequence
MNILGLVVFAIVFGVALRKLGPEGELLIRFFNSFNEATMVLVSWIMWYAPVGIMFLVAGKIVEMEDVGLLFARLGKYILCCLLGHAIHGLLVLPLIYFLFTRKNPYRFLWGIVTPLATAFGTSSSSATLPLMMKCVEENNGVAKHISRFILPIGATVNMDGAALFQCVAAVFIAQLSQQSLDFVKIITILVTATASSVGAAGIPAGGVLTLAIILEAVNLPVDHISLILAVDWLVDRSCTVLNVEGDALGAGLLQNYVDRTESRSTEPELIQVKSELPLDPLPVPTEEGNPLLKHYRGPAGDATVASEKESVM

SEQ ID NO: 157983 - protein, 339 aa, Artificial Sequence
  derived and/or modified sequence
MYSTTYEERNITGTRVKVPVGQEVEGMNILGLVVFAIVFGVALRKLGPEGELLIRFFNSFNEATMVLVSWIMWYAPVGIMFLVAGKIVEMEDVGLLFARLGKYILCCLLGHAIHGLLVLPLIYFLFTRKNPYRFLWGIVTPLATAFGTSSSSATLPLMMKCVEENNGVAKHISRFILPIGATVNMDGAALFQCVAAVFIAQLSQQSLDFVKIITILVTATASSVGAAGIPAGGVLTLAIILEAVNLPVDHISLILAVDWLVDRSCTVLNVEGDALGAGLLQNYVDRTESRSTEPELIQVKSELPLDPLPVPTEEGNPLLKHYRGPAGDATVASEKESVM

SEQ ID NO: 157984 - protein, 541 aa, Artificial Sequence
  derived and/or modified sequence
MVADPPRDSKGLAAAEPTANGGLALASIEDQGAAAGGYCGSRDQVRRCLRANLLVLLTVVAVVAGVALGLGVSGAGGALALGPERLSAFVFPGELLLRLLRMIILPLVVCSLIGGAASLDPGALGRLGAWALLFFLVTTLLASALGVGLALALQPGAASAAINASVGAAGSAENAPSKEVLDSFLDLARNIFPSNLVSAAFRSYSTTYEERNITGTRVKVPVGQEVEGMNILGLVVFAIVFGVALRKLGPEGELLIRFFNSFNEATMVLVSWIMWYAPVGIMFLVAGKIVEMEDVGLLFARLGKYILCCLLGHAIHGLLVLPLIYFLFTRKNPYRFLWGIVTPLATAFGTSSSSATLPLMMKCVEENNGVAKHISRFILPIGATVNMDGAALFQCVAAVFIAQLSQQSLDFVKIITILVTATASSVGAAGIPAGGVLTLAIILEAVNLPVDHISLILAVDWLVDRSCTVLNVEGDALGAGLLQNYVDRTESRSTEPELIQVKSELPLDPLPVPTEEGNPLLKHYRGPAGDATVASEKESVM

SEQ ID NO: 157985 - DNA, 1647 bp, Artificial Sequence
  derived and/or modified sequence
gagactccagtgcttccaattatggttgccgatcctcccagggattccaaggggcttgctgccgctgagccaaccgcgaacggcggcctcgccctggcgagcatcgaggatcagggagctgcagccggagggtactgtggcagtcgagatcaggttaggcgatgcctgagggcgaacctcctggtgctactcactgtggtggcagtcgtggctggagtcgccctcggccttggggtatcgggcgctggcggggccctcgctctggggcctgagcgtctgagtgcttttgtgtttccaggagaactgctgctgcggctgctccggatgattattttaccactggtggtttgtagcttaattggcggcgccgctagcctcgatcccggcgctctggggcggttgggggcttgggccttattgttctttctggtcacaacgcttctggctagcgcactgggcgtaggcctggcacttgctctacagcctggcgctgcttccgctgcaattaacgcctcagtgggggccgctgggtccgccgaaaacgcaccctctaaagaagtgctggatagcttcctcgatctcgcacgaaatatcttcccgagtaatctggtcagcgccgcctttcgaagctactcaactacatacgaggagcggaacatcacaggtaccagagtgaaggtccctgtcggacaggaagtggaaggaatgaatatcttagggctggtagtgttcgccattgtatttggagtggctcttagaaaactgggcccggagggcgaattgctcatccgcttctttaactcatttaatgaagccactatggtattggtttcttggataatgtggtatgcccctgtgggaatcatgttcttggtggcgggaaaaatagtggagatggaggatgttggcctcctcttcgcaagattaggtaaatacatcctttgttgcctcctggggcatgcgatccatggacttctcgtgctacctctaatctactttctattcactcgcaaaaatccctaccgatttctgtggggtattgtaacacccctggccacagcattcggtacctcaagttcgagtgcgaccctgcctcttatgatgaagtgcgtcgaagaaaacaatggcgtggctaaacacatttctcgatttatactgcccattggggcgacagtaaatatggacggtgctgccctgttccagtgtgtcgccgccgtgttcatagcccagttatctcaacaatctcttgattttgtgaagataatcaccatacttgtgacggccacggctagcagcgtaggagccgccggcattcctgccggcggcgtgcttaccctcgctatcattctggaggcagtgaatttgcccgtggaccatatcagtctgattcttgctgtagattggctggtcgatcgcagctgtactgtgctgaatgtggagggcgacgccctgggcgccggcctactgcagaattacgttgaccgcaccgaatcacgtagcactgaaccagagctgattcaggtaaagtcagaattaccccttgaccctctaccagtgccaaccgaagagggaaatcctctgttaaagcactacagagggccagccggggacgcaacggttgctagcgaaaaggaatcagtgatgtag

SEQ ID NO: 157986 - DNA, 1626 bp, Artificial Sequence
  derived and/or modified sequence
atggtggcagatcctcctagagacagcaaaggtctagccgccgctgagccaactgccaatggcggtctggcactcgcaagcatcgaagaccagggagcagccgcaggtgggtattgtggctctagagatcaggtacggaggtgtttgagagctaacctgcttgtgctgttgaccgtagtggcggtggtggccggcgtggcactcgggcttggggtgtcaggcgccgggggggccctggcactggggccagagaggctatccgcatttgtatttcccggagaacttctcctgcgcctcctgcgaatgattatattgcctctggtcgtctgttccctgattggaggagcggccagtcttgacccaggggccctgggtcgactgggagcatgggcccttctttttttcttggtaaccactctgttagcaagtgctctcggggtgggcttggctctggcccttcagccgggtgcggcctcagctgccatcaacgcctctgtaggggccgcgggcagcgccgaaaacgccccgagcaaggaagtgctggactccttcctggatctagccaggaacatatttccaagcaacctcgtctccgccgctttcaggtcttactctacaacatacgaggaacgcaacattaccggcacacgggtcaaagtgccagtagggcaagaggtggagggcatgaatattctgggcctggttgtctttgccattgtgttcggtgtggcccttaggaagctaggccccgaaggggagctcctcatccggttctttaacagctttaacgaggctaccatggtcctagtctcctggatcatgtggtatgcaccagtcggaattatgttcctggtcgctgggaaaatagttgaaatggaggatgtcggattgttatttgcccgcttgggaaagtacattctctgttgtctgctgggtcacgccattcatgggctgctggtactgccactgatttattttctgttcacacgcaagaacccatatagattcctgtggggaattgtgacacccctggcaactgcctttggcacaagctcctcctcagccacgctccctcttatgatgaagtgtgttgaagaaaataatggggtcgctaagcatatcagtaggtttattctcccaatcggggcaaccgtcaatatggacggtgccgcactgtttcagtgtgtggcggctgtgtttatcgcgcagctcagccagcagtccctggactttgttaaaatcatcactattcttgtcactgcgaccgcaagctctgtgggtgctgcaggcatcccggccgggggagtgttaactctggcaattatactggaagccgttaatcttcccgtcgatcatatcagcctgatcctcgccgtcgactggcttgtggatcggtcttgcactgtcctgaacgttgagggcgacgcccttggcgctggcctcctccagaactacgtggacaggaccgagagccggagtaccgagcctgaactgattcaagtgaagtcagaactgccgctcgaccctcttcctgtgccaaccgaagaaggcaatccactgttgaagcactatagagggcccgccggtgacgctacagtggcttcagagaaagaaagcgtgatgtag

SEQ ID NO: 157987 - DNA, 1647 bp, Artificial Sequence
  derived and/or modified sequence
gagacccctgtgctgcccatcatggtggccgaccccccccgggacagcaagggcctggccgctgctgagcccacagccaatggaggcctggccctggccagcattgaggaccagggcgctgctgctgggggctactgcggcagccgggaccaggtgcggcgctgcctgcgggccaacctgctggtgctgctgactgtggtggccgtggtggccggcgtggccctgggcctgggcgtgtctggggccggcggggccctggccctgggccctgagcggctgagcgcctttgtgtttcctggagagctgctgctgcggctgctgaggatgatcatcctgcccctggtggtgtgcagcctcatcggcggggccgccagcctggaccccggggccctgggccgcctgggcgcctgggccctgctcttcttcctggtgaccaccctgctggccagcgccctgggcgtgggcctggccctggccctgcagcccggggccgccagcgctgccatcaatgcctctgtgggcgccgccggcagcgcagaaaatgcccccagcaaggaggtgctggacagcttcctggacctggccaggaacatcttccccagcaacctggtgtctgctgccttccgcagctacagcaccacctatgaggagaggaacatcaccggcaccagggtgaaggtgcctgtgggccaggaggtggagggcatgaacatcctgggcctggtggtgtttgccatcgtgtttggagtggccctgaggaagctgggccctgagggggagctgctgatccgcttcttcaacagcttcaatgaggccaccatggtgctggtgtcctggatcatgtggtacgcccctgtgggcatcatgttcctggtggccggcaagatcgtggagatggaggatgtgggcctgctgtttgcccggctgggcaagtacatcctgtgctgcctgctgggccacgccatccacggcctgctggtgctgcccctcatctacttcctgttcaccaggaagaacccctaccgcttcctgtggggcatcgtgacccccctggccacagccttcggcaccagcagcagcagcgccaccctgcccctgatgatgaagtgtgtggaggagaacaatggagtggccaagcacatcagccgcttcatcctgcccatcggggccaccgtgaacatggatggagctgccctcttccagtgtgtggccgctgtgttcatcgcccagctgagccagcagagcctggactttgtgaagatcatcaccatcctggtgacagccacagccagctctgtgggcgccgccggcatcccagctgggggcgtgctgaccctggccatcatcctggaggccgtgaacctgcctgtggaccacatcagcctcatcctggccgtggactggctggtggacaggagctgcaccgtgctgaatgtggagggagatgccctgggcgccggcctgctgcagaactacgtggacagaacagagagccgcagcacagagcctgagctgatccaggtgaagtctgagctgcccctggaccccctgcctgtgcccacagaggagggcaaccccctgctgaagcactaccggggccctgctggagatgccaccgtggccagcgagaaggagagcgtgatgtag

SEQ ID NO: 157988 - DNA, 1626 bp, Artificial Sequence
  derived and/or modified sequence
atggtggccgaccccccccgggacagcaagggcctggccgctgctgagcccacagccaacggcggcctggccctggccagcattgaggaccagggcgctgctgctgggggctactgcggcagccgggaccaggtgcggcgctgcctgcgggccaacctgctggtgctgctgactgtggtggccgtggtggccggcgtggccctgggcctgggcgtgtctggagctggaggagccctggccctgggccctgagcggctgagcgcctttgtgtttcctggagagctgctgctgcggctgctgaggatgatcatcctgcccctggtggtgtgcagcctgattggaggagctgccagcctggaccccggggccctgggccgcctgggcgcctgggccctgctcttcttcctggtgaccaccctgctggccagcgccctgggcgtgggcctggccctggccctgcagcctggagctgccagcgctgccatcaatgcctctgtgggcgctgctggcagcgcagaaaatgcccccagcaaggaggtgctggacagcttcctggacctggccaggaacatcttccccagcaacctggtgtctgctgccttccgcagctacagcaccacctatgaggagaggaacatcaccggcaccagggtgaaggtgcctgtgggccaggaggtggagggcatgaacatcctgggcctggtggtgtttgccatcgtgtttggagtggccctgaggaagctgggccctgagggggagctgctgatccgcttcttcaacagcttcaatgaggccaccatggtgctggtgtcctggatcatgtggtacgcccctgtgggcatcatgttcctggtggccggcaagatcgtggagatggaggatgtgggcctgctgtttgcccggctgggcaagtacatcctgtgctgcctgctgggccacgccatccacggcctgctggtgctgcccctcatctacttcctgttcaccaggaagaacccctaccgcttcctgtggggcatcgtgacccccctggccacagccttcggcaccagcagcagcagcgccaccctgcccctgatgatgaagtgtgtggaggagaacaacggggtggccaagcacatcagccgcttcatcctgcccatcggggccaccgtgaacatggatggagctgccctcttccagtgtgtggccgctgtgttcatcgcccagctgagccagcagagcctggactttgtgaagatcatcaccatcctggtgacagccacagccagctctgtgggcgctgctggcatcccagctggaggagtgctgaccctggccatcatcctggaggccgtgaacctgcctgtggaccacatcagcctcatcctggccgtggactggctggtggacaggagctgcaccgtgctgaatgtggagggagatgccctgggcgccggcctgctgcagaactacgtggacagaacagagagccgcagcacagagcctgagctgatccaggtgaagtctgagctgcccctggaccccctgcctgtgcccacagaggagggcaaccccctgctgaagcactaccggggccctgctggagatgccaccgtggccagcgagaaggagagcgtgatgtag

SEQ ID NO: 157989 - DNA, 1647 bp, Artificial Sequence
  derived and/or modified sequence
gagacccccgtgctgcccatcatggtggccgaccccccccgggactcgaagggcctcgctgctgctgagccaacagcaaatggaggcctggccctcgcatcaattgaagaccaaggcgcagccgctggcgggtactgcggtagtcgagaccaggtgagacgctgcctgcgagcaaatcttcttgtgttgctaaccgtcgtggccgtagtggcgggggttgccctggggctgggcgtgtctggggcgggaggcgcactcgcactgggccccgagcgactgagcgcattcgtctttcccggagagctgttattacgcctgctgcggatgatcatactacccctggtcgtgtgttctctgatcggaggcgcggcttcacttgaccccggggccttgggccgcttaggagcctgggccttgctgttctttctggtgacgactctgctggcttctgccctgggtgtgggtctagctctggctctgcagcccggagctgcgtccgcagccattaacgcctctgtgggcgcggcagggagcgccgagaatgctccaagtaaagaggtgctggattccttcttggacttggctcggaacatttttccttcaaacctggtatctgctgcattccggagctacagcactacctacgaggaacggaatatcacgggaaccagggtgaaggtccccgtcggccaggaagtagaggggatgaacatcctggggctggttgtcttcgccatcgtctttggcgtggccttaaggaaactgggccccgaaggggagctgttaattaggttttttaactctttcaacgaagcgaccatggtcttagtctcctggattatgtggtacgcacccgttggtattatgttcctggttgctggcaaaattgtcgagatggaagacgtgggcctgctgtttgcaaggttggggaaatacattctctgttgtttgctcgggcatgccattcatggtcttctggtgttgcccctcatctatttcttatttacaagaaagaatccctacaggttcttgtgggggatcgttactcctctggctacagcgtttggcacctcaagtagcagcgcgacattgcccctgatgatgaagtgtgtggaggaaaataacggcgtggctaagcatatttcacggttcatcctgccaataggagccactgtaaacatggatggagcggccttgtttcagtgtgtggcggcggtgtttattgcccaactctcacagcagtctctggactttgtgaagatcatcaccatcttagtaactgccacagccagcagtgtgggagctgctggaatccccgccggcggcgtgctaaccttggcgatcattctcgaggccgtgaatctgccagtggaccacatctccctcatccttgctgtggactggcttgtcgacaggtcatgcactgtcctgaatgtcgagggggatgccctcggggctggcctcttgcagaattacgttgaccggaccgagtctaggtcaacagaacccgagcttatccaggtaaaaagcgaactgcccctcgatccactgcccgtcccaacagaggagggcaacccactcttgaagcactatcggggtcccgctggtgatgccacggtggcttcagagaaggagtctgtgatgtag

SEQ ID NO: 157990 - DNA, 1626 bp, Artificial Sequence
  derived and/or modified sequence
atggtggccgaccccccccgggacagcaagggcctggccgccgccgaacccacggccaacggcggacttgctttagcatctatcgaagatcagggagcagccgccggcggttattgcggcagcagagatcaggtgcgccgctgtctgcgggccaacctcttagtgctgttgactgtggtggcggttgtggcaggagtcgctctggggcttggagtctccggggcgggcggagctcttgcactgggccccgagcgcctctctgcctttgtgttccctggggagctcctgctgcggcttctgcgcatgatcatactgccactcgttgtctgtagcctgatcgggggtgcagccagtttagaccctggcgctctcggacggctgggtgcctgggccctactcttctttttggtgaccacactcctggcaagcgccctgggcgtggggcttgcacttgcccttcagcccggggcggcctctgccgccatcaatgcatccgtcggggcagcaggctctgcagagaatgccccatcgaaagaagtgctggacagttttctggaccttgctcggaacattttccccagtaacctggtgagcgccgctttcagaagctactctaccacatacgaagaacgcaacataacaggaactagggtaaaggtgccagtaggccaggaagtcgaaggcatgaatatactggggctagtagtgtttgcgatcgtctttggagttgcactcagaaagctggggcctgaaggggagttgcttatcagattcttcaatagctttaatgaagccactatggtcctggtgagttggatcatgtggtatgcccccgtgggaatcatgttcctggtcgccggcaaaatcgtggaaatggaggatgtgggacttttgtttgcccgcctgggcaagtacatcttgtgttgcctcttaggacatgcaatccacggactgctggtgctccccttaatttacttcctgtttacacggaaaaacccttatcgctttctatggggcatcgtcactcctttggctaccgccttcggaacgagtagcagttctgccaccttgcccctgatgatgaaatgtgtcgaggaaaacaatggagtcgctaagcatattagcagattcattctgccaatcggggctaccgtaaacatggacggagctgccctgtttcagtgcgttgctgccgtgttcatagcacagttgagccagcaaagtctcgactttgtgaagataattactatcttagtgaccgccaccgccagctccgtgggagcagccgggattccagccggcggcgtgctgaccctggccatcattttggaggcagtaaatttaccggttgaccacatttctcttattttagcagtcgactggcttgtggacagatcgtgcaccgtgctcaatgttgagggggatgctctgggcgcaggactgcttcagaactacgtcgaccgcaccgagtcccgcagtactgaacctgaacttatccaagtgaagtctgagcttccattggatccgctgccagtccctacggaagagggtaatccactgttgaaacactaccgggggcccgccggggacgccaccgtggcatcagaaaaggagtccgtaatgtag

SEQ ID NO: 157991 - DNA, 1647 bp, Artificial Sequence
  derived and/or modified sequence
gaaactcccgtgctgcccataatggtggcggaccctccgcgagacagcaaggggttagctgcagctgagccgaccgccaatggcggacttgccttggccagtattgaagatcagggggctgccgcaggaggatattgtgggagccgtgaccaggttcggagatgccttcgtgcaaatctcctcgtcctgctaacggtagtagcagttgttgcaggggtcgccttgggactgggtgtgtcaggggcaggaggggctctcgccctaggccctgaacggttatccgcctttgtctttcctggtgagctgctcctccgactgctgcgcatgatcatcctaccgttggtggtatgtagtctgattgggggtgccgcatctttagatccgggagcccttggacgacttggcgcatgggccctgctattctttctggtcaccaccttactcgccagcgctttaggcgtagggcttgcactggctctgcagcccggagccgcttccgctgctataaatgcatccgtgggcgcagctgggagtgccgaaaacgcgcctagcaaagaagtcctggacagcttcttagacctggccagaaacatattcccaagtaacctggtgtccgcagcctttcgttcttactcaactacgtatgaggagcggaatattacaggcacgagggtgaaggtccccgtgggccaggaggtggaaggcatgaacatcttaggcctcgttgtgttcgccattgtcttcggagtggccctcaggaagctgggacccgaaggggagctcctaataaggttctttaattcattcaacgaggccaccatggtgttggtttcgtggatcatgtggtacgctccagtgggcattatgtttctggtggccggaaagatcgtggaaatggaggacgtggggttactgttcgcaaggctgggcaagtacattctttgctgtcttcttggacacgcaattcatgggctgctggtactgcctcttatatacttcctatttacccgtaagaatccctaccggttcctttggggaatcgtcacacctcttgctactgctttcggcacctcaagtagtagcgccaccctacccctgatgatgaagtgtgtggaggaaaacaatggcgtcgctaaacatatctctcgatttattctcccgattggcgctacggtgaacatggatggagcagctctctttcaatgtgtggctgctgtctttatcgcacaactctcacagcagagtttggacttcgtgaaaatcatcacaatcctcgttacagccactgcatcctctgtcggcgcagctggaattcctgccggaggtgtcctgactctggccattatccttgaggctgttaacctcccagtggatcacatttccctgatacttgctgtcgactggcttgttgatagatcctgtactgtgctcaacgtggaaggtgatgcactcggtgcgggtttgctgcaaaattatgttgatcggaccgagtcccgctccaccgagccggagctgatacaagtcaagtctgaactgcccctagatcctctcccggtgcccaccgaggagggcaacccattactgaaacactaccgtgggccagctggggacgccaccgtagcctcagaaaaggaaagcgtcatgtag

SEQ ID NO: 157992 - DNA, 1626 bp, Artificial Sequence
  derived and/or modified sequence
atggtggccgatccaccaagagattccaaaggcctagccgctgccgaacctaccgccaacggcggactggccctagccagcatcgaagatcagggtgccgcagctggaggctactgcggttcaagggatcaggtaagaaggtgcctgagagcaaacttgctcgtgctgctgacagtggtggctgtagttgctggggtcgccctaggcttgggtgtgtccggagcaggcggagctttggcccttgggccagaaagactgagcgcgttcgtgtttccaggcgaattactgctgaggttgctacggatgattatcctgcccttggttgtatgtagtctgatcgggggagcagcaagtctggaccccggtgccctgggacggttaggtgcctgggcactcctgtttttcttggttaccacactgctagccagcgctctgggggtaggactcgccttggccctgcagcccggagctgcctctgcagcgatcaacgcaagcgttggagctgctggcagcgctgaaaacgctcccagcaaggaggtcttggactcattcctggacctggccaggaacatcttccctagtaatctagtctccgccgcattcagatcttattcaacaacatacgaggagagaaacattacagggacaagagttaaggtgcccgtgggccaggaggtcgagggaatgaacattctcggcctggttgtatttgccatagtgtttggagtggccctaagaaagctgggccctgaaggcgaactcctgattcgcttctttaacagttttaacgaggccacaatggttttggttagttggatcatgtggtacgccccagtgggcattatgttcctggttgctggcaaaatcgtggagatggaagatgtaggcttgttgtttgcccgactgggcaagtatattctttgctgcctccttgggcatgcaatccatggactactggtgttacccctgatctatttccttttcacccggaagaatccttatagattcctgtggggcattgtgacccccctggcaaccgcattcggcaccagctccagttcagctacccttcctttgatgatgaagtgtgtggaagagaataatggggtagccaaacatatctcgagattcattctcccgattggagccacagtcaacatggacggggctgccctctttcagtgtgtggccgctgtcttcattgcccaactgagtcagcagagcctggatttcgttaagatcatcacaatcctcgtcacggccactgcttcttcagtcggggctgccggtatccctgcgggaggggtcctgacgcttgccatcattctcgaggcggtcaacctgccagtggaccacatctcactgattctggctgtagactggctagtagatcgttcctgcaccgtgctgaatgtcgagggcgacgctctcggagctggcctgctacagaactacgtggacagaactgagtctcgatccaccgagccagaattgatccaggtgaagtccgaactcccgttggaccctctgcctgtgcctacagaggaaggcaatcccctgttgaagcactacagaggcccagcaggggatgccacagtagcaagcgagaaggaaagtgtcatgtag

SEQ ID NO: 157993 - DNA, 2880 bp, Artificial Sequence
  derived and/or modified sequence
agagccacgcggcacgcccgggaggctttctctggctggtaaccgctactcccggacaccagaccaccgccttccgtacacaggggcccgcatcccaccctcccggacctaagagcctgggtcccctgtttccggaggtccgcttcccggcccccagattctggcatcccagccctcagtgtccaagacccaggcagcccgggtccccgcctcccggatccaggcgtccgggatctgcgccaccagaacctagcctcctgcagacctccgccatctgggggcactcaacctcctggagccaagggccccacgtcccacccagagaaactctcgtattcccagctcctagggccaaggaacccgggcgctccgaactcccagctttcggacatctggcacacggggcagagcagagaagcctcagcgcccagcctggggaatttaaacactccagcttccaagagccaaggaacttcagtgctgtgaactcacaactctaaggagccctccaaagttccagtctccaggtgctgttactcaactcagtcctaggaacgtcgggtcctgggaaggagcccaagcgctcccagccagcttccaggcgctaagaaaccccggtgcttcccatcatggtggccgatcctcctcgagactccaaggggctcgcagcggcggagcccaccgccaacgggggcctggcgctggcctccatcgaggaccaaggcgcggcagcaggcggctactgcggttcccgggaccaggtgcgccgctgccttcgagccaacctgcttgtgctgctgacagtggtggccgtggtggccggcgtggcgctgggactgggggtgtcgggggccgggggtgcgctggcgttgggcccggagcgcttgagcgccttcgtcttcccgggcgagctgctgctgcgtctgctgcggatgatcatcttgccgctggtggtgtgcagcttgatcggcggcgccgccagcctggaccccggcgcgctcggccgtctgggcgcctgggcgctgctctttttcctggtcaccacgctgctggcgtcggcgctcggagtgggcttggcgctggctctgcagccgggcgccgcctccgccgccatcaacgcctccgtgggagccgcgggcagtgccgaaaatgcccccagcaaggaggtgctcgattcgttcctggatcttgcgagaaatatcttcccttccaacctggtgtcagcagcctttcgctcatactctaccacctatgaagagaggaatatcaccggaaccagggtgaaggtgcccgtggggcaggaggtggaggggatgaacatcctgggcttggtagtgtttgccatcgtctttggtgtggcgctgcggaagctggggcctgaaggggagctgcttatccgcttcttcaactccttcaatgaggccaccatggttctggtctcctggatcatgtggtacgcccctgtgggcatcatgttcctggtggctggcaagatcgtggagatggaggatgtgggtttactctttgcccgccttggcaagtacattctgtgctgcctgctgggtcacgccatccatgggctcctggtactgcccctcatctacttcctcttcacccgcaaaaacccctaccgcttcctgtggggcatcgtgacgccgctggccactgcctttgggacctcttccagttccgccacgctgccgctgatgatgaagtgcgtggaggagaataatggcgtggccaagcacatcagccgtttcatcctgcccatcggcgccaccgtcaacatggacggtgccgcgctcttccagtgcgtggccgcagtgttcattgcacagctcagccagcagtccttggacttcgtaaagatcatcaccatcctggtcacggccacagcgtccagcgtgggggcagcgggcatccctgctggaggtgtcctcactctggccatcatcctcgaagcagtcaacctcccggtcgaccatatctccttgatcctggctgtggactggctagtcgaccggtcctgtaccgtcctcaatgtagaaggtgacgctctgggggcaggactcctccaaaattacgtggaccgtacggagtcgagaagcacagagcctgagttgatacaagtgaagagtgagctgcccctggatccgctgccagtccccactgaggaaggaaaccccctcctcaaacactatcgggggcccgcaggggatgccacggtcgcctctgagaaggaatcagtcatgtaaaccccgggagggaccttccctgccctgctgggggtgctctttggacactggattatgaggaatggataaatggatgagctagggctctgggggtctgcctgcacactctggggagccaggggccccagcaccctccaggacaggagatctgggatgcctggctgctggagtacatgtgttcacaagggttactcctcaaaacccccagttctcactcatgtccccaactcaaggctagaaaacagcaagatggagaaataatgttctgctgcgtccccaccgtgacctgcctggcctcccctgtctcagggagcaggtcacaggtcaccatggggaattctagcccccactggggggatgttacaacaccatgctggttattttggcggctgtagttgtggggggatgtgtgtgtgcacgtgtgtgtgtgtgtgtgtgtgtgtgtgtgtgtgtgtgttctgtgacctcctgtccccatggtacgtcccaccctgtccccagatcccctattccctccacaataacagaaacactcccagggactctggggagaggctgaggacaaatacctgctgtcactccagaggacattttttttagcaataaaattgagtgtcaactattt

SEQ ID NO: 157994 - DNA, 1737 bp, Artificial Sequence
  derived and/or modified sequence
cttaggaaaactcgacaggatattgaggggaggctccagccctcgggagtaaatatcttcccttccaacctggtgtcagcagcctttcgctcatactctaccacctatgaagagaggaatatcaccggaaccagggtgaaggtgcccgtggggcaggaggtggaggggatgaacatcctgggcttggtagtgtttgccatcgtctttggtgtggcgctgcggaagctggggcctgaaggggagctgcttatccgcttcttcaactccttcaatgaggccaccatggttctggtctcctggatcatgtggtacgcccctgtgggcatcatgttcctggtggctggcaagatcgtggagatggaggatgtgggtttactctttgcccgccttggcaagtacattctgtgctgcctgctgggtcacgccatccatgggctcctggtactgcccctcatctacttcctcttcacccgcaaaaacccctaccgcttcctgtggggcatcgtgacgccgctggccactgcctttgggacctcttccagttccgccacgctgccgctgatgatgaagtgcgtggaggagaataatggcgtggccaagcacatcagccgtttcatcctgcccatcggcgccaccgtcaacatggacggtgccgcgctcttccagtgcgtggccgcagtgttcattgcacagctcagccagcagtccttggacttcgtaaagatcatcaccatcctggtcacggccacagcgtccagcgtgggggcagcgggcatccctgctggaggtgtcctcactctggccatcatcctcgaagcagtcaacctcccggtcgaccatatctccttgatcctggctgtggactggctagtcgaccggtcctgtaccgtcctcaatgtagaaggtgacgctctgggggcaggactcctccaaaattacgtggaccgtacggagtcgagaagcacagagcctgagttgatacaagtgaagagtgagctgcccctggatccgctgccagtccccactgaggaaggaaaccccctcctcaaacactatcgggggcccgcaggggatgccacggtcgcctctgagaaggaatcagtcatgtaaaccccgggagggaccttccctgccctgctgggggtgctctttggacactggattatgaggaatggataaatggatgagctagggctctgggggtctgcctgcacactctggggagccaggggccccagcaccctccaggacaggagatctgggatgcctggctgctggagtacatgtgttcacaagggttactcctcaaaacccccagttctcactcatgtccccaactcaaggctagaaaacagcaagatggagaaataatgttctgctgcgtccccaccgtgacctgcctggcctcccctgtctcagggagcaggtcacaggtcaccatggggaattctagcccccactggggggatgttacaacaccatgctggttattttggcggctgtagttgtggggggatgtgtgtgtgcacgtgtgtgtgtgtgtgtgtgtgtgtgtgtgtgtgtgtgttctgtgacctcctgtccccatggtacgtcccaccctgtccccagatcccctattccctccacaataacagaaacactcccagggactctggggagaggctgaggacaaatacctgctgtcactccagaggacattttttttagcaataaaattgagtgtcaactatttaa

SEQ ID NO: 157995 - DNA, 2873 bp, Artificial Sequence
  derived and/or modified sequence
cggcacgcccgggaggctttctctggctggtaaccgctactcccggacaccagaccaccgccttccgtacacaggggcccgcatcccaccctcccggacctaagagcctgggtcccctgtttccggaggtccgcttcccggcccccagattctggcatcccagccctcagtgtccaagacccaggcagcccgggtccccgcctcccggatccaggcgtccgggatctgcgccaccagaacctagcctcctgcagacctccgccatctgggggcactcaacctcctggagccaagggccccacgtcccacccagagaaactctcgtattcccagctcctagggccaaggaacccgggcgctccgaactcccagctttcggacatctggcacacggggcagagcagagaagcctcagcgcccagcctggggaatttaaacactccagcttccaagagccaaggaacttcagtgctgtgaactcacaactctaaggagccctccaaagttccagtctccaggtgctgttactcaactcagtcctaggaacgtcgggtcctgggaaggagcccaagcgctcccagccagcttccaggcgctaagaaaccccggtgcttcccatcatggtggccgatcctcctcgagactccaaggggctcgcagcggcggagcccaccgccaacgggggcctggcgctggcctccatcgaggaccaaggcgcggcagcaggcggctactgcggttcccgggaccaggtgcgccgctgccttcgagccaacctgcttgtgctgctgacagtggtggccgtggtggccggcgtggcgctgggactgggggtgtcgggggccgggggtgcgctggcgttgggcccggagcgcttgagcgccttcgtcttcccgggcgagctgctgctgcgtctgctgcggatgatcatcttgccgctggtggtgtgcagcttgatcggcggcgccgccagcctggaccccggcgcgctcggccgtctgggcgcctgggcgctgctctttttcctggtcaccacgctgctggcgtcggcgctcggagtgggcttggcgctggctctgcagccgggcgccgcctccgccgccatcaacgcctccgtgggagccgcgggcagtgccgaaaatgcccccagcaaggaggtgctcgattcgttcctggatcttgcgagaaatatcttcccttccaacctggtgtcagcagcctttcgctcatactctaccacctatgaagagaggaatatcaccggaaccagggtgaaggtgcccgtggggcaggaggtggaggggatgaacatcctgggcttggtagtgtttgccatcgtctttggtgtggcgctgcggaagctggggcctgaaggggagctgcttatccgcttcttcaactccttcaatgaggccaccatggttctggtctcctggatcatgtggtacgcccctgtgggcatcatgttcctggtggctggcaagatcgtggagatggaggatgtgggtttactctttgcccgccttggcaagtacattctgtgctgcctgctgggtcacgccatccatgggctcctggtactgcccctcatctacttcctcttcacccgcaaaaacccctaccgcttcctgtggggcatcgtgacgccgctggccactgcctttgggacctcttccagttccgccacgctgccgctgatgatgaagtgcgtggaggagaataatggcgtggccaagcacatcagccgtttcatcctgcccatcggcgccaccgtcaacatggacggtgccgcgctcttccagtgcgtggccgcagtgttcattgcacagctcagccagcagtccttggacttcgtaaagatcatcaccatcctggtcacggccacagcgtccagcgtgggggcagcgggcatccctgctggaggtgtcctcactctggccatcatcctcgaagcagtcaacctcccggtcgaccatatctccttgatcctggctgtggactggctagtcgaccggtcctgtaccgtcctcaatgtagaaggtgacgctctgggggcaggactcctccaaaattacgtggaccgtacggagtcgagaagcacagagcctgagttgatacaagtgaagagtgagctgcccctggatccgctgccagtccccactgaggaaggaaaccccctcctcaaacactatcgggggcccgcaggggatgccacggtcgcctctgagaaggaatcagtcatgtaaaccccgggagggaccttccctgccctgctgggggtgctctttggacactggattatgaggaatggataaatggatgagctagggctctgggggtctgcctgcacactctggggagccaggggccccagcaccctccaggacaggagatctgggatgcctggctgctggagtacatgtgttcacaagggttactcctcaaaacccccagttctcactcatgtccccaactcaaggctagaaaacagcaagatggagaaataatgttctgctgcgtccccaccgtgacctgcctggcctcccctgtctcagggagcaggtcacaggtcaccatggggaattctagcccccactggggggatgttacaacaccatgctggttattttggcggctgtagttgtggggggatgtgtgtgtgcacgtgtgtgtgtgtgtgtgtgtgtgtgtgtgtgtgtgtgttctgtgacctcctgtccccatggtacgtcccaccctgtccccagatcccctattccctccacaataacagaaacactcccagggactctggggagaggctgaggacaaatacctgctgtcactccagaggacattttttttagcaataaaattgagtgtcaactatttaa

SEQ ID NO: 157996 - DNA, 1647 bp, Artificial Sequence
  derived and/or modified sequence
gagacccccgtgctgcccatcatggtggccgacccccccagagacagcaagggcctggccgccgccgagcccaccgccaacggcggcctggccctggccagcatcgaggaccagggcgccgccgccggcggctactgcggcagcagagaccaggtgagaagatgcctgagagccaacctgctggtgctgctgaccgtggtggccgtggtggccggcgtggccctgggcctgggcgtgagcggcgccggcggcgccctggccctgggccccgagagactgagcgccttcgtgttccccggcgagctgctgctgagactgctgagaatgatcatcctgcccctggtggtgtgcagcctgatcggcggcgccgccagcctggaccccggcgccctgggcagactgggcgcctgggccctgctgttcttcctggtgaccaccctgctggccagcgccctgggcgtgggcctggccctggccctgcagcccggcgccgccagcgccgccatcaacgccagcgtgggcgccgccggcagcgccgagaacgcccccagcaaggaggtgctggacagcttcctggacctggccagaaacatcttccccagcaacctggtgagcgccgccttcagaagctacagcaccacctacgaggagagaaacatcaccggcaccagagtgaaggtgcccgtgggccaggaggtggagggcatgaacatcctgggcctggtggtgttcgccatcgtgttcggcgtggccctgagaaagctgggccccgagggcgagctgctgatcagattcttcaacagcttcaacgaggccaccatggtgctggtgagctggatcatgtggtacgcccccgtgggcatcatgttcctggtggccggcaagatcgtggagatggaggacgtgggcctgctgttcgccagactgggcaagtacatcctgtgctgcctgctgggccacgccatccacggcctgctggtgctgcccctgatctacttcctgttcaccagaaagaacccctacagattcctgtggggcatcgtgacccccctggccaccgccttcggcaccagcagcagcagcgccaccctgcccctgatgatgaagtgcgtggaggagaacaacggcgtggccaagcacatcagcagattcatcctgcccatcggcgccaccgtgaacatggacggcgccgccctgttccagtgcgtggccgccgtgttcatcgcccagctgagccagcagagcctggacttcgtgaagatcatcaccatcctggtgaccgccaccgccagcagcgtgggcgccgccggcatccccgccggcggcgtgctgaccctggccatcatcctggaggccgtgaacctgcccgtggaccacatcagcctgatcctggccgtggactggctggtggacagaagctgcaccgtgctgaacgtggagggcgacgccctgggcgccggcctgctgcagaactacgtggacagaaccgagagcagaagcaccgagcccgagctgatccaggtgaagagcgagctgcccctggaccccctgcccgtgcccaccgaggagggcaaccccctgctgaagcactacagaggccccgccggcgacgccaccgtggccagcgagaaggagagcgtgatgtag

SEQ ID NO: 157997 - DNA, 1626 bp, Artificial Sequence
  derived and/or modified sequence
atggtggccgacccccccagagacagcaagggcctggccgccgccgagcccaccgccaacggcggcctggccctggccagcatcgaggaccagggcgccgccgccggcggctactgcggcagcagagaccaggtgagaagatgcctgagagccaacctgctggtgctgctgaccgtggtggccgtggtggccggcgtggccctgggcctgggcgtgagcggcgccggcggcgccctggccctgggccccgagagactgagcgccttcgtgttccccggcgagctgctgctgagactgctgagaatgatcatcctgcccctggtggtgtgcagcctgatcggcggcgccgccagcctggaccccggcgccctgggcagactgggcgcctgggccctgctgttcttcctggtgaccaccctgctggccagcgccctgggcgtgggcctggccctggccctgcagcccggcgccgccagcgccgccatcaacgccagcgtgggcgccgccggcagcgccgagaacgcccccagcaaggaggtgctggacagcttcctggacctggccagaaacatcttccccagcaacctggtgagcgccgccttcagaagctacagcaccacctacgaggagagaaacatcaccggcaccagagtgaaggtgcccgtgggccaggaggtggagggcatgaacatcctgggcctggtggtgttcgccatcgtgttcggcgtggccctgagaaagctgggccccgagggcgagctgctgatcagattcttcaacagcttcaacgaggccaccatggtgctggtgagctggatcatgtggtacgcccccgtgggcatcatgttcctggtggccggcaagatcgtggagatggaggacgtgggcctgctgttcgccagactgggcaagtacatcctgtgctgcctgctgggccacgccatccacggcctgctggtgctgcccctgatctacttcctgttcaccagaaagaacccctacagattcctgtggggcatcgtgacccccctggccaccgccttcggcaccagcagcagcagcgccaccctgcccctgatgatgaagtgcgtggaggagaacaacggcgtggccaagcacatcagcagattcatcctgcccatcggcgccaccgtgaacatggacggcgccgccctgttccagtgcgtggccgccgtgttcatcgcccagctgagccagcagagcctggacttcgtgaagatcatcaccatcctggtgaccgccaccgccagcagcgtgggcgccgccggcatccccgccggcggcgtgctgaccctggccatcatcctggaggccgtgaacctgcccgtggaccacatcagcctgatcctggccgtggactggctggtggacagaagctgcaccgtgctgaacgtggagggcgacgccctgggcgccggcctgctgcagaactacgtggacagaaccgagagcagaagcaccgagcccgagctgatccaggtgaagagcgagctgcccctggaccccctgcccgtgcccaccgaggagggcaaccccctgctgaagcactacagaggccccgccggcgacgccaccgtggccagcgagaaggagagcgtgatgtag

SEQ ID NO: 157998 - protein, 288 aa, Artificial Sequence
  derived and/or modified sequence
MYVFQLFDYYSASGTTLLWQAFWECVVVAWVYGADRFTDDIACMIGYRPCPWMKWCWSFFTPLVCMGIFIFNVVYYEPLVYNNTNVYPWWGEAMGWAFVLSSMLCMPLHLLGCLLRAKGTMAECWKHLTQPIWGLHHLEYRAQDADVRGLTTLTPVSESSKVVVVESVMGQLSSHHQLTSGLWGKRLQYSILGVWAANLACSGFPPCALGWAQPQEGTPDTAPTSRLKADALPAPPVFCVAALTHVCLSRPVPRRLSDPKKGFPDTRTEAGGLGLREGGGPAGTFLLC

SEQ ID NO: 157999 - protein, 635 aa, Artificial Sequence
  derived and/or modified sequence
MAKKSAENGIYSVSGDEKKGPLIAPGPDGAPAKGDGPVGLGTPGGRLAVPPRETWTRQMDFIMSCVGFAVGLGNVWRFPYLCYKNGGGVFLIPYVLIALVGGIPIFFLEISLGQFMKAGSINVWNICPLFKGLGYASMVIVFYCNTYYIMVLAWGFYYLVKSFTTTLPWATCGHTWNTPDCVEIFRHEDCANASLANLTCDQLADRRSPVIEFWENKVLRLSGGLEVPGALNWEVTLCLLACWVLVYFCVWKGVKSTGKIVYFTATFPYVVLVVLLVRGVLLPGALDGIIYYLKPDWSKLGSPQVWIDAGTQIFFSYAIGLGALTALGSYNRFNNNCYKDAIILALINSGTSFFAGFVVFSILGFMAAEQGVHISKVAESGPGLAFIAYPRAVTLMPVAPLWAALFFFMLLLLGLDSQFVGVEGFITGLLDLLPASYYFRFQREISVALCCALCFVIDLSMVTDGGMYVFQLFDYYSASGTTLLWQAFWECVVVAWVYGADRFMDDIACMIGYRPCPWMKWCWSFFTPLVCMGIFIFNVVYYEPLVYNNTYVYPWWGEAMGWAFALSSMLCVPLHLLGCLLRAKGTMAERWQHLTQPIWGLHHLEYRAQDADVRGLTTLTPVSESSKVVVVESVM

SEQ ID NO: 158000 - protein, 156 aa, Artificial Sequence
  derived and/or modified sequence
LLHSPTWSWSCCWCVECCCLAPWMASFTISSLTGQSWGPLSPGQLQPLQQQLLQWDQLLCWLRGLLHPGLHGCRAGRAHLQGGRVREISVALCCALCFVIDLSMVTDGGMYVFQLFDYYSASGTTLLWQAFWECVVVAWVYGADRFMDDIACMIGY

SEQ ID NO: 158001 - protein, 112 aa, Artificial Sequence
  derived and/or modified sequence
  misc_feature (1)..(1): Xaa can be any naturally occurring amino acid
XFRHEDCANASLANLTCDQLADRRSPVIEFWENKVLRLSGGLEVPGALNWEVTLCLLACWVLVYFCVWKGVKSTGKVPLEACSGEGGSALGAGCLCQAHLWQREVTRQSLAL

SEQ ID NO: 158002 - DNA, 1908 bp, Artificial Sequence
  derived and/or modified sequence
atggccaagaagagcgccgagaacggcatctacagcgtgagcggcgacgagaagaagggccccctgatcgcccccggccccgacggcgcccccgccaagggcgacggccccgtgggcctgggcacccccggcggcagactggccgtgccccccagagagacctggaccagacagatggacttcatcatgagctgcgtgggcttcgccgtgggcctgggcaacgtgtggagattcccctacctgtgctacaagaacggcggcggcgtgttcctgatcccctacgtgctgatcgccctggtgggcggcatccccatcttcttcctggagatcagcctgggccagttcatgaaggccggcagcatcaacgtgtggaacatctgccccctgttcaagggcctgggctacgccagcatggtgatcgtgttctactgcaacacctactacatcatggtgctggcctggggcttctactacctggtgaagagcttcaccaccaccctgccctgggccacctgcggccacacctggaacacccccgactgcgtggagatcttcagacacgaggactgcgccaacgccagcctggccaacctgacctgcgaccagctggccgacagaagaagccccgtgatcgagttctgggagaacaaggtgctgagactgagcggcggcctggaggtgcccggcgccctgaactgggaggtgaccctgtgcctgctggcctgctgggtgctggtgtacttctgcgtgtggaagggcgtgaagagcaccggcaagatcgtgtacttcaccgccaccttcccctacgtggtgctggtggtgctgctggtgagaggcgtgctgctgcccggcgccctggacggcatcatctactacctgaagcccgactggagcaagctgggcagcccccaggtgtggatcgacgccggcacccagatcttcttcagctacgccatcggcctgggcgccctgaccgccctgggcagctacaacagattcaacaacaactgctacaaggacgccatcatcctggccctgatcaacagcggcaccagcttcttcgccggcttcgtggtgttcagcatcctgggcttcatggccgccgagcagggcgtgcacatcagcaaggtggccgagagcggccccggcctggccttcatcgcctaccccagagccgtgaccctgatgcccgtggcccccctgtgggccgccctgttcttcttcatgctgctgctgctgggcctggacagccagttcgtgggcgtggagggcttcatcaccggcctgctggacctgctgcccgccagctactacttcagattccagagagagatcagcgtggccctgtgctgcgccctgtgcttcgtgatcgacctgagcatggtgaccgacggcggcatgtacgtgttccagctgttcgactactacagcgccagcggcaccaccctgctgtggcaggccttctgggagtgcgtggtggtggcctgggtgtacggcgccgacagattcatggacgacatcgcctgcatgatcggctacagaccctgcccctggatgaagtggtgctggagcttcttcacccccctggtgtgcatgggcatcttcatcttcaacgtggtgtactacgagcccctggtgtacaacaacacctacgtgtacccctggtggggcgaggccatgggctgggccttcgccctgagcagcatgctgtgcgtgcccctgcacctgctgggctgcctgctgagagccaagggcaccatggccgagagatggcagcacctgacccagcccatctggggcctgcaccacctggagtacagagcccaggacgccgacgtgagaggcctgaccaccctgacccccgtgagcgagagcagcaaggtggtggtggtggagagcgtgatgtag

SEQ ID NO: 158003 - DNA, 1563 bp, Artificial Sequence
  derived and/or modified sequence
atgaaggccggcagcatcaacgtgtggaacatctgccccctgttcaagggcctgggctacgccagcatggtgatcgtgttctactgcaacacctactacatcatggtgctggcctggggcttctactacctggtgaagagcttcaccaccaccctgccctgggccacctgcggccacacctggaacacccccgactgcgtggagatcttcagacacgaggactgcgccaacgccagcctggccaacctgacctgcgaccagctggccgacagaagaagccccgtgatcgagttctgggagaacaaggtgctgagactgagcggcggcctggaggtgcccggcgccctgaactgggaggtgaccctgtgcctgctggcctgctgggtgctggtgtacttctgcgtgtggaagggcgtgaagagcaccggcaagatcgtgtacttcaccgccaccttcccctacgtggtgctggtggtgctgctggtgagaggcgtgctgctgcccggcgccctggacggcatcatctactacctgaagcccgactggagcaagctgggcagcccccaggtgtggatcgacgccggcacccagatcttcttcagctacgccatcggcctgggcgccctgaccgccctgggcagctacaacagattcaacaacaactgctacaaggacgccatcatcctggccctgatcaacagcggcaccagcttcttcgccggcttcgtggtgttcagcatcctgggcttcatggccgccgagcagggcgtgcacatcagcaaggtggccgagagcggccccggcctggccttcatcgcctaccccagagccgtgaccctgatgcccgtggcccccctgtgggccgccctgttcttcttcatgctgctgctgctgggcctggacagccagttcgtgggcgtggagggcttcatcaccggcctgctggacctgctgcccgccagctactacttcagattccagagagagatcagcgtggccctgtgctgcgccctgtgcttcgtgatcgacctgagcatggtgaccgacggcggcatgtacgtgttccagctgttcgactactacagcgccagcggcaccaccctgctgtggcaggccttctgggagtgcgtggtggtggcctgggtgtacggcgccgacagattcatggacgacatcgcctgcatgatcggctacagaccctgcccctggatgaagtggtgctggagcttcttcacccccctggtgtgcatgggcatcttcatcttcaacgtggtgtactacgagcccctggtgtacaacaacacctacgtgtacccctggtggggcgaggccatgggctgggccttcgccctgagcagcatgctgtgcgtgcccctgcacctgctgggctgcctgctgagagccaagggcaccatggccgagagatggcagcacctgacccagcccatctggggcctgcaccacctggagtacagagcccaggacgccgacgtgagaggcctgaccaccctgacccccgtgagcgagagcagcaaggtggtggtggtggagagcgtgatgtag

SEQ ID NO: 158004 - DNA, 1908 bp, Artificial Sequence
  derived and/or modified sequence
atggcgaagaagtccgctgagaacggaatttactcggtgtcgggcgacgaaaaaaaaggtcctctgattgcccctggtcccgatggtgcaccggccaagggagatgggccagttggactcggcactccggggggcaggctcgctgtgccccctcgagaaacttggacacggcagatggatttcatcatgtcatgtgttgggtttgcggtaggcctgggtaatgtctggcgctttccctacttgtgttacaagaatggcggaggtgttttccttatcccatatgtgctgatcgccctggttgggggcattcctatattttttctggaaattagtcttggccagtttatgaaagccggctctatcaatgtatggaatatctgtcctctctttaagggactcgggtatgcaagcatggtgatcgtgttctactgtaacacctactatattatggtgctcgcatgggggttctattacctggtgaagagcttcaccaccactctgccatgggccacatgcggccacacttggaacaccccggactgcgtagaaatcttccgacacgaggattgcgcgaacgccagtcttgcaaacctgacatgcgaccagctggcagacagaagatctccagtgatagagttctgggaaaacaaagtattgagactgtccggaggactagaagttcccggggcgcttaattgggaagtgactctctgcctactggcctgttgggtgcttgtgtatttctgtgtctggaagggggtcaagagcaccggtaagatcgtttacttcaccgcgactttcccatacgtggtgctggtagtgctgttagtaagaggagtcctgctgcctggggctctagacgggatcatttactacttgaagcctgattggtccaaattggggagcccccaggtgtggatcgacgccggaacgcaaatcttcttctcctatgcaatcggccttggagcactgaccgccttaggatcctacaaccggttcaacaataactgctataaggatgccattatcctggccctgatcaattcgggtactagctttttcgccgggttcgtcgtgttctccattctgggattcatggcagcagaacaaggagtgcacatctccaaggttgccgagagcggacccgggttagcgtttattgcctatccaagggccgtaactttaatgccggtcgctccattgtgggctgcattgttctttttcatgctgctgctgctaggactcgacagccagttcgtaggggtggagggattcataaccggcctgctggatttacttcccgccagttattactttcgctttcagagggaaatctctgtcgcactatgctgtgctctgtgcttcgttattgacctttcaatggtaacggatggtggcatgtatgtgttccaactgttcgactactattcagcatcggggaccacattactgtggcaggcattttgggagtgcgtggtcgtggcatgggtgtacggcgccgaccggtttatggatgatatcgcttgcatgatcggctataggccgtgcccgtggatgaaatggtgctggtcatttttcacacccttggtctgtatgggaatctttatctttaacgttgtctattatgaacccctcgtgtataacaatacgtacgtctatccatggtggggtgaggcaatgggatgggccttcgctctgagctccatgctgtgtgtaccattgcacttgctaggctgtttgttgcgggctaaaggaaccatggccgaaaggtggcagcacctgactcaacccatctggggtcttcaccacctggaatacagggctcaggacgccgacgtcaggggcctgacgaccctcactcccgtgagcgagagcagtaaagttgtggtggtcgagtcagtcatgtag

SEQ ID NO: 158005 - DNA, 1563 bp, Artificial Sequence
  derived and/or modified sequence
atgaaagcagggagcatcaatgtgtggaatatttgtcctctgttcaaaggcctagggtacgcctccatggtgatcgtgttttactgtaatacctactatatcatggtactggcatggggcttctactacctggtcaaatcctttaccacaacactgccttgggccacctgcggtcacacgtggaacaccccagattgtgtggagatcttcagacacgaggactgcgctaacgcatcactggcaaacctgacttgtgatcagttggcagatcgcaggtcccccgtcatcgagttctgggaaaacaaggttcttagactgtctgggggtctggaagtgccaggcgctctgaactgggaggtgactctctgcctcctggcctgttgggtgctcgtttacttttgcgtgtggaagggcgtgaaatctaccggtaagattgtgtactttacggcaaccttcccttatgtggttcttgttgttcttcttgtgaggggggtactacttcccggagcgctggatgggataatttactatctgaaacccgattggtccaagctagggtctcctcaagtatggattgacgctggcacccagatcttcttctcctatgcgattggtttgggcgccctgactgctttagggtcctacaacaggttcaataacaactgctacaaggacgcaattatcctggcactgatcaacagtggcacctcattttttgccggatttgtcgtcttctcaattctcggtttcatggctgctgagcagggagtgcacatcagtaaagtggccgaatctggaccaggtctcgcgtttatcgcatatcctagggccgttactctgatgcccgttgctcccctgtgggcagccctcttcttcttcatgctgctactgctgggactagattcacagtttgtgggtgtagaggggtttataactggactgcttgatttactgccagcctcgtactacttcaggttccagagggagatcagtgtggcgctttgttgcgccctgtgtttcgtgattgatttatcaatggtaactgacggaggtatgtacgtcttccagctatttgactattactccgcttcaggcactactctgttatggcaggccttctgggaatgcgttgtggtggcctgggtctacggggccgataggttcatggacgatatcgcctgtatgattggctatagaccttgtccctggatgaaatggtgctggtcgtttttcacacccctcgtgtgtatgggcatcttcatcttcaatgttgtttattacgaacctctggtctacaataacacttacgtgtatccatggtggggggaggcaatgggctgggccttcgctctaagcagtatgctgtgcgtgccactgcacttactaggatgcttactgagagctaagggaacaatggctgagcgatggcagcacctgacccagcctatatggggcctgcaccacttggagtatagagcccaggacgccgacgtgcggggactcacaacattaacaccagtatccgagagcagcaaggtggtggttgttgagagcgttatgtag

SEQ ID NO: 158006 - DNA, 1908 bp, Artificial Sequence
  derived and/or modified sequence
atggccaagaagtctgcagaaaatggcatctacagcgtgtctggagatgagaagaagggccccctgattgcccctggcccagatggagccccagccaagggagatggccctgtgggcctgggcaccccaggcggccgcctggccgtgcccccccgggagacctggacccggcagatggacttcatcatgagctgtgtgggctttgctgtgggcctgggcaatgtgtggaggttcccctacctgtgctacaagaatggaggcggcgtcttcctgatcccctacgtgctgattgccctggtgggcggcatccccatcttcttcctggagatcagcctgggccagttcatgaaggccggcagcatcaacgtgtggaacatctgccccctcttcaagggcctgggctacgcctccatggtgattgtgttctactgcaacacctactacatcatggtgctggcctggggcttctactacctggtgaagagcttcaccaccaccctgccctgggccacctgtggccacacctggaacaccccagactgtgtggagatcttcagacatgaggactgtgccaatgccagcctggccaacctgacctgtgaccagctggccgaccggcgcagccctgtgattgagttctgggagaacaaggtgctgcggctgagcggcggcctggaggtgcctggggccctgaactgggaggtgaccctgtgcctgctggcctgctgggtgctggtgtacttctgtgtgtggaagggcgtgaagagcacaggcaagatcgtgtacttcaccgccaccttcccctacgtggtgctggtggtgctgctggtgcggggcgtgctgctgcccggggccctggatggcatcatctactacctgaagccagactggagcaagctgggcagcccccaggtgtggattgatgctggcacccagatcttcttctcctatgccatcggcctgggcgccctgacagccctgggcagctacaaccgcttcaacaacaactgctacaaggatgccatcatcctggccctgatcaacagcggcaccagcttctttgctggctttgtggtgttcagcatcctgggcttcatggctgctgagcagggcgtgcacatcagcaaggtggccgagagcggccctggcctggccttcatcgcctaccccagggctgtgaccctgatgcctgtggcccccctgtgggccgccctcttcttcttcatgctgctgctgctgggcctggacagccagtttgtgggcgtggagggcttcatcaccggcctgctggacctgctgcctgccagctactacttccgcttccagcgggagatctctgtggccctgtgctgtgccctgtgctttgtgattgacctgtccatggtgacagatggcggcatgtatgtgttccagctgtttgactactacagcgccagcggcaccaccctgctgtggcaggccttctgggagtgtgtggtggtggcctgggtgtatggagctgaccgcttcatggatgacatcgcctgcatgattggctaccggccctgcccctggatgaagtggtgctggagcttcttcacccccctggtgtgcatgggcatcttcatcttcaacgtggtgtactatgagcccctggtgtacaacaacacctacgtgtacccctggtggggcgaggccatgggctgggcctttgccctgagctccatgctgtgtgtgcccctgcacctgctgggctgcctgctgcgggccaagggcaccatggccgagcgctggcagcacctgacccagcccatctggggcctgcaccacctggagtaccgggcccaggatgctgatgtgcggggcctgaccaccctgacccctgtgtctgagagcagcaaggtggtggtggtggagagcgtgatgtag

SEQ ID NO: 158007 - DNA, 1563 bp, Artificial Sequence
  derived and/or modified sequence
atgaaggccggcagcatcaacgtgtggaacatctgccccctcttcaagggcctgggctacgcctccatggtgattgtgttctactgcaacacctactacatcatggtgctggcctggggcttctactacctggtgaagagcttcaccaccaccctgccctgggccacctgtggccacacctggaacaccccagactgtgtggagatcttcagacatgaggactgtgccaatgccagcctggccaacctgacctgtgaccagctggccgacagaagaagccctgtgattgagttctgggagaacaaggtgctgcggctgagcggcggcctggaggtgcctggggccctgaactgggaggtgaccctgtgcctgctggcctgctgggtgctggtgtacttctgtgtgtggaagggcgtgaagagcacaggcaagatcgtgtacttcaccgccaccttcccctacgtggtgctggtggtgctgctggtgcggggcgtgctgctgcccggggccctggatggcatcatctactacctgaagccagactggagcaagctgggcagcccccaggtgtggattgatgctggcacccagatcttcttctcctatgccatcggcctgggcgccctgacagccctgggcagctacaaccgcttcaacaacaactgctacaaggatgccatcatcctggccctgatcaacagcggcaccagcttctttgctggctttgtggtgttcagcatcctgggcttcatggctgctgagcagggcgtgcacatcagcaaggtggccgagagcggccctggcctggccttcatcgcctaccccagggctgtgaccctgatgcctgtggcccccctgtgggccgccctcttcttcttcatgctgctgctgctgggcctggacagccagtttgtgggcgtggagggcttcatcaccggcctgctggacctgctgcctgccagctactacttccgcttccagcgggagatctctgtggccctgtgctgtgccctgtgcttcgtcatcgacctgtccatggtgacagatggcggcatgtatgtgttccagctgtttgactactacagcgccagcggcaccaccctgctgtggcaggccttctgggagtgtgtggtggtggcctgggtgtatggagctgaccgcttcatggatgacatcgcctgcatgattggctaccggccctgcccctggatgaagtggtgctggagcttcttcacccccctggtgtgcatgggcatcttcatcttcaacgtggtgtactatgagcccctggtgtacaacaacacctacgtgtacccctggtggggcgaggccatgggctgggcctttgccctgagctccatgctgtgtgtgcccctgcacctgctgggctgcctgctgcgggccaagggcaccatggccgagcgctggcagcacctgacccagcccatctggggcctgcaccacctggagtaccgggcccaggatgctgatgtgcggggcctgaccaccctgacccctgtgtctgagagcagcaaggtggtggtggtggagagcgtgatgtag

SEQ ID NO: 158008 - DNA, 1908 bp, Artificial Sequence
  derived and/or modified sequence
atggccaagaagagcgccgagaacggcatctacagcgtgagcggcgacgagaagaaaggcccgcttatcgccccggggccggacggagcccctgccaaaggggacggccctgtgggtctcgggactcccggagggagactggctgtgccaccgcgcgagacatggacgcgccagatggactttattatgagttgcgttggctttgccgtaggcctggggaacgtctggcgcttcccgtacctatgctacaagaacggtgggggggtttttctgatcccctatgtactaatcgccctggtgggcggcattccaatctttttcctggaaatcagcttgggacaatttatgaaggctggttcaatcaacgtgtggaatatttgtcccctcttcaaaggactgggttacgcttctatggtaatcgtgttttattgcaatacctactacatcatggtgctggcctggggattctattacctggtaaaatccttcacaacaacgctcccttgggccacttgtgggcacacctggaacactcctgattgcgtagagatttttaggcacgaggactgtgcgaacgcaagtttggctaatctgacctgcgatcagcttgcagatagacgcagcccagtaattgaattttgggaaaataaagtcttgcgccttagcggaggactggaagtacccggagccctcaactgggaagtgaccctctgtctgcttgcctgttgggtgctggtttacttttgtgtgtggaagggagtgaaatcaacaggaaagattgtctacttcaccgccactttcccttacgtcgtgctggtagtgctgttagtgaggggcgtgctcctgcctggcgcactggacggtataatttactacctcaagccagattggtcaaagctgggcagtccacaggtctggattgacgcagggactcagatctttttcagctacgcgattgggctgggtgccctcacagcgctcggatcatataataggtttaataataactgttacaaggacgccatcatcctcgcccttatcaacagcgggactagctttttcgccggattcgttgttttttctatattgggcttcatggccgctgagcagggcgtccatatttccaaggtggccgagtccggtcccggtttagccttcattgcttaccctagggcagtgaccctgatgcccgttgcaccgctctgggcagcgctctttttctttatgctgctgctcctgggcctggacagtcaatttgtaggagtagagggtttcataaccgggctgctcgatctcctgccagcatcatattattttcgatttcaaagggaaatcagcgttgctttgtgctgcgccctgtgctttgtaatcgatctctccatggtcaccgatggtggaatgtacgtgttccagctattcgattattattctgcatccggcacaactctactctggcaggccttttgggaatgtgtggtggtcgcttgggtgtacggcgcagatcgcttcatggatgacattgcgtgcatgattggatatagaccctgcccttggatgaagtggtgctggtccttctttactccgctagtgtgtatgggcattttcatttttaacgtcgtgtattacgaacctctggtatacaataacacatatgtgtacccctggtggggagaggcaatgggatgggcctttgccttaagttctatgctttgtgtgccattacacctgctgggatgtctcctccgcgccaagggaacaatggctgagcgctggcagcatcttacccagcctatttggggactgcatcatctggaatatcgagctcaggacgccgatgtgagaggactgaccaccctgacccccgtgtcagagtcctcaaaggtggtcgtcgtcgagagcgtaatgtag

SEQ ID NO: 158009 - DNA, 1563 bp, Artificial Sequence
  derived and/or modified sequence
atgaaggccggcagcatcaacgtgtggaacatctgccccctgttcaagggtctgggttatgcatctatggtgatcgtattctattgcaatacatactacatcatggtgctggcgtggggtttctattacttggtgaagtccttcacaacaacattaccttgggccacctgtgggcatacttggaacaccccagactgcgtggagattttcagacacgaggactgcgcaaatgcttcactggccaatctgacctgtgaccaactggccgatcgtagatccccagtcatcgagttttgggagaataaagtgctccggctgagcggtggcctagaggttcctggtgctctgaattgggaagtgaccctgtgtctgcttgcttgctgggtcttagtgtacttctgtgtgtggaaaggggtgaagagtacaggcaagattgtatattttacagccactttcccgtatgtggttttggtggtgttgctcgtgcgtggggtcctactgccgggggcactggacgggataatctactacctgaagcccgactggtccaagctggggtcaccacaagtgtggatagatgcgggcactcagattttttttagctacgcaataggcttgggagcactgaccgccctcgggtcctataaccgattcaacaataattgttataaggacgctataatcctggcactcataaatagcggcacatctttcttcgcaggctttgttgtgttcagcatcctgggcttcatggccgcggagcaaggtgtgcacatttctaaggttgctgagtccggccccggcctcgctttcattgcgtaccctcgagcagtcactctgatgccagtcgccccgttatgggccgcactgtttttcttcatgctcctgctgctcggactggatagccagtttgtgggagtcgaaggttttatcactggactccttgacctgcttccagcaagttattatttccggttccagcgggaaatctctgtggcgctatgctgtgccttatgctttgtcatcgatcttagcatggtaacggacggcggaatgtatgtatttcagttattcgattactactccgcgagtggtacaacattgctgtggcaagccttttgggagtgtgtcgttgtggcctgggtgtatggcgccgatcgctttatggacgacattgcatgcatgatcggataccgcccatgtccttggatgaaatggtgttggagcttcttcacccccttggtgtgcatgggcattttcatcttcaacgtcgtttactacgaaccgctggtttacaataacacctacgtctacccatggtggggagaggccatgggttgggcctttgcactgtcttccatgctgtgcgtacctctccaccttctggggtgtttgcttagagccaaaggaaccatggctgagcgttggcagcatcttacgcaacccatttgggggcttcatcacctggagtatagagctcaggatgctgacgtgagaggacttaccactctcacccctgtgagtgaaagtagcaaagtcgtagtggtcgagagcgtgatgtag

SEQ ID NO: 158010 - DNA, 1908 bp, Artificial Sequence
  derived and/or modified sequence
atggctaaaaaatccgctgaaaatggcatatactcagtctccggggatgaaaaaaaggggccactcatcgccccaggtcctgatggcgcacccgcaaaaggggatgggccagtaggcctgggaactcctgggggaaggctggctgtgccacctagagaaacgtggacccgccagatggatttcatcatgagctgtgtgggcttcgcggtcggcctgggtaacgtctggcggttcccttacctgtgttataaaaacgggggaggggtgttcctgatcccatacgtgttgattgcacttgtggggggtattcctatctttttcctggagataagcctgggtcagttcatgaaagctggaagcataaacgtttggaatatctgcccactcttcaaggggttgggatatgcatccatggtgatcgtgttctattgcaatacttactatatcatggttttggcctggggattctactacctcgtaaagtcattcacgacaactttaccgtgggcaacatgtggtcacacttggaatactcctgattgtgttgagatcttccgtcatgaggactgtgctaacgccagcttggccaacctaacctgcgaccagctcgccgacagacgaagccccgtaatcgagttttgggagaataaagtactcaggctgtctggcggactcgaagtgccgggagccctgaattgggaggtgaccctgtgtttgctggcatgttgggtcctggtttacttttgtgtttggaaaggggtgaaatctacaggaaaaattgtttacttcaccgcaacattcccgtatgtggtgttggtggtcctgcttgtccgtggtgtgctgctccccggtgcactggacggcattatctactaccttaagccagattggagtaagctgggaagcccccaggtgtggatcgacgcgggaactcagatcttcttcagctatgcaattggcctgggagctctcaccgcgctcggctcctacaaccgtttcaacaacaactgttacaaagacgctatcatactggcactaatcaatagcggaacaagcttttttgccggatttgtggtgttttcaatcctcggatttatggccgctgaacagggagtacacatcagcaaggtagccgagagtggcccaggtctcgctttcatcgcctacccacgcgcagtgaccctcatgccagtggcgccactatgggcagctctcttcttcttcatgctgcttttattgggactggattcacagtttgtgggagtggagggattcatcaccggacttctggatttgctgcctgctagctactatttccggttccagagggaaatctcagtggctctctgttgcgcgctgtgtttcgtgattgacctctcaatggtgaccgatggaggtatgtacgtgtttcagctcttcgattactactcagcctccgggaccacattgctctggcaggccttctgggagtgcgtcgttgttgcctgggtttatggcgctgatcggtttatggacgatattgcatgtatgataggctatcgcccttgtccatggatgaaatggtgctggtctttcttcacccccctagtctgcatggggatctttatctttaacgtggtgtattacgaacccctggtgtataataacacatatgtctatccctggtggggagaggcaatgggttgggcgtttgccctctccagtatgctgtgcgtgccgcttcacctgctgggatgcctcctgcgcgctaaagggaccatggccgagcgctggcagcatctgacgcagccaatatggggccttcatcacttggaatatcgagctcaagacgccgatgtcagaggactgacaacactaacccccgtgtcagagtcttcaaaagtcgtggtagtcgaatctgtgatgtag

SEQ ID NO: 158011 - DNA, 1563 bp, Artificial Sequence
  derived and/or modified sequence
atgaaagctggcagcataaatgtgtggaatatttgcccattgttcaaaggcctaggatatgcttcgatggtgattgttttctattgcaatacatactacatcatggtacttgcatggggattctattacctggtgaagagcttcaccactacattgccatgggccacctgcgggcacacatggaataccccggattgtgtagaaatcttcagacacgaggactgcgccaacgcctctctggccaatctaacttgtgaccagctggccgataggcggtccccagtgatcgaattttgggagaataaagtcctcaggctgtccgggggactagaggtccccggagcgttgaattgggaggtgacactctgtctgctcgcctgttgggtcctggtctatttttgcgtctggaaaggcgtgaaatccactggcaagatagtttatttcactgccacgtttccctacgtggtccttgtggtcctgctggtaaggggagtactccttcctggagccttggacggaataatttactacttaaagcctgactggtcaaagctcggttcaccacaagtttggatagacgccggtacccagatttttttctcttatgctattggactcggcgcacttacagccctgggcagttacaatcgcttcaacaataactgttataaggatgctatcatcctggccctgatcaattctgggacctcattcttcgctggtttcgtggtattcagtatcctcggattcatggctgccgaacagggtgtgcacatttccaaggtagccgagtcgggtcctgggttggcctttatcgcataccctcgagcagtgactctgatgccggtggccccactgtgggcagctctgttttttttcatgctgctcctgctgggcctggattctcaattcgttggagtggaagggtttatcacaggcttactggatttgctgccggcttcctattactttcgcttccagcgagaaattagcgtggcactgtgctgtgctctgtgtttcgtcatcgacttgagcatggtcaccgacggtggcatgtacgtcttccagctgtttgattattattccgcatctggaacaaccctcttgtggcaagccttctgggaatgtgtggtcgtggcttgggtttatggggctgacaggtttatggatgacatagcctgcatgatagggtataggccttgcccttggatgaaatggtgttggagctttttcactcccctggtatgtatgggtatcttcatcttcaatgtggtctactacgagccccttgtttataataatacgtatgtgtacccctggtggggcgaggctatgggttgggccttcgccttgtcttccatgctgtgtgtccccctccacctattagggtgtctgcttcgggcaaaagggactatggcggagcgatggcagcacctcacccagccaatctggggccttcaccacctggagtacagggcccaggatgccgatgtgcgcggactgaccactctcacgcctgtgtctgaatcaagtaaagttgtcgtggtcgaatctgtgatgtag

SEQ ID NO: 158012 - DNA, 270 bp, Artificial Sequence
  derived and/or modified sequence
gggaggcaccaccctggctctcatcagcagtgggatcaactgttatgttggctgcggggtttattacatcccggattgcatggatgccgggctggacgagcccatctccagggcggaagagtccgggctggaccaggcctacacaggctccccgcaggctgtcatgcagacgcttcgggacctactctggggtgccctgtcttgcttcatgcagtggccgcttggtctcggcagccgggagtggagggctttatcaccgggctgctttag

SEQ ID NO: 158013 - DNA, 3763 bp, Artificial Sequence
  derived and/or modified sequence
gcctccgcgggccccggccggggcggggggcgcgggccacaggcccctgctccggccgccgcttgcagaccgcgggcgccgatgtcgcccgcgccccgctaggctgagcctcgggtcgggcgaggagccgccgcagccgccgccgcccgagccgcgggcaggagcctcgggagccgccgccgccgccgccgccgcccggccgggccccgccgccgcccgcgcgcccccgggcccccgacacacatgagattcttcaggctcactttcaagtgcttcgtggactgcttctgactgcgccgcccgcgccccgcaccccgccgcccgcccgccgccccgtcccccggcccggccgccccccggcccccggccggcccgcgccctcggggccctccccggtgccgccggtgccccccgcctgaccgccgccccccgtgaggcgccgcgaccccggcccggccgtgcggcccgccgaggccatggcgaagaagagcgccgagaacggcatctatagcgtgtccggcgacgagaagaagggccccctcatcgcgcccgggcccgacggggccccggccaagggcgacggccccgtgggcctggggacacccggcggccgcctggccgtgccgccgcgcgagacctggacgcgccagatggacttcatcatgtcgtgcgtgggcttcgccgtgggcttgggcaacgtgtggcgcttcccctacctgtgctacaagaacggcggaggtgtgttccttattccctacgtcctgatcgccctggttggaggaatccccattttcttcttagagatctcgctgggccagttcatgaaggccggcagcatcaatgtctggaacatctgtcccctgttcaaaggcctgggctacgcctccatggtgatcgtcttctactgcaacacctactacatcatggtgctggcctggggcttctattacctggtcaagtcctttaccaccacgctgccctgggccacatgtggccacacctggaacactcccgactgcgtggagatcttccgccatgaagactgtgccaatgccagcctggccaacctcacctgtgaccagcttgctgaccgccggtcccctgtcatcgagttctgggagaacaaagtcttgaggctgtctgggggactggaggtgccaggggccctcaactgggaggtgaccctttgtctgctggcctgctgggtgctggtctacttctgtgtctggaagggggtcaaatccacgggaaagatcgtgtacttcactgctacattcccctacgtggtcctggtcgtgctgctggtgcgtggagtgctgctgcctggcgccctggatggcatcatttactatctcaagcctgactggtcaaagctggggtcccctcaggtgtggatagatgcggggacccagattttcttttcttacgccattggcctgggggccctcacagccctgggcagctacaaccgcttcaacaacaactgctacaaggacgccatcatcctggctctcatcaacagtgggaccagcttctttgctggcttcgtggtcttctccatcctgggcttcatggctgcagagcagggcgtgcacatctccaaggtggcagagtcagggccgggcctggccttcatcgcctacccgcgggctgtcacgctgatgccagtggccccactctgggctgccctgttcttcttcatgctgttgctgcttggtctcgacagccagtttgtaggtgtggagggcttcatcaccggcctcctcgacctcctcccggcctcctactacttccgtttccaaagggagatctctgtggccctctgttgtgccctctgctttgtcatcgatctctccatggtgactgatggcgggatgtacgtcttccagctgtttgactactactcggccagcggcaccaccctgctctggcaggccttttgggagtgcgtggtggtggcctgggtgtacggagctgaccgcttcatggacgacattgcctgtatgatcgggtaccgaccttgcccctggatgaaatggtgctggtccttcttcaccccgctggtctgcatgggcatcttcatcttcaacgttgtgtactacgagccgctggtctacaacaacacctacgtgtacccgtggtggggtgaggccatgggctgggccttcgccctgtcctccatgctgtgcgtgccgctgcacctcctgggctgcctcctcagggccaagggcaccatggctgagcgctggcagcacctgacccagcccatctggggcctccaccacttggagtaccgagctcaggacgcagatgtcaggggcctgaccaccctgaccccagtgtccgagagcagcaaggtcgtcgtggtggagagtgtcatgtgacaactcagctcacatcaccagctcacctctggtagccatagcagcccctgcttcagccccaccgcacccctccagggggcctgcctttccctgacacttttggggtctgcctgggggaggaggggagaaagcaccatgagtgctcactaaaacaactttttccatttttaataaaacgccaaaaatatcacaacccaccaaaaatagatgcctctccccctccagccctagccgagctggtcctaggccccgcctagtgccccacccccacccacagtgctgcactcctcctgcccctgccacgcccaccccctgcccacctctccaggctctgctctgcagcacacccgtgggtgacccctcaccccagaagcagcagtggcagcttgggaaatgtgaggaagggaaggagggagagacgggagggaggagagagaggagaagggaggcaggggaggggcagcagaaccaaggcaaatatttcagctgggctatacccctctccccatccctgttatagaagcttagagagccagccagcaatggaaccttctggttcctgcgccaatcgccaccagtatcaattgtgtgagcttgggtgcgagtgcacgcgtgcgtgagtacggagagtatatatagatctctatctcttagcaaaggtgaatgccagatgtaaatggcgcctctgggcaaaggaggcttgtattttgcacattttataaaaacttgagagaatgagatttctgcttgtatatttctaaaaagaggaaggagcccaaaccatcctctccttaccactcccatccctgtgagccctaccttacccctctgcccctagccaaggagtgtgaatttatagatctaactttcataggcaaaacaaaagcttcgagctgttgcgtgtgtgagtctgttgtgtggatgtgcgtgtgtggtccccagccccagactggattggaaaagtgcatggtgggggcctcggggctgtccccacgctgtccctttgccacaagtctgtggggcaagaggctgcaatattccgtcctgggtgtctgggctgctaacctggcctgctcaggcttcccaccctgtgcggggcacacccccaggaagggaccctggacacggctcccacgtccaggcttaaggtggatgcacttcccgcacctccagtcttctgtgtagcagctttaacccacgtttgtctgtcacgtccagtcccgagacggctgagtgaccccaagaaaggcttccccgacacccagacagaggctgcagggctggggctgggtgagggtggcgggcctgcggggacattctactgtgctaaaaagccactgcagacatagcaataaaaacatgtcattttccaaagcagg

SEQ ID NO: 158014 - DNA, 1892 bp, Artificial Sequence
  derived and/or modified sequence
gtgtgtcctgtgactacaaaacagcactggggttgctggaagccgaagtgacccggtgatgggtgggaaacagaggtccagagcaaaggcctttgcccaaggtcaggagaaggatgctgggacctggagtcaggtgtgttccttattccctacgtcctgatcgccctggttggaggaatccccattttcttcttagagatctcgctgggccagttcatgaaggccggcagcatcaatgtctggaacatctgtcccctgttcaaaggcctgggctacgcctccatggtgatcgtcttctactgcaacacctactacatcatggtgctggcctggggcttctattacctggtcaagtcctttaccaccacgctgccctgggccacatgtggccacacctggaacactcccgactgcgtggagatcttccgccatgaagactgtgccaatgccagcctggccaacctcacctgtgaccagcttgctgaccgccggtcccctgtcatcgagttctgggagaacaaagtcttgaggctgtctgggggactggaggtgccaggggccctcaactgggaggtgaccctttgtctgctggcctgctgggtgctggtctacttctgtgtctggaagggggtcaaatccacgggaaagatcgtgtacttcactgctacattcccctacgtggtcctggtcgtgctgctggtgcgtggagtgctgctgcctggcgccctggatggcatcatttactatctcaagcctgactggtcaaagctggggtcccctcaggtgtggatagatgcggggacccagattttcttttcttacgccattggcctgggggccctcacagccctgggcagctacaaccgcttcaacaacaactgctacaaggacgccatcatcctggctctcatcaacagtgggaccagcttctttgctggcttcgtggtcttctccatcctgggcttcatggctgcagagcagggcgtgcacatctccaaggtggcagagtcagggccgggcctggccttcatcgcctacccgcgggctgtcacgctgatgccagtggccccactctgggctgccctgttcttcttcatgctgttgctgcttggtctcgacagccagtttgtaggtgtggagggcttcatcaccggcctcctcgacctcctcccggcctcctactacttccgtttccaaagggagatctctgtggccctctgttgtgccctctgctttgtcatcgatctctccatggtgactgatggcgggatgtacgtcttccagctgtttgactactactcggccagcggcaccaccctgctctggcaggccttttgggagtgcgtggtggtggcctgggtgtacggagctgaccgcttcatggacgacattgcctgtatgatcgggtaccgaccttgcccctggatgaaatggtgctggtccttcttcaccccgctggtctgcatgggcatcttcatcttcaacgttgtgtactacgagccgctggtctacaacaacacctacgtgtacccgtggtggggtgaggccatgggctgggccttcgccctgtcctccatgctgtgcgtgccgctgcacctcctgggctgcctcctcagggccaagggcaccatggctgagcgctggcagcacctgacccagcccatctggggcctccaccacttggagtaccgagctcaggacgcagatgtcaggggcctgaccaccctgaccccagtgtccgagagcagcaaggtcgtcgtggtggagagtgtcatgtgacaactcagctcacatcaccagctcacctctggtagccatagcagcccctgcttcagccccaccgcacccctccagggggcctgcctttccctgacacttttggggtctgcctg

SEQ ID NO: 158015 - protein, 567 aa, Artificial Sequence
  derived and/or modified sequence
MGLLPKLGASQGSDTSTSRAGRCARSVFGNIKVFVLCQGLLQLCQLLYSAYFKSSLTTIEKRFGLSSSSSGLISSLNEISNAILIIFVSYFGSRVHRPRLIGIGGLFLAAGAFILTLPHFLSEPYQYTLASTAILFAISVFGPAFGYLLGSVMLQIFVDYGRVNTAAVNLVPGDPRWIGAWWLGLLISSALLVLTSFPFFFFPRAMPIGAKRAPATADEARKLEEAKSRGSLVDFIKRFPCIFLRLLMNSLFVLVVLAQCTFSSVIAGLSTFLNKFLEKQYGTSAAYANFLIGAVNLPAAALGMLFGGILMKRFVFSLQAIPRIATTIITISMILCVPLFFMGCSTPTVAEVYPPSTSSSIHPQSPACRRDCSCPDSIFHPVCGDNGIEYLSPCHAGCSNINMSSATSKQLIYLNCSCVTGGSASAKTGSCPVPCAHFLLPAIFLISFVSLIACISHNPLYMMVLRVVNQEEKSFAIGVQFLLMRLLAWLPSPALYGLTIDHSCIRWNSLCLGRRGACAYYDNDALRDRYLGLQMGYKALGMLLLCFISWRVKKNKEYNVQKAAGLI

SEQ ID NO: 158016 - protein, 643 aa, Artificial Sequence [sequence omitted]

SEQ ID NO: 158017 - DNA, 1704 bp, Artificial Sequence
  derived and/or modified sequence
atgggcctgctgcccaagctgggcgccagccagggcagcgacaccagcaccagcagagccggcagatgcgccagaagcgtgttcggcaacatcaaggtgttcgtgctgtgccagggcctgctgcagctgtgccagctgctgtacagcgcctacttcaagagcagcctgaccaccatcgagaagagattcggcctgagcagcagcagcagcggcctgatcagcagcctgaacgagatcagcaacgccatcctgatcatcttcgtgagctacttcggcagcagagtgcacagacccagactgatcggcatcggcggcctgttcctggccgccggcgccttcatcctgaccctgccccacttcctgagcgagccctaccagtacaccctggccagcaccgccatcctgttcgccatcagcgtgttcggccccgccttcggctacctgctgggcagcgtgatgctgcagatcttcgtggactacggcagagtgaacaccgccgccgtgaacctggtgcccggcgaccccagatggatcggcgcctggtggctgggcctgctgatcagcagcgccctgctggtgctgaccagcttccccttcttcttcttccccagagccatgcccatcggcgccaagagagcccccgccaccgccgacgaggccagaaagctggaggaggccaagagcagaggcagcctggtggacttcatcaagagattcccctgcatcttcctgagactgctgatgaacagcctgttcgtgctggtggtgctggcccagtgcaccttcagcagcgtgatcgccggcctgagcaccttcctgaacaagttcctggagaagcagtacggcaccagcgccgcctacgccaacttcctgatcggcgccgtgaacctgcccgccgccgccctgggcatgctgttcggcggcatcctgatgaagagattcgtgttcagcctgcaggccatccccagaatcgccaccaccatcatcaccatcagcatgatcctgtgcgtgcccctgttcttcatgggctgcagcacccccaccgtggccgaggtgtacccccccagcaccagcagcagcatccacccccagagccccgcctgcagaagagactgcagctgccccgacagcatcttccaccccgtgtgcggcgacaacggcatcgagtacctgagcccctgccacgccggctgcagcaacatcaacatgagcagcgccaccagcaagcagctgatctacctgaactgcagctgcgtgaccggcggcagcgccagcgccaagaccggcagctgccccgtgccctgcgcccacttcctgctgcccgccatcttcctgatcagcttcgtgagcctgatcgcctgcatcagccacaaccccctgtacatgatggtgctgagagtggtgaaccaggaggagaagagcttcgccatcggcgtgcagttcctgctgatgagactgctggcctggctgcccagccccgccctgtacggcctgaccatcgaccacagctgcatcagatggaacagcctgtgcctgggcagaagaggcgcctgcgcctactacgacaacgacgccctgagagacagatacctgggcctgcagatgggctacaaggccctgggcatgctgctgctgtgcttcatcagctggagagtgaagaagaacaaggagtacaacgtgcagaaggccgccggcctgatctag

SEQ ID NO: 158018 - DNA, 1704 bp, Artificial Sequence
  derived and/or modified sequence
atggggctgctccccaaactgggagccagtcagggctccgataccagcacatctagagccgggcggtgcgcacgcagtgtattcggaaatattaaagtcttcgtcctctgtcaggggctcttgcaattgtgtcaactgctttattctgcctacttcaaatcaagtctaaccaccattgagaaaaggtttggattgtcgtcctcatcttctggccttatctcctctctgaacgagattagtaacgctattttgattatctttgtgtcttatttcggttctcgggtccaccgtccaagactcattggcattggaggtctgtttctcgccgccggtgctttcattcttaccttgccccacttcctgtctgaaccataccagtatacccttgcaagtaccgccatcctttttgcaatctcagtatttggccctgcatttggttacctcttgggctcagtgatgctgcaaattttcgttgattatggaagggttaatacagccgccgtcaacctggtgcccggggatccccgctggatcggggcttggtggctcggtctgttgatcagtagtgccctgctcgtgctgaccagctttccgttcttcttttttcctagggccatgcccatcggagccaagcgcgctccagcaactgccgacgaagcgaggaagctggaggaggctaagtctaggggttcccttgtggatttcatcaagcgctttccatgcattttcttgcggttgctcatgaactcactgttcgttctggtggtactggctcagtgtaccttttcctctgtaattgccggactgagcaccttcttgaataagttcttggagaagcaatatgggacttctgccgcttacgctaatttcctcatcggcgcagttaatctgcctgcagcagcattgggcatgttgttcggcggaatccttatgaagcgttttgttttctctttacaggcaatacctcgcatcgcaaccaccatcattactattagcatgatcctatgcgtcccgcttttttttatgggatgttctactccaacagtggccgaagtgtatcccccctcgacgagcagctcgatccatccacagtcccctgcatgtaggcgggattgctcttgccccgatagcatattccacccagtctgcggtgacaacggcatcgagtacctgagtccgtgtcatgctgggtgcagcaatatcaacatgtcatccgctactagtaaacagctgatttacttaaattgctcatgcgtcaccggcggatcagcctccgctaagaccgggtcttgtcccgtcccatgcgcacactttcttctgccagcaatctttctgatttcattcgtgagcctcattgcctgtatctcacacaatcctctgtatatgatggtcctgagagtcgttaaccaggaagagaagtcttttgccataggcgtgcagttcctcctgatgagattattggcatggctgcccagtccggcattgtatggtctaacgattgatcactcctgcattcggtggaattctctgtgcctgggcagaaggggggcctgcgcttactacgataacgacgccctacgggaccgctatttaggactgcagatgggctataaggccctgggaatgctcctgctgtgtttcatttcttggcgtgtgaaaaaaaataaagaatacaacgtgcaaaaggctgcagggttgatatag

SEQ ID NO: 158019 - DNA, 1704 bp, Artificial Sequence
  derived and/or modified sequence
atgggcctgctgcccaagctgggcgccagccagggcagtgacaccagcaccagccgggccggccgctgtgcccggtctgtgtttggaaacatcaaggtgtttgtgctgtgccagggcctgctgcagctgtgccagctgctgtacagcgcctacttcaagagcagcctgaccaccatcgagaagagatttggcctgagcagcagcagcagcggcctcatcagcagcctgaatgagatcagcaatgccatcctgatcatctttgtgtcctacttcggcagccgggtgcaccggccccggctgattggaattggaggcctcttcctggccgccggggccttcatcctgaccctgccccacttcctgtctgagccctaccagtacaccctggccagcacagccatcctgtttgccatctctgtgtttggacctgccttcggctacctgctgggctctgtgatgctgcagatctttgtggactatggccgggtgaacacagctgctgtgaacctggtgcctggggacccccgctggattggagcctggtggctgggcctgctgatcagcagcgccctgctggtgctgaccagcttccccttcttcttcttcccccgggccatgcccatcggggccaagagggccccagccacagcagatgaggccaggaagctggaggaggccaagagccggggcagcctggtggacttcatcaagcgcttcccctgcatcttcctgcggctgctgatgaacagcctgtttgtgctggtggtgctggcccagtgcaccttcagctctgtgattgctggcctgagcaccttcctgaacaagttcctggagaagcagtatggcaccagcgctgcctatgccaacttcctgattggagctgtgaacctgcctgctgctgccctgggcatgctgtttggaggcatcctgatgaagagatttgtgttcagcctgcaggccatcccccgcatcgccaccaccatcatcaccatctccatgatcctgtgtgtgcccctcttcttcatgggctgcagcacccccaccgtggccgaggtgtacccacccagcaccagcagcagcatccacccccagagccctgcctgcagaagagactgcagctgcccagacagcatcttccaccctgtgtgtggggacaatggcatcgagtacctgagcccctgccacgccggctgcagcaacatcaacatgagcagcgccaccagcaagcagctgatctacctgaactgcagctgtgtgactggaggcagcgccagcgccaagacaggcagctgccctgtgccctgtgcccacttcctgctgcctgccatcttcctgatcagctttgtgtccctcatcgcctgcatcagccacaaccccctgtacatgatggtgctgcgggtggtgaaccaggaggagaagagctttgccatcggcgtgcagttcctgctgatgaggctgctggcctggctgcccagccctgccctgtatggcctgaccatcgaccacagctgcatccgctggaacagcctgtgcctgggccggcggggggcctgtgcctactatgacaatgatgccctgcgggaccgctacctgggcctgcagatgggctacaaggccctgggcatgctgctgctgtgcttcatctcctggagggtgaagaagaacaaggagtacaacgtgcagaaggccgccggcctcatctag

SEQ ID NO: 158020 - DNA, 1704 bp, Artificial Sequence
  derived and/or modified sequence
atgggcctgctgcccaagctgggcgccagccagggcagcgacaccagcactagtagggcaggacgttgtgctaggtccgtgttcggcaacattaaggtgttcgtgctgtgccaaggacttctgcagctctgccaactcttgtactccgcatatttcaaaagctctctaactactattgaaaagagatttggcctcagcagtagtagctctgggttgatttcttccctcaacgagataagcaatgcaatcctgattatattcgtctcatactttggatcccgcgtccacagaccccgtctcatcggcattggcggtttatttctggccgccggagccttcatactgacactgccacatttccttagcgagccgtatcagtacaccctggcctcaactgccatcttgtttgcaatctctgtgtttggccccgcgtttggctatttgctcggctctgtaatgctgcagatctttgttgattacggccgcgtcaataccgcagcagtgaaccttgtcccaggagacccccgttggatcggggcatggtggctaggactgctcatctcaagcgcacttctggttctgacctcctttcccttctttttcttccccagagcaatgcctatcggagctaagagagcccccgccaccgccgatgaggctcgaaaacttgaagaggcaaaaagccgcggcagcctcgttgatttcatcaagcgctttccctgcatctttttacgactgctgatgaactccctgtttgtcctggtggtcctcgctcaatgcaccttttcctctgttatcgctggattaagcactttcctgaataagttcctggaaaaacaatacggaactagcgctgcatatgcaaactttctgatcggcgcagtgaacctgccagcagctgcactaggtatgttgtttggcggtattcttatgaaacgattcgttttttcccttcaggccattcccagaattgctacgaccatcatcaccatctctatgatcctctgcgttcccctcttcttcatgggctgcagcactccaacagtggccgaggtgtacccccccagcacttcttctagcattcatccccagagtcccgcatgtaggcgggattgttcctgtcccgacagtatcttccacccggtatgcggggataatggaatcgaatatctcagtccatgccatgctggatgttctaacatcaatatgtcatcagctacctcgaaacagctcatatacctgaactgtagctgtgtcacagggggcagtgcttccgcgaagacgggttcctgcccagtgccgtgcgcccattttctgctgccggcgattttcctgatatcattcgtatccctgatagcctgtatctcccacaaccctctttacatgatggtgctccgtgttgttaaccaggaagagaagtccttcgcgatcggcgttcaattcttgttgatgcgcctgttggcttggcttccgtcccctgccctgtacgggttaactattgaccacagctgtatccgttggaactccctgtgtctcggccgtaggggggcttgtgcctactacgataatgacgccctacgggataggtacctcgggctccaaatggggtacaaagccctggggatgctgctgctgtgttttataagctggcgagtcaagaagaacaaggaatacaacgtgcagaaggccgctggcttgatctag

SEQ ID NO: 158021 - DNA, 1704 bp, Artificial Sequence
  derived and/or modified sequence
atgggcctgctccccaagctgggcgctagccaaggcagcgatacctccacctctcgggcaggacggtgtgcacgctcagtttttggcaatattaaagtgtttgttctttgccagggacttctgcaattgtgccagctcctgtactctgcctactttaagagtagcctcactactattgagaagcgctttggtctgtcttcctctagtagcggccttatatccagtctgaacgagatcagcaacgccatactgattatctttgtgtcttattttgggagtcgcgtgcatcggcctaggctcattggcatcggcggtctgttcctggctgccggagcatttatcttgactctccctcacttcctttctgagccctaccaatatactctggcctcaacagcaatcttgttcgccatctccgtgtttggaccagcgttcggatacttgcttggctccgtaatgctgcaaattttcgtggattacggacgggttaacaccgcagccgtcaatctagttccaggtgaccccaggtggatcggcgcatggtggctgggacttctgatcagctctgcacttctggtgctgacctctttccctttctttttctttcctcgagccatgcctatcggcgctaagagggcgcctgctaccgcagacgaggcacgcaagctggaagaggcaaaaagtcgaggctctctcgtggatttcattaagaggttcccttgcatcttcctccgcctactgatgaattctctctttgttctggtggtgctcgctcaatgcaccttttcctcagtcatcgcagggctgagtacctttttgaacaaattcctcgagaaacagtatgggacaagtgccgcttacgcaaatttcctgatcggtgccgtaaatctgccggcagcagccttaggaatgctgttcgggggaatactgatgaaaaggtttgttttcagcctgcaggccattcccaggatcgcaactacaattatcaccatttccatgattttgtgcgtgcccctgttcttcatgggttgctctaccccaacggtggcagaggtctacccgccatctacgagctccagcatacacccacagagccctgcctgccgaagagattgctcttgccctgacagtatattccatcccgtttgcggtgataatggcatcgagtatctgagcccttgccacgccggttgcagtaacattaacatgtcctccgccacatctaaacagcttatttacctcaactgtagttgtgtgacagggggatccgcttccgccaaaacgggatcatgccctgtgccttgtgcacatttcctgttacccgcaatctttctgatatctttcgtctccctcattgcctgcataagtcacaaccctttgtacatgatggtgctacgggtcgtgaaccaggaggagaagagcttcgccattggcgtccagttccttctgatgcggctgctcgcttggctgcccagtccagccctatatggtctaactatcgatcactcttgcatccggtggaactcgctttgcctcgggcgtagaggggcatgtgcctactatgacaatgatgctctgagagacagatatttaggtctgcaaatggggtataaagcgttgggaatgctcctactgtgttttatctcttggagagtgaagaaaaataaagaatataatgttcaaaaagcagcgggtctcatatag

SEQ ID NO: 158022 - DNA, 1918 bp, Artificial Sequence
  derived and/or modified sequence
cgcgaatctcctccggccactgccgccgcggtcgcctctcacccgcccggccgctccagcccgaggcgccccgaccccgcgccactccgcgcccggccagccgcccgcagccatggggctcctgcccaagctcggcgcgtcccagggcagcgacacctctactagccgagccggccgctgtgcccgctcggtcttcggcaacattaaggtgtttgtgctctgccaaggcctcctgcagctctgccaactcctgtacagcgcctacttcaagagcagcctcaccaccattgagaagcgctttgggctctccagttcttcatcgggtctcatttccagcttgaatgagatcagcaatgccatcctcatcatctttgtcagctactttggcagccgggtgcaccgtccacgtctgattggcatcggaggtctcttcctggctgcaggtgccttcatcctcaccctcccacacttcctctccgagccctaccagtacaccttggccagcactgccatcttatttgccatctctgtatttggaccggctttcgggtacctgctgggctctgtcatgctgcagatctttgtggactatggcagggtcaacacagctgcagttaacttggtcccgggtgacccccgatggattggagcctggtggctaggcctgctcatttcttcagctttattggttctcacctctttccccttttttttcttccctcgagcaatgcccataggagcaaagagggctcctgccacagcagatgaagcaaggaagttggaggaggccaagtcaagaggctccctggtggatttcattaaacggtttccatgcatctttctgaggctcctgatgaactcactcttcgtcctggtggtcctggcccagtgcaccttctcctccgtcattgctggcctctccaccttcctcaacaagttcctggagaagcagtatggcacctcagcagcctatgccaacttcctcattggtgctgtgaacctccctgctgcagccttggggatgctgtttggaggaatcctcatgaagcgctttgttttctctctacaagccattccccgcatagctaccaccatcatcaccatctccatgatcctttgtgttcctttgttcttcatgggatgctccaccccaactgtggccgaagtctacccccctagcacatcaagttctatacatccgcagtctcctgcctgccgcagggactgctcgtgcccagattctatcttccacccggtctgtggagacaatggaatcgagtacctctccccttgccatgccggctgcagcaacatcaacatgagctctgcaacctccaagcaactgatctatttgaactgcagctgtgtgaccgggggatccgcttcagcaaagacaggatcgtgccctgtcccctgtgcccacttcctgctcccggccatcttcctcatctccttcgtgtccctgatagcctgcatctcccacaaccccctctacatgatggttctgcgtgtggtgaaccaggaggaaaagtcatttgccatcggggtgcagttcttgttgatgcgcttgctggcctggctgccatctccagccctctatggcctcaccattgaccactcctgcatccggtggaactcgctgtgcttggggaggcgaggggcctgcgcctactatgacaacgatgctctccgagacaggtacctgggcctgcagatgggctacaaggcgctgggcatgctgctgctttgcttcatcagctggagggtgaagaagaacaaggagtacaacgtgcagaaggcggcaggcctcatctgaccccaccctgggccactgccctgctccagagagtggaccttgactcttccacacctgcctatactcactaatgttaacacgtcatttcctttttgtattttt

SEQ ID NO: 158023 - DNA, 1932 bp, Artificial Sequence
  derived and/or modified sequence
atgggcctgctgcccaagctgggcgccagccagggcagcgacaccagcaccagcagagccggcagatgcgccagaagcgtgttcggcaacatcaaggtgttcgtgctgtgccagggcctgctgcagctgtgccagctgctgtacagcgcctacttcaagagcagcctgaccaccatcgagaagagattcggcctgagcagcagcagcagcggcctgatcagcagcctgaacgagatcagcaacgccatcctgatcatcttcgtgagctacttcggcagcagagtgcacagacccagactgatcggcatcggcggcctgttcctggccgccggcgccttcatcctgaccctgccccacttcctgagcgagccctaccagtacaccctggccagcaccggcaacaacagcagactgcaggccgagctgtgccagaagcactggcaggacctgccccccagcaagtgccacagcaccacccagaacccccagaaggagaccagcagcatgtggggcctgatggtggtggcccagctgctggccggcatcggcaccgtgcccatccagcccttcggcatcagctacgtggacgacttcagcgagcccagcaacagccccctgtacatcagcatcctgttcgccatcagcgtgttcggccccgccttcggctacctgctgggcagcgtgatgctgcagatcttcgtggactacggcagagtgaacaccgccgccgtgaacctggtgcccggcgaccccagatggatcggcgcctggtggctgggcctgctgatcagcagcgccctgctggtgctgaccagcttccccttcttcttcttccccagagccatgcccatcggcgccaagagagcccccgccaccgccgacgaggccagaaagctggaggaggccaagagcagaggcagcctggtggacttcatcaagagattcccctgcatcttcctgagactgctgatgaacagcctgttcgtgctggtggtgctggcccagtgcaccttcagcagcgtgatcgccggcctgagcaccttcctgaacaagttcctggagaagcagtacggcaccagcgccgcctacgccaacttcctgatcggcgccgtgaacctgcccgccgccgccctgggcatgctgttcggcggcatcctgatgaagagattcgtgttcagcctgcaggccatccccagaatcgccaccaccatcatcaccatcagcatgatcctgtgcgtgcccctgttcttcatgggctgcagcacccccaccgtggccgaggtgtacccccccagcaccagcagcagcatccacccccagagccccgcctgcagaagagactgcagctgccccgacagcatcttccaccccgtgtgcggcgacaacggcatcgagtacctgagcccctgccacgccggctgcagcaacatcaacatgagcagcgccaccagcaagcagctgatctacctgaactgcagctgcgtgaccggcggcagcgccagcgccaagaccggcagctgccccgtgccctgcgcccacttcctgctgcccgccatcttcctgatcagcttcgtgagcctgatcgcctgcatcagccacaaccccctgtacatgatggtgctgagagtggtgaaccaggaggagaagagcttcgccatcggcgtgcagttcctgctgatgagactgctggcctggctgcccagccccgccctgtacggcctgaccatcgaccacagctgcatcagatggaacagcctgtgcctgggcagaagaggcgcctgcgcctactacgacaacgacgccctgagagacagatacctgggcctgcagatgggctacaaggccctgggcatgctgctgctgtgcttcatcagctggagagtgaagaagaacaaggagtacaacgtgcagaaggccgccggcctgatctag

SEQ ID NO: 158024 - DNA, 1932 bp, Artificial Sequence
  derived and/or modified sequence
atggggctgctcccaaaactgggggcttcccagggcagcgacacaagcaccagtcgtgctgggcgctgcgcaaggtctgtgttcggaaacattaaagtgtttgtcctgtgtcagggccttctccagctctgtcagctgctttatagtgcttactttaagtcttcattgacaacgatcgaaaaacgattcggcctgtcctcatcttcatccggtctgatcagtagcttgaacgaaatttctaacgctatactgataatatttgtgagttattttgggtctcgcgtccataggccacgactgatcggaatagggggcttatttctggccgcaggagctttcatcctgactctgccacactttttgagcgaaccatatcagtatactctggctagtactggcaataattcccgactgcaagccgagctatgccagaagcattggcaggacctccctccctctaaatgccacagcactacgcagaatccccagaaggaaacttctagtatgtgggggcttatggtggtggcacaactactggcagggatcggtacggtccccattcagcctttcggcatctcgtacgtggatgactttagcgagccctctaacagtcctctgtatatatctattctgtttgcaatcagtgttttcggccctgcattcggctatctgctaggatccgtgatgctccaaatttttgtggactatggacgggtgaatacagccgctgtgaacctggtccccggggacccccgatggattggagcgtggtggctgggtctgcttatttctagcgccctgcttgtattaacaagttttccattcttcttctttcctcgcgctatgcctatcggcgcaaagcgggctcctgctactgccgacgaagccagaaagctcgaagaggcaaaaagccgcggatctttggtggacttcattaaacgcttcccctgcatctttctgaggttgttaatgaactctctgttcgttttggtagtgttggcgcaatgtactttttcgagtgttattgccggtctgtcgacatttctaaataagttcttggagaagcagtacggcacctcagctgcctacgccaatttcctaataggggctgtgaacttacctgctgcggctctgggcatgctatttgggggcatactgatgaagcggtttgtgttcagcctgcaggccatccctcgtattgccactactataatcaccatttccatgattctatgtgtgccattgtttttcatgggctgctctactcctactgtagccgaagtgtatcccccatccaccagcagctccatccatccacagagtccagcttgtcgccgcgactgcagttgtccagattccattttccaccccgtctgtggggataacggcattgagtacctgtcgccctgtcatgctggatgctctaatattaacatgtcatcggctacctcaaagcagctcatctacctgaactgttcttgtgtcaccggcggctcagcttcagccaagaccgggtcgtgtcctgtgccttgcgcgcacttcctcctcccggccatctttttgatctcatttgtcagcttgattgcgtgtatctcccacaacccgctgtatatgatggtcctccgagtcgtgaaccaggaagagaagtcttttgcgattggggtgcaattccttctgatgagattacttgcctggctgccatcaccggccctgtacggcctgactattgaccactcttgtatcagatggaactccctgtgtctgggacgccgaggcgcctgtgcctactatgacaatgatgcacttcgggacaggtacctgggccttcaaatgggctacaaggcattgggaatgctactgctttgcttcattagttggcgtgtgaagaagaataaggaatacaacgtccagaaagccgcagggctgatttag

SEQ ID NO: 158025 - DNA, 1932 bp, Artificial Sequence
  derived and/or modified sequence
atgggcctgctgcccaagctgggcgccagccagggcagtgacaccagcaccagccgggccggccgctgtgcccggtctgtgtttggaaacatcaaggtgtttgtgctgtgccagggcctgctgcagctgtgccagctgctgtacagcgcctacttcaagagcagcctgaccaccatcgagaagagatttggcctgagcagcagcagcagcggcctcatcagcagcctgaatgagatcagcaatgccatcctgatcatctttgtgtcctacttcggcagccgggtgcaccggccccggctgattggaattggaggcctcttcctggccgccggggccttcatcctgaccctgccccacttcctgtctgagccctaccagtacaccctggccagcacaggcaacaacagccggctgcaggccgagctgtgccagaagcactggcaggacctgccccccagcaagtgccacagcaccacccagaacccccagaaggagaccagctccatgtggggcctgatggtggtggcccagctgctggccggcatcggcaccgtgcccatccagcccttcggcatctcctatgtggatgacttcagcgagcccagcaacagccccctgtacatcagcatcctgtttgccatctctgtgtttggacctgccttcggctacctgctgggctctgtgatgctgcagatctttgtggactatggccgggtgaacacagctgctgtgaacctggtgcctggggacccccgctggattggagcctggtggctgggcctgctgatcagcagcgccctgctggtgctgaccagcttccccttcttcttcttcccccgggccatgcccatcggggccaagagggccccagccacagcagatgaggccaggaagctggaggaggccaagagccggggcagcctggtggacttcatcaagcgcttcccctgcatcttcctgcggctgctgatgaacagcctgtttgtgctggtggtgctggcccagtgcaccttcagctctgtgattgctggcctgagcaccttcctgaacaagttcctggagaagcagtatggcaccagcgctgcctatgccaacttcctgattggagctgtgaacctgcctgctgctgccctgggcatgctgtttggaggcatcctgatgaagagatttgtgttcagcctgcaggccatcccccgcatcgccaccaccatcatcaccatctccatgatcctgtgtgtgcccctcttcttcatgggctgcagcacccccaccgtggccgaggtgtacccacccagcaccagcagcagcatccacccccagagccctgcctgcagaagagactgcagctgcccagacagcatcttccaccctgtgtgtggggacaatggcatcgagtacctgagcccctgccacgccggctgcagcaacatcaacatgagcagcgccaccagcaagcagctgatctacctgaactgcagctgtgtgactggaggcagcgccagcgccaagacaggcagctgccctgtgccctgtgcccacttcctgctgcctgccatcttcctgatcagctttgtgtccctcatcgcctgcatcagccacaaccccctgtacatgatggtgctgcgggtggtgaaccaggaggagaagagctttgccatcggcgtgcagttcctgctgatgaggctgctggcctggctgcccagccctgccctgtatggcctgaccatcgaccacagctgcatccgctggaacagcctgtgcctgggccggcggggggcctgtgcctactatgacaatgatgccctgcgggaccgctacctgggcctgcagatgggctacaaggccctgggcatgctgctgctgtgcttcatctcctggagggtgaagaagaacaaggagtacaacgtgcagaaggccgccggcctcatctag

SEQ ID NO: 158026 - DNA, 1932 bp, Artificial Sequence
  derived and/or modified sequence
atgggcctgctgcccaagctgggcgccagccagggcagcgacacctccactagccgggccggtcggtgtgcccgcagcgtgtttgggaacatcaaagtgtttgtgctgtgccagggtctgctgcagctgtgtcagttactttatagcgcctattttaagtcctctctgacaaccatagaaaaaaggtttggcctcagcagtagttccagtggcttaatctcctcactgaacgaaatttctaacgcaatactcatcatctttgtttcttacttcggctcgagagtgcatcgaccgagattgattggaatcggagggttgttcctggcagctggtgcattcattctgacgctgccacatttcctcagtgaaccgtatcagtacaccttagcttctacggggaataactccaggttgcaggccgagctgtgtcaaaaacattggcaggacttaccccctagcaagtgccattctacaacccagaatccacaaaaggaaacctcgagcatgtgggggttgatggtagtggcgcaactcctcgccgggattggtaccgtgcctatacaaccgtttggcatttcctatgtcgatgacttttctgaaccatccaattcacccctctacatctctatcttattcgcaatcagtgtctttgggccagccttcggttacctcctagggtctgtgatgctgcagatctttgtggactacggacgagttaacacagctgcggtcaacctcgtcccaggcgatccaagatggattggcgcctggtggctgggccttctgatatcctctgccctcctggtcttgacttccttccccttttttttcttcccccgcgctatgcctatcggggcaaaacgagcccctgcaaccgccgatgaggccaggaaactggaggaggctaagagccgcgggtcccttgtggattttattaagcgctttccttgcatctttctacgccttctaatgaattcactattcgtcctcgtggtccttgctcaatgcacgttttcatctgtgatagcgggattgtcgacctttcttaacaaatttctggagaagcagtacggtaccagcgcagcatacgcaaactttctgattggcgctgttaatctgcctgctgcagccctgggcatgctgttcggcggaattctgatgaaaagatttgtcttctccttgcaggcaattccacgaatagccaccaccattataacgatctcgatgattctttgcgtgccactgttttttatgggctgctctactcctacagtggcagaagtctacccgccgtccacctcctcatctatacatcctcagtctccggcttgtcggcgggactgctcctgccccgatagtatcttccaccctgtgtgtggggataacgggatcgagtatctcagtccatgtcacgccggttgctccaatatcaatatgagttccgccacttctaagcagctgatctacctcaattgtagttgcgttaccggaggcagcgccagcgccaagaccggctcttgcccagtcccatgcgcccatttcctgctgcctgccatcttcttaatctccttcgtaagcctgattgcatgcatcagccataacccgctgtatatgatggtccttagagtggttaaccaagaagagaaaagcttcgcaataggagtgcaattccttctcatgcgactgctggcctggttgcccagtcctgcactatacggactgactatcgaccactcctgcatcaggtggaactctctatgcctggggagaaggggcgcgtgtgcttattacgataacgacgcgctgcgcgaccgttatctgggcctccagatggggtataaggcgctgggcatgctcttgctgtgctttatatcttggcgagtgaagaaaaacaaagaatataacgtccagaaggccgccggcctgatttag

SEQ ID NO: 158027 - DNA, 1932 bp, Artificial Sequence
  derived and/or modified sequence
atgggtctcctgccaaagctgggcgctagccagggatctgacacatcaaccagcagggctggtagatgcgccagaagcgttttcggaaatataaaggtatttgtgttgtgccagggcttgctgcagctctgccagctgctgtatagtgcctacttcaaaagcagtctgacaaccattgagaagagattcggcctcagtagttcctccagcggcctgatatcctcgctgaatgagatttcaaacgccatcttgatcatctttgtctcctattttggatctcgagtacatcgaccacgcctaattggcatcggcggtctattcttggccgctggcgctttcatcctgacacttcctcattttctgtctgagccctatcagtacaccctcgcttccaccgggaataacagcagactgcaagccgagctatgccagaaacattggcaggatctgcctccaagcaagtgtcatagcacaacccagaatcctcaaaaggagacctcttcgatgtggggcttaatggtggtcgctcagctgttagcaggcattggcacagtaccgattcagccgttcggaatcagctacgtagatgatttttctgaaccatccaactctccgctgtacatctccattctttttgcgatatcagtattcggtcccgctttcggatacctgcttggctcagttatgcttcagatattcgtggattatggcagggtcaacactgccgctgtgaatctcgtgcctggagatccaaggtggattggcgcttggtggcttggcctgttgatctcaagcgctttactggtgttaacatccttccctttcttttttttcccaagggccatgccaatcggggcaaagcgtgcaccggcaacagcagatgaagctagaaaactggaagaggcgaagtctagaggttctctggtggattttatcaaacgattcccatgtatcttcttgagactgcttatgaactcgcttttcgtgcttgtcgtgctggcccagtgcaccttctcatctgtgattgcgggactctcaacatttctgaataaattcctagagaagcagtatgggacttcagcagcctacgcaaactttcttattggagccgtcaacctcccagcggctgcactgggtatgctttttggagggatcctcatgaagcgctttgtattcagcctacaggctatcccccgaatagcgactaccatcataactatctctatgatcctgtgcgtgcctttgttcttcatggggtgctccacacccacagttgcggaggtgtatcctccatctaccagctcatctattcacccgcagagtcctgcatgtaggcgtgactgcagttgtcccgatagcattttccaccccgtgtgtggagataacggcattgaatatctttctccctgccatgccggttgctctaacatcaatatgtcttctgctacctccaaacagcttatctatctcaattgttcctgcgtgacaggaggctcggccagcgctaagacaggttcctgccccgttccttgtgcgcactttttgctccccgctatcttcctgatctcattcgtgagtttaatagcttgcatcagccacaaccctctgtatatgatggtcttgcgggtggtaaaccaagaggaaaaatccttcgccatcggagtgcaatttctgctcatgcgccttctggcctggttgccctctcccgctctgtacggccttacaatcgaccattcttgtattaggtggaattctctgtgcttgggcagaagaggcgcatgcgcctattacgataacgatgccctcagagaccgctatctcggcctgcagatggggtataaagcattaggtatgcttctgctgtgttttatctcatggagagttaagaaaaacaaagagtataatgttcaaaaagcagcagggctgatctag

SEQ ID NO: 158028 - DNA, 4223 bp, Artificial Sequence
  derived and/or modified sequence
acacctgtctgagggggcggcggcggcggcggcggcggggcgggggctcgtagcgcctttgacacccgaggaaaagagggaggagggagagcgcgtttcatcatcggcggcggccacttataaaaacttctaggcgcgcactcgctggctcagtctccgctccgcgaatctcctccggccactgccgccgcggtcgcctctcacccgcccggccgctccagcccgaggcgccccgaccccgcgccactccgcgcccggccagccgcccgcagccatggggctcctgcccaagctcggcgcgtcccagggcagcgacacctctactagccgagccggccgctgtgcccgctcggtcttcggcaacattaaggtgtttgtgctctgccaaggcctcctgcagctctgccaactcctgtacagcgcctacttcaagagcagcctcaccaccattgagaagcgctttgggctctccagttcttcatcgggtctcatttccagcttgaatgagatcagcaatgccatcctcatcatctttgtcagctactttggcagccgggtgcaccgtccacgtctgattggcatcggaggtctcttcctggctgcaggtgccttcatcctcaccctcccacacttcctctccgagccctaccagtacaccttggccagcactgggaacaacagccgcttgcaggccgagctctgccagaagcattggcaggacctgcctcccagtaagtgccacagcaccacccagaacccccagaaggagaccagcagcatgtggggcctgatggtggttgcccagctgctggctggcatcgggacagtgcctattcagccatttgggatctcctatgtggatgacttctcagagcccagcaactcgcccctgtacatctccatcttatttgccatctctgtatttggaccggctttcgggtacctgctgggctctgtcatgctgcagatctttgtggactatggcagggtcaacacagctgcagttaacttggtcccgggtgacccccgatggattggagcctggtggctaggcctgctcatttcttcagctttattggttctcacctctttccccttttttttcttccctcgagcaatgcccataggagcaaagagggctcctgccacagcagatgaagcaaggaagttggaggaggccaagtcaagaggctccctggtggatttcattaaacggtttccatgcatctttctgaggctcctgatgaactcactcttcgtcctggtggtcctggcccagtgcaccttctcctccgtcattgctggcctctccaccttcctcaacaagttcctggagaagcagtatggcacctcagcagcctatgccaacttcctcattggtgctgtgaacctccctgctgcagccttggggatgctgtttggaggaatcctcatgaagcgctttgttttctctctacaagccattccccgcatagctaccaccatcatcaccatctccatgatcctttgtgttcctttgttcttcatgggatgctccaccccaactgtggccgaagtctacccccctagcacatcaagttctatacatccgcagtctcctgcctgccgcagggactgctcgtgcccagattctatcttccacccggtctgtggagacaatggaatcgagtacctctccccttgccatgccggctgcagcaacatcaacatgagctctgcaacctccaagcaactgatctatttgaactgcagctgtgtgaccgggggatccgcttcagcaaagacaggatcgtgccctgtcccctgtgcccacttcctgctcccggccatcttcctcatctccttcgtgtccctgatagcctgcatctcccacaaccccctctacatgatggttctgcgtgtggtgaaccaggaggaaaagtcatttgccatcggggtgcagttcttgttgatgcgcttgctggcctggctgccatctccagccctctatggcctcaccattgaccactcctgcatccggtggaactcgctgtgcttggggaggcgaggggcctgcgcctactatgacaacgatgctctccgagacaggtacctgggcctgcagatgggctacaaggcgctgggcatgctgctgctttgcttcatcagctggagggtgaagaagaacaaggagtacaacgtgcagaaggcggcaggcctcatctgaccccaccctgggccactgccctgctccagagagtggaccttgactcttccacacctgcctatactcactaatgttaacacgtcatttcctttttgtatttttaaacaagaaagaaaaccccagtcctcatttgccttccctacctcttcctcccagagtcctccccacagttcctaagggccactgtgtacccgggctgtgtgggccagaactggggggctgagtcttccctggccccttggaagaggcccccagatgcccaggctcacttcagtgttgagtcctccattgaggatgcccactgaggcagccaggcccctcaccagccctggggggaatcctaaacagagagagaaaaagggtatctgcccttcttgccaggcagctccactctcccgctgactgcccacaccctgcagagtggcaggggtgaaaggaagaaggaagtggctgagttattaatagccagagccactgggagactggggagactggctgtaacccccttcacacctgggtttggcatcagcacagactacgggaggggctggctccctccccctcagaccctcacttcctgtacctagaggccattctggatgctgccatgttgggaagtacagtctctgcccattacctgcatgcaggcaccagagcagggactgagaaaccccaaggatgggtcatctaagtgctgtccatatgaaccctggactttctgtccttagatcctcacatgttatccctgtctttctggggtacgtttcaaactgaggaagctacaacacagtgaagacccaaggaaggcctatgaaaaggtcctgatgcccaacctcccaccccttcaatgtggggacgagaccccctcatctcagagtaatgggaagaacctcccacatctccctggcagcagatgaggtggcttcacatgcacttccctgtctggacttcagcccgtattccgaggagtagagaggcagaagagatgtcagcaaagcaagtgatgaagcagagtggatgtccactgtcaccaagctggatggcaagctgcggcccacaaaacagccagtcaggttggctttcctggtttcagacatgctcataccattcccattttctcagcctcttctcactgcctccagagaggtgggtgcctgggttgagagacacagctgctacgtgatagatgttgagagacagaagccaacgaaggaggtcattcatcaacaaatatatttattggagaccgactttgtgcaaagcaatgctaatcagggttctccatggagcttccctcagctcttacctcacctccctccatttacattagggccttctcccagggtgtgctcggtgggcagtgtgggactgggggtgtgggagttggtgagagcaggaggagaggtggggacagcaagaagccacagattggcatgaaggatcctgacctgactatccatgccatccatggcccccagactgactctgcacctggccctttgccagacagctctgtctccccatgtcctctggaacagctgggcatgggtcatggccattcatgacccttaagtgccacccttcttggaagaccccctccagaagcatactggaagccacctctggaaaagcctcatatggtgatatgccaaaatatttatgtcaatgtccaaacaaagtccaatgccatgagactgaagtctttgtggaaaccactgttacagacaagcttatttccaaagccacctcatttccaaacatctcactcaggaagggaggctcaatgtaacctcaggggccagttttagcatttgaaatggttctgcttggaaaatgatgccctgcaactaaccctggtctttcccatggcaatttaaccacatttggaaggcactgccttcagctgagtttatgaacaatgaatgccaaccttcaggttctagaagattggttgcactcccaaacctttattctattatattactattaaaatattctaattttgctattgaggtaa

SEQ ID NO: 158029 - protein, 787 aa, Artificial Sequence
  derived and/or modified sequence
MAAARPARGPELPLLGLLLLLLLGDPGRGAASSGNATGPGPRSAGGSARRSAAVTGPPPPLSHCGRAAPCEPLRYNVCLGSVLPYGATSTLLAGDSDSQEEAHGKLVLWSGLRNAPRCWAVIQPLLCAVYMPKCENDRVELPSRTLCQATRGPCAIVERERGWPDFLRCTPDRFPEGCTNEVQNIKFNSSGQCEVPLVRTDNPKSWYEDVEGCGIQCQNPLFTEAEHQDMHSYIAAFGAVTGLCTLFTLATFVADWRNSNRYPAVILFYVNACFFVGSIGWLAQFMDGARREIVCRADGTMRLGEPTSNETLSCVIIFVIVYYALMAGVVWFVVLTYAWHTSFKALGTTYQPLSGKTSYFHLLTWSLPFVLTVAILAVAQVDGDSVSGICFVGYKNYRYRAGFVLAPIGLVLIVGGYFLIRGVMTLFSIKSNHPGLLSEKAASKINETMLRLGIFGFLAFGFVLITFSCHFYDFFNQAEWERSFRDYVLCQANVTIGLPTKQPIPDCEIKNRPSLLVEKINLFAMFGTGIAMSTWVWTKATLLIWRRTWCRLTGQSDDEPKRIKKSKMIAKAFSKRHELLQNPGQELSFSMHTVSHDGPVAGLAFDLNEPSADVSSAWAQHVTKMVARRGAILPQDISVTPVATPVPPEEQANLWLVEAEISPELQKRLGRKKKRRKRKKEVCPLAPPPELHPPAPAPSTIPRLPQLPRQKCLVAAGAWGAGDSCRQGAWTLVSNPFCPEPSPPQDPFLPSAPAPVAWAHGRRQGLGPIHSRTNLMDTELMDADSDF

SEQ ID NO: 158030 - DNA, 2364 bp, Artificial Sequence
  derived and/or modified sequence
atggccgccgccagacccgccagaggccccgagctgcccctgctgggcctgctgctgctgctgctgctgggcgaccccggcagaggcgccgccagcagcggcaacgccaccggccccggccccagaagcgccggcggcagcgccagaagaagcgccgccgtgaccggcccccccccccccctgagccactgcggcagagccgccccctgcgagcccctgagatacaacgtgtgcctgggcagcgtgctgccctacggcgccaccagcaccctgctggccggcgacagcgacagccaggaggaggcccacggcaagctggtgctgtggagcggcctgagaaacgcccccagatgctgggccgtgatccagcccctgctgtgcgccgtgtacatgcccaagtgcgagaacgacagagtggagctgcccagcagaaccctgtgccaggccaccagaggcccctgcgccatcgtggagagagagagaggctggcccgacttcctgagatgcacccccgacagattccccgagggctgcaccaacgaggtgcagaacatcaagttcaacagcagcggccagtgcgaggtgcccctggtgagaaccgacaaccccaagagctggtacgaggacgtggagggctgcggcatccagtgccagaaccccctgttcaccgaggccgagcaccaggacatgcacagctacatcgccgccttcggcgccgtgaccggcctgtgcaccctgttcaccctggccaccttcgtggccgactggagaaacagcaacagataccccgccgtgatcctgttctacgtgaacgcctgcttcttcgtgggcagcatcggctggctggcccagttcatggacggcgccagaagagagatcgtgtgcagagccgacggcaccatgagactgggcgagcccaccagcaacgagaccctgagctgcgtgatcatcttcgtgatcgtgtactacgccctgatggccggcgtggtgtggttcgtggtgctgacctacgcctggcacaccagcttcaaggccctgggcaccacctaccagcccctgagcggcaagaccagctacttccacctgctgacctggagcctgcccttcgtgctgaccgtggccatcctggccgtggcccaggtggacggcgacagcgtgagcggcatctgcttcgtgggctacaagaactacagatacagagccggcttcgtgctggcccccatcggcctggtgctgatcgtgggcggctacttcctgatcagaggcgtgatgaccctgttcagcatcaagagcaaccaccccggcctgctgagcgagaaggccgccagcaagatcaacgagaccatgctgagactgggcatcttcggcttcctggccttcggcttcgtgctgatcaccttcagctgccacttctacgacttcttcaaccaggccgagtgggagagaagcttcagagactacgtgctgtgccaggccaacgtgaccatcggcctgcccaccaagcagcccatccccgactgcgagatcaagaacagacccagcctgctggtggagaagatcaacctgttcgccatgttcggcaccggcatcgccatgagcacctgggtgtggaccaaggccaccctgctgatctggagaagaacctggtgcagactgaccggccagagcgacgacgagcccaagagaatcaagaagagcaagatgatcgccaaggccttcagcaagagacacgagctgctgcagaaccccggccaggagctgagcttcagcatgcacaccgtgagccacgacggccccgtggccggcctggccttcgacctgaacgagcccagcgccgacgtgagcagcgcctgggcccagcacgtgaccaagatggtggccagaagaggcgccatcctgccccaggacatcagcgtgacccccgtggccacccccgtgccccccgaggagcaggccaacctgtggctggtggaggccgagatcagccccgagctgcagaagagactgggcagaaagaagaagagaagaaagagaaagaaggaggtgtgccccctggcccccccccccgagctgcacccccccgcccccgcccccagcaccatccccagactgccccagctgcccagacagaagtgcctggtggccgccggcgcctggggcgccggcgacagctgcagacagggcgcctggaccctggtgagcaaccccttctgccccgagcccagccccccccaggaccccttcctgcccagcgcccccgcccccgtggcctgggcccacggcagaagacagggcctgggccccatccacagcagaaccaacctgatggacaccgagctgatggacgccgacagcgacttctag

SEQ ID NO: 158031 - DNA, 2364 bp, Artificial Sequence
  derived and/or modified sequence
atggcagcggctcggccagcaaggggccctgagctgccactgctgggtctgctcctgctcctattgcttggtgatcctggaagaggagcagcctccagcggtaacgccacaggtcctggacccagatccgcagggggatctgccagacgctctgcggccgtgacagggccccctccaccccttagccactgcgggagagctgccccatgtgagccactgaggtacaacgtctgtcttgggagtgttctgccctatggggccacaagtactctccttgccggtgattccgactcacaggaggaggcacatggtaaactggtgttatggagcggtctccgaaatgccccaagatgttgggccgttatccaaccactgctgtgcgccgtttacatgccgaaatgtgaaaacgatcgcgtcgagctgcccagtcgcacactttgtcaggcgacaagaggcccatgcgcgatcgtggaacgggaaagaggctggcctgatttccttagatgtacgcccgacaggttcccggagggatgcactaatgaagtgcagaacatcaagttcaatagctccgggcagtgcgaagttcccctcgtccggacagataatccgaagtcctggtatgaggacgtcgagggatgcgggattcagtgccagaacccactctttacagaggccgagcaccaggatatgcatagctacatcgcagcatttggggccgtgaccggcctgtgcaccctattcactttggccacttttgtcgccgactggcgaaactcaaaccgctatccagctgtgatcttgttctacgttaatgcctgcttctttgttggcagcatagggtggctggctcagttcatggatggggcacgccgagagatagtctgtagggcggatggcaccatgcgactgggtgaacccacatccaatgagactctgagttgcgtcataatcttcgtcatcgtatactacgccctgatggccggtgtagtgtggtttgtggtgctgacatatgcctggcacactagcttcaaggcgttgggaaccacctaccagccacttagtggaaaaacttcctattttcacctgttgacctggagtctcccgtttgtgcttaccgtggctattcttgctgtcgcccaggtcgacggcgattctgtctcgggcatttgtttcgtgggctacaagaactacaggtatcgggctggatttgtcctggcccctataggcctcgtccttattgtgggagggtacttcctgatccgcggtgtgatgacgctcttttccatcaaatcaaaccatcccggactgctctccgagaaagccgcttccaagattaacgagaccatgctaagactggggatcttcggctttttagcgttcgggttcgtactgattacattcagctgccacttctatgacttcttcaaccaggctgagtgggagcggtctttcagggattatgtgctttgccaggccaatgtgactataggcttgccaacgaaacagccgattcccgattgcgagattaaaaacagaccttccttgctggttgaaaagataaacctgttcgcaatgtttggaacgggtatcgctatgtcaacctgggtgtggaccaaggcgacactcttgatctggcgacgaacttggtgtagactgacaggccagtctgacgacgaacctaagagaataaaaaagtccaaaatgatcgccaaagccttctccaagcgacacgaactgctgcagaatcctggccaggagctgagcttttccatgcacaccgtatcgcacgacgggccagtggccggtctcgcattcgaccttaacgagccaagtgccgacgtttctagtgcatgggcacagcacgtgacgaaaatggtggcccgaagaggcgctatattgccccaggatattagtgtgaccccagtcgctacgccagtcccccccgaggagcaggctaacctttggctcgtagaggccgagattagccctgaacttcagaagcggctaggcaggaagaagaagaggcgtaaacggaagaaggaagtgtgcccattagccccccccccagaattgcatcctcctgcgcccgcgcctagtaccatccctagactgcctcagctgccacgacagaaatgcttggtggcagcaggggcctggggcgccggggatagttgcaggcagggggcctggactctcgtgtcaaacccattttgtccagagccttccccgcctcaggatccgtttctgccctcggccccggcccctgtcgcctgggctcatgggcgccgtcagggcctgggccccatccacagccggacaaatctcatggatacggaactgatggacgcagacagtgatttttag

SEQ ID NO: 158032 - DNA, 2364 bp, Artificial Sequence
  derived and/or modified sequence
atggctgctgcccggcctgcccggggccctgagctgcccctgctgggcctgctgctgctgctgctgctgggggaccccggccgcggggccgccagcagtggaaatgccactggacctggccccaggtctgctgggggcagcgccaggagatctgctgctgtgactggacctcctccacccctgagccactgcggccgggccgccccctgtgagcccctgcgctacaacgtgtgcctgggctctgtgctgccctatggagccaccagcaccctgctggccggggacagcgacagccaggaggaggcccacggcaagctggtgctgtggagcggcctgagaaatgccccccgctgctgggccgtcatccagcccctgctgtgtgctgtgtacatgcccaagtgtgaaaatgacagagtggagctgcccagcaggaccctgtgccaggccacccggggcccctgtgccatcgtggagcgggagcggggctggccagacttcctgcgctgcaccccagaccgcttccctgagggctgcaccaatgaggtgcagaacatcaagttcaacagcagcggccagtgtgaggtgcccctggtgaggacagacaaccccaagtcctggtatgaagatgtggagggctgcggcatccagtgccagaaccccctcttcacagaagctgagcaccaggacatgcacagctacatcgccgcctttggagctgtgacaggcctgtgcaccctcttcaccctggccacctttgtggccgactggaggaacagcaaccgctacccagctgtgatcctcttctacgtgaatgcctgcttctttgtgggcagcatcggctggctggcccagttcatggatggagcccggcgggagatcgtgtgcagagcagatggcaccatgaggctgggggagcccaccagcaatgagaccctgagctgtgtgatcatcttcgtcatcgtgtactatgccctgatggccggcgtggtgtggtttgtggtgctgacctacgcctggcacaccagcttcaaggccctgggcaccacctaccagcccctgagcggcaagaccagctacttccacctgctgacctggagcctgccctttgtgctgactgtggccatcctggccgtggcccaggtggatggagacagcgtgtctggcatctgctttgtgggctacaagaactaccgctacagagctggctttgtgctggcccccatcggcctggtgctgattgtgggcggctacttcctgatccggggcgtgatgaccctcttcagcatcaagagcaaccaccctggcctgctgtctgagaaggccgccagcaagatcaatgagaccatgctgcggctgggcatcttcggcttcctggccttcggctttgtgctgatcaccttcagctgccacttctatgacttcttcaaccaggccgagtgggagaggagcttccgggactatgtgctgtgccaggccaacgtgaccatcggcctgcccaccaagcagcccatcccagactgtgagatcaagaaccggcccagcctgctggtggagaagatcaacctgtttgccatgtttggcaccggcatcgccatgagcacctgggtgtggaccaaggccaccctgctgatctggaggaggacctggtgccgcctgaccggccagagtgatgatgagcccaagaggatcaagaagagcaagatgattgccaaggccttcagcaagagacatgagctgctgcagaaccctggccaggagctgtccttctccatgcacacagtgtcccatgatggccctgtggccggcctggcctttgacctgaatgagcccagcgcagatgtgagcagcgcctgggcccagcacgtgaccaagatggtggcccggcggggggccatcctgccccaggacatctctgtgacccctgtggccacccctgtgcccccagaggagcaggccaacctgtggctggtggaggccgagatcagccctgagctgcagaagaggctgggcaggaagaagaagaggaggaagaggaagaaggaggtgtgccccctggcccctcctcctgagctgcaccccccagccccagcccccagcaccatcccccggctgccccagctgccccggcagaagtgcctggtggccgccggggcctggggcgctggggacagctgccggcagggcgcctggaccctggtgagcaaccccttctgcccagagcccagccccccccaggaccccttcctgcccagcgccccagcccctgtggcctgggcccacggccggcggcagggcctgggccccatccacagcaggaccaacctgatggacacagagctgatggatgctgacagcgacttctag

SEQ ID NO: 158033 - DNA, 2364 bp, Artificial Sequence
  derived and/or modified sequence
atggccgccgcccggcccgcccggggccccgagctgcccctgctgggtttacttctcttactcctgttaggagacccaggcaggggggcagcctcatccgggaatgccacaggtccaggaccaaggtcagccggtggctctgcaaggagatctgccgctgtaacgggccccccccctcctctctctcattgtggccgggctgccccttgcgagcccttacgatacaatgtctgcctggggtctgttttgccttacggagccacatccactttactggccggagacagtgacagtcaggaggaggcacacggcaaactggttctgtggtccggacttagaaatgcccccagatgttgggccgttatacaaccactgttatgcgcagtctatatgccgaagtgcgagaacgatagagtcgaacttcctagcagaacactctgtcaagctacccgaggaccatgtgccatcgtggagcgcgagcggggctggccagacttcttaaggtgtaccccggaccggtttccggagggttgtacgaatgaggtgcaaaatattaagttcaattcctctgggcagtgcgaagtgccactagtgagaaccgacaaccccaagagttggtatgaggatgtggagggttgcgggattcagtgccagaatcccttgttcacggaagcagagcaccaagatatgcacagttacatcgccgcctttggagccgtaaccggcttatgcacgctgttcacactggccactttcgtggctgattggaggaactcgaacagataccctgcagtgatcttgttctacgtgaacgcgtgtttcttcgtgggcagtatcggctggctggcccagttcatggacggtgccagacgcgaaattgtctgccgtgctgatgggaccatgcgcctgggcgagcctacgtccaacgagacgctgtcttgtgtgatcattttcgtgatcgtgtactacgccctcatggccggtgtggtgtggttcgtggtcctgacgtatgcctggcatacctcctttaaggctctggggacaacataccagcctcttagtgggaagactagttactttcacttactgacctggagcctcccatttgtgttgaccgtcgcgattctggctgtggcccaggtcgacggggactccgtttctggcatctgcttcgtcggatataagaactacagatacagggctggcttcgtgcttgcccctatcgggctggtactgatcgtgggagggtacttcctgattcgtggagtaatgactcttttttccattaagtccaaccatcctgggttattatctgagaaagcagctagcaaaattaatgagaccatgctgcgactaggtatttttggtttcctggcctttggtttcgtactgatcactttttcctgtcacttttacgatttttttaaccaagccgaatgggagaggtctttcagagattacgtgctgtgtcaggccaacgtcaccatcggtctccccactaaacagcccatacctgattgtgaaataaagaatcgaccctctctcctggtggaaaagatcaatttattcgccatgtttgggaccggaatagccatgagcacctgggtatggactaaggctacattgctgatctggaggaggacctggtgcaggctgacagggcagagtgatgatgagcccaagaggattaagaagtctaaaatgatcgcgaaagcctttagcaagcgccacgagcttttacaaaatcccggccaagagctaagttttagcatgcatactgtaagtcatgatggacctgtggcaggtcttgcctttgatttaaacgagccgtcggccgacgtctccagcgcttgggctcagcacgtgactaagatggtcgccaggcgtggtgccatcctaccccaagacattagtgtgaccccggtagctactcccgtgcctcctgaagagcaggccaatctttggctggttgaggccgaaatctcgcccgaactgcagaagcgtctcggaaggaagaagaagagacgaaagcgaaaaaaagaggtctgtcccttggccccaccccctgaattacacccccctgctcccgcgccgagtacaatcccgcgccttccacagctgcccaggcaaaagtgtctcgtcgccgccggcgcctggggcgccggcgattcctgccgccaaggcgcctggaccttagtgagcaacccgttttgcccagaaccctcacccccgcaggatccgtttcttccaagcgcgccagcaccggttgcctgggcccatggtaggcgccaggggctcggacccattcacagcaggacaaatctcatggatacagagctcatggacgctgactccgacttttag

SEQ ID NO: 158034 - DNA, 2364 bp, Artificial Sequence
  derived and/or modified sequence
atggctgcggctcggcctgctaggggtccagaacttccactgctcggtcttctgctcctgctgcttctaggcgacccaggccgaggggctgcctcctcgggtaacgccacagggcctgggccacgctcagcagggggatccgcgaggcggagtgcggctgtgactggtccaccgccacccctaagccattgtggtcgagcagccccttgtgaaccacttcgttataatgtgtgtctcgggtccgttctgccctacggggctacatctaccctcctggcaggcgacagcgattctcaagaggaagcacatggcaagcttgttctctggagcggattgcgcaacgcgccacggtgttgggccgtgattcagccccttctctgcgcggtatacatgccaaaatgtgaaaatgaccgagtagagttaccctccaggactctgtgtcaggccacaagaggtccctgtgcaatcgtagaaagagaaaggggctggcccgactttctccgttgcacgcctgatagattccccgaaggttgcacaaatgaagtccagaatattaaatttaactcatcggggcaatgtgaagttccactcgtgcgcacagataaccccaagtcctggtatgaagacgttgagggctgcggcatacagtgccaaaatccactgttcactgaagccgaacaccaggatatgcatagctatatcgccgcattcggcgcagtcactggcctgtgtactctcttcaccctggctacatttgtggcagactggaggaattcgaaccggtatcccgcagtcatcctgttttatgtgaacgcatgcttctttgttggcagtatcggttggctagctcagtttatggatggcgctagacgggagattgtgtgtcgggctgacggaactatgcgcttgggcgagcccaccagcaacgagactctctcctgcgtgatcatcttcgtcatcgtttattacgctctgatggccggagtcgtctggtttgtggtgttgacatacgcatggcatacgtctttcaaggccctcgggacgacttaccagccactgtccggtaagacgagctacttccacttgcttacctggtccctgcctttcgtcctgaccgtcgcaattctggctgtggcacaggtcgatggggactccgtgagcgggatttgttttgtgggttataaaaactatagataccgtgccggattcgtcctcgccccaatagggcttgtgctgattgtgggcggttatttcctgatcaggggtgtgatgacattgtttagcattaaaagcaatcacccgggactcctgtcagagaaggccgcaagtaagattaatgaaacaatgctgcgactgggcattttcggttttctggcattcggctttgtcctcatcacattctcttgccacttttatgatttctttaaccaagctgagtgggaacgtagctttagggactatgttctgtgccaggccaatgtcaccattggattgccgaccaagcaacccatccccgactgcgaaattaaaaacaggccctccttgttggtggagaaaatcaacctattcgctatgtttggcaccggaattgccatgtccacatgggtttggacgaaagccaccctgctgatctggcgacgcacatggtgtcgcctgacaggccaaagtgatgatgaacctaagcgcataaagaaaagtaagatgatcgctaaagcgttctccaagagacacgaactcctgcagaaccccggtcaggagttgagtttcagcatgcatactgtgtcccatgacggacccgtcgccggtctggccttcgacctgaatgaaccttctgccgacgtgtcatcagcctgggcacagcatgtgacaaagatggtcgctaggcgcggagctatactgcctcaggatataagcgtcacgccagttgcgactcccgttccccctgaagagcaggcgaacctttggctcgtggaagctgaaatctctccggaactgcagaaacggttaggacgcaagaagaaacgacgaaaaagaaagaaagaagtctgcccactcgctccaccaccggaacttcaccccccagcacccgctcccagcaccatcccgagactcccccagttgcccagacagaagtgcttagtcgccgcaggtgcatggggcgctggagattcttgtcgacaaggggcttggactctggtctcaaacccgttctgccccgagccatctcctccccaggaccctttcctgccaagtgctcccgctcccgtagcgtgggcccacggtcgacgccagggactggggccaattcattcaaggaccaacctaatggacacggagttgatggatgcagactctgacttctag

SEQ ID NO: 158035 - DNA, 3738 bp, Artificial Sequence
  derived and/or modified sequence
gggctgaagacaacttggattgcgaggctagggcttggggagtcgtgcatcccgttccgggcctccgcagcccaacatgggccccgggttccaaagtttgcgaagttgggcgccgaggggccggggcgcgcggagcgtccgggggggcccgggcccggattctctgggcgcacaggtcgcctgagccgcctccgcggccgccgaggtcgtgcgtgtggccggggggctccgaggagcaggcgggggcgccggggcttttgctgagttggcggggttggccatggccgctgcccgcccagcgcgggggccggagctcccgctcctggggctgctgctgctgctgctgctgggggacccgggccggggggcggcctcgagcgggaacgcgaccgggcctgggcctcggagcgcgggcgggagcgcgaggaggagcgcggcggtgactggccctccgccgccgctgagccactgcggccgggctgccccctgcgagccgctgcgctacaacgtgtgcctgggctcggtgctgccctacggggccacctccacactgctggccggagactcggactcccaggaggaagcgcacggcaagctcgtgctctggtcgggcctccggaatgccccccgctgctgggcagtgatccagcccctgctgtgtgccgtatacatgcccaagtgtgagaatgaccgggtggagctgcccagccgtaccctctgccaggccacccgaggcccctgtgccatcgtggagagggagcggggctggcctgacttcctgcgctgcactcctgaccgcttccctgaaggctgcacgaatgaggtgcagaacatcaagttcaacagttcaggccagtgcgaagtgcccttggttcggacagacaaccccaagagctggtacgaggacgtggagggctgcggcatccagtgccagaacccgctcttcacagaggctgagcaccaggacatgcacagctacatcgcggccttcggggccgtcacgggcctctgcacgctcttcaccctggccacattcgtggctgactggcggaactcgaatcgctaccctgctgttattctcttctacgtcaatgcgtgcttctttgtgggcagcattggctggctggcccagttcatggatggtgcccgccgagagatcgtctgccgtgcagatggcaccatgaggcttggggagcccacctccaatgagactctgtcctgcgtcatcatctttgtcatcgtgtactacgccctgatggctggtgtggtttggtttgtggtcctcacctatgcctggcacacttccttcaaagccctgggcaccacctaccagcctctctcgggcaagacctcctacttccacctgctcacctggtcactcccctttgtcctcactgtggcaatccttgctgtggcgcaggtggatggggactctgtgagtgggatttgttttgtgggctacaagaactaccgataccgtgcgggcttcgtgctggccccaatcggcctggtgctcatcgtgggaggctacttcctcatccgaggagtcatgactctgttctccatcaagagcaaccaccccgggctgctgagtgagaaggctgccagcaagatcaacgagaccatgctgcgcctgggcatttttggcttcctggcctttggctttgtgctcattaccttcagctgccacttctacgacttcttcaaccaggctgagtgggagcgcagcttccgggactatgtgctatgtcaggccaatgtgaccatcgggctgcccaccaagcagcccatccctgactgtgagatcaagaatcgcccgagccttctggtggagaagatcaacctgtttgccatgtttggaactggcatcgccatgagcacctgggtctggaccaaggccacgctgctcatctggaggcgtacctggtgcaggttgactgggcagagtgacgatgagccaaagcggatcaagaagagcaagatgattgccaaggccttctctaagcggcacgagctcctgcagaacccaggccaggagctgtccttcagcatgcacactgtgtcccacgacgggcccgtggcgggcttggcctttgacctcaatgagccctcagctgatgtctcctctgcctgggcccagcatgtcaccaagatggtggctcggagaggagccatactgccccaggatatttctgtcacccctgtggcaactccagtgcccccagaggaacaagccaacctgtggctggttgaggcagagatctccccagagctgcagaagcgcctgggccggaagaagaagaggaggaagaggaagaaggaggtgtgcccgctggcgccgccccctgagcttcacccccctgcccctgcccccagtaccattcctcgactgcctcagctgccccggcagaaatgcctggtggctgcaggtgcctggggagctggggactcttgccgacagggagcgtggaccctggtctccaacccattctgcccagagcccagtccccctcaggatccatttctgcccagtgcaccggcccccgtggcatgggctcatggccgccgacagggcctggggcctattcactcccgcaccaacctgatggacacagaactcatggatgcagactcggacttctgagcctgcagagcaggacctgggacaggaaagagaggaaccaataccttcaaggctcttcttcctcaccgagcatgcttccctaggatcccgtcttccagagaacctgtgggctgactgccctccgaagagagttctggatgtctggctcaaagcagcaggactgtgggaaagagcctaacatctccatggggaggcctcaccccagggacagggccctggagctcagggtccttgtttctgccctgccagctgcagcctggttggcagcatctgctccatcggggcagggggtatgcagagcttgtggtggggcaggaacggtggaggcagaggtgacagttcccagagtgggctttggtggccagggaggcagcctagcctatgtctggcagatgagggctggctgccgttttctgggctgatgggtgccctttcctggcagtctcagtccaaaagtgttgactgtgtcattagtcctttgtctaagtagggccagggcaccgtattcctctcccaggtgtttgtggggctggaaggacctgctcccacaggggccatgtcctctcttaataggtggcactaccccaaacccatcttttgttctcctatatcctccttcttctgttccatttcagttcagtttcagcggtgccaacctctttgcgtttcctttttgttgatgaggacccagagctgctgcacacactcacctctaaccccctcccctcgctgctgggccccatctccacaggagagactggttcagctctagggcctcagtctggagtgggataggagcagtgagtgacaaagcctctgaaagatgcatcatctcttcctcacacccatttagtgggggatgggtcctctagacttgaggggctaccctgggaagctgccgtagcttcagccaggcaagaaagcttccttcaacctgcatagccggtgggtgaggagattcccaccttccatagcctccaaacatgttcccaaggccccactttcaagaatcagacagcaggaagccatagatgctggctgggttccaggttatggggagaagaaatacagtcaataaaaggtttttgtataaa

SEQ ID NO: 158036 - protein, 1104 aa, Artificial Sequence
  derived and/or modified sequence
MQAQQLPYEFFSEENAPKWRGLLVPALKKVQGQVHPTLESNDDALQYVEELILQLLNMLCQAQPRSASDVEERVQKSFPHPIDKWAIADAQSAIEKRKRRNPLSLPVEKIHPLLKEVLGYKIDHQVSVYIVAVLEYISADILKLVGNYVRNIRHYEITKQDIKVAMCADKVLMDMFHQDVEDINILSLTDEEPSTSGEQTYYDLVKAFMAEIRQYIRELNLIIKVFREPFVSNSKLFSANDVENIFSRIVDIHELSVKLLGHIEDTVEMTDEGSPHPLVGSCFEDLAEELAFDPYESYARDILRPGFHDRFLSQLSKPGAALYLQSIGEGFKEAVQYVLPRLLLAPVYHCLHYFELLKQLEEKSEDQEDKECLKQAITALLNVQSGMEKICSKSLAKRRLSESACRFYSQQMKGKQLAIKKMNEIQKNIDGWEGKDIGQCCNEFIMEGTLTRVGAKHERHIFLFDGLMICCKSNHGQPRLPGASNAEYRLKEKFFMRKVQINDKDDTNEYKHAFEIILKDENSVIFSAKSAEEKNNWMAALISLQYRSTLERMLDVTMLQEEKEEQMRLPSADVYRFAEPDSEENIIFEENMQPKAGIPIIKAGTVIKLIERLTYHMYADPNFVRTFLTTYRSFCKPQELLSLIIERFEIPEPEPTEADRIAIENGDQPLSAELKRFRKEYIQPVQLRVLNVCRHWVEHHFYDFERDAYLLQRMEEFIGTVRGKAMKKWVESITKIIQRKKIARDNGPGHNITFQSSPPTVEWHISRPGHIETFDLLTLHPIEIARQLTLLESDLYRAVQPSELVGSVWTKEDKEINSPNLLKMIRHTTNLTLWFEKCIVETENLEERVAVVSRIIEILQVFQELNNFNGVLEVVSAMNSSPVYRLDHTFEQIPSRQKKILEEAHELSEDHYKKYLAKLRSINPPCVPFFGIYLTNILKTEEGNPEVLKRHGKELINFSKRRKVAEITGEIQQYQNQPYCLRVESDIKRFFENLNPMGNSMEKEFTDYLFNKSLEIEPRNPKPLPRFPKKYSYPLKSPGVRPSNPRPGTMRHPTPLQQEPRKISYSRIPESETESTASAPNSPNTVNTSACFWCFQYHRCLQCI

SEQ ID NO: 158037 - protein, 1333 aa, Artificial Sequence [sequence omitted]

SEQ ID NO: 158038 - DNA, 3315 bp, Artificial Sequence
  derived and/or modified sequence
atgcaggcccagcagctgccctacgagttcttcagcgaggagaacgcccccaagtggagaggcctgctggtgcccgccctgaagaaggtgcagggccaggtgcaccccaccctggagagcaacgacgacgccctgcagtacgtggaggagctgatcctgcagctgctgaacatgctgtgccaggcccagcccagaagcgccagcgacgtggaggagagagtgcagaagagcttcccccaccccatcgacaagtgggccatcgccgacgcccagagcgccatcgagaagagaaagagaagaaaccccctgagcctgcccgtggagaagatccaccccctgctgaaggaggtgctgggctacaagatcgaccaccaggtgagcgtgtacatcgtggccgtgctggagtacatcagcgccgacatcctgaagctggtgggcaactacgtgagaaacatcagacactacgagatcaccaagcaggacatcaaggtggccatgtgcgccgacaaggtgctgatggacatgttccaccaggacgtggaggacatcaacatcctgagcctgaccgacgaggagcccagcaccagcggcgagcagacctactacgacctggtgaaggccttcatggccgagatcagacagtacatcagagagctgaacctgatcatcaaggtgttcagagagcccttcgtgagcaacagcaagctgttcagcgccaacgacgtggagaacatcttcagcagaatcgtggacatccacgagctgagcgtgaagctgctgggccacatcgaggacaccgtggagatgaccgacgagggcagcccccaccccctggtgggcagctgcttcgaggacctggccgaggagctggccttcgacccctacgagagctacgccagagacatcctgagacccggcttccacgacagattcctgagccagctgagcaagcccggcgccgccctgtacctgcagagcatcggcgagggcttcaaggaggccgtgcagtacgtgctgcccagactgctgctggcccccgtgtaccactgcctgcactacttcgagctgctgaagcagctggaggagaagagcgaggaccaggaggacaaggagtgcctgaagcaggccatcaccgccctgctgaacgtgcagagcggcatggagaagatctgcagcaagagcctggccaagagaagactgagcgagagcgcctgcagattctacagccagcagatgaagggcaagcagctggccatcaagaagatgaacgagatccagaagaacatcgacggctgggagggcaaggacatcggccagtgctgcaacgagttcatcatggagggcaccctgaccagagtgggcgccaagcacgagagacacatcttcctgttcgacggcctgatgatctgctgcaagagcaaccacggccagcccagactgcccggcgccagcaacgccgagtacagactgaaggagaagttcttcatgagaaaggtgcagatcaacgacaaggacgacaccaacgagtacaagcacgccttcgagatcatcctgaaggacgagaacagcgtgatcttcagcgccaagagcgccgaggagaagaacaactggatggccgccctgatcagcctgcagtacagaagcaccctggagagaatgctggacgtgaccatgctgcaggaggagaaggaggagcagatgagactgcccagcgccgacgtgtacagattcgccgagcccgacagcgaggagaacatcatcttcgaggagaacatgcagcccaaggccggcatccccatcatcaaggccggcaccgtgatcaagctgatcgagagactgacctaccacatgtacgccgaccccaacttcgtgagaaccttcctgaccacctacagaagcttctgcaagccccaggagctgctgagcctgatcatcgagagattcgagatccccgagcccgagcccaccgaggccgacagaatcgccatcgagaacggcgaccagcccctgagcgccgagctgaagagattcagaaaggagtacatccagcccgtgcagctgagagtgctgaacgtgtgcagacactgggtggagcaccacttctacgacttcgagagagacgcctacctgctgcagagaatggaggagttcatcggcaccgtgagaggcaaggccatgaagaagtgggtggagagcatcaccaagatcatccagagaaagaagatcgccagagacaacggccccggccacaacatcaccttccagagcagcccccccaccgtggagtggcacatcagcagacccggccacatcgagaccttcgacctgctgaccctgcaccccatcgagatcgccagacagctgaccctgctggagagcgacctgtacagagccgtgcagcccagcgagctggtgggcagcgtgtggaccaaggaggacaaggagatcaacagccccaacctgctgaagatgatcagacacaccaccaacctgaccctgtggttcgagaagtgcatcgtggagaccgagaacctggaggagagagtggccgtggtgagcagaatcatcgagatcctgcaggtgttccaggagctgaacaacttcaacggcgtgctggaggtggtgagcgccatgaacagcagccccgtgtacagactggaccacaccttcgagcagatccccagcagacagaagaagatcctggaggaggcccacgagctgagcgaggaccactacaagaagtacctggccaagctgagaagcatcaaccccccctgcgtgcccttcttcggcatctacctgaccaacatcctgaagaccgaggagggcaaccccgaggtgctgaagagacacggcaaggagctgatcaacttcagcaagagaagaaaggtggccgagatcaccggcgagatccagcagtaccagaaccagccctactgcctgagagtggagagcgacatcaagagattcttcgagaacctgaaccccatgggcaacagcatggagaaggagttcaccgactacctgttcaacaagagcctggagatcgagcccagaaaccccaagcccctgcccagattccccaagaagtacagctaccccctgaagagccccggcgtgagacccagcaaccccagacccggcaccatgagacaccccacccccctgcagcaggagcccagaaagatcagctacagcagaatccccgagagcgagaccgagagcaccgccagcgcccccaacagccccaacaccgtgaacaccagcgcctgcttctggtgcttccagtaccacagatgcctgcagtgcatctag

SEQ ID NO: 158039 - DNA, 4002 bp, Artificial Sequence
  derived and/or modified sequence
atgcaggcccagcagctgccctacgagttcttcagcgaggagaacgcccccaagtggagaggcctgctggtgcccgccctgaagaaggtgcagggccaggtgcaccccaccctggagagcaacgacgacgccctgcagtacgtggaggagctgatcctgcagctgctgaacatgctgtgccaggcccagcccagaagcgccagcgacgtggaggagagagtgcagaagagcttcccccaccccatcgacaagtgggccatcgccgacgcccagagcgccatcgagaagagaaagagaagaaaccccctgagcctgcccgtggagaagatccaccccctgctgaaggaggtgctgggctacaagatcgaccaccaggtgagcgtgtacatcgtggccgtgctggagtacatcagcgccgacatcctgaagctggtgggcaactacgtgagaaacatcagacactacgagatcaccaagcaggacatcaaggtggccatgtgcgccgacaaggtgctgatggacatgttccaccaggacgtggaggacatcaacatcctgagcctgaccgacgaggagcccagcaccagcggcgagcagacctactacgacctggtgaaggccttcatggccgagatcagacagtacatcagagagctgaacctgatcatcaaggtgttcagagagcccttcgtgagcaacagcaagctgttcagcgccaacgacgtggagaacatcttcagcagaatcgtggacatccacgagctgagcgtgaagctgctgggccacatcgaggacaccgtggagatgaccgacgagggcagcccccaccccctggtgggcagctgcttcgaggacctggccgaggagctggccttcgacccctacgagagctacgccagagacatcctgagacccggcttccacgacagattcctgagccagctgagcaagcccggcgccgccctgtacctgcagagcatcggcgagggcttcaaggaggccgtgcagtacgtgctgcccagactgctgctggcccccgtgtaccactgcctgcactacttcgagctgctgaagcagctggaggagaagagcgaggaccaggaggacaaggagtgcctgaagcaggccatcaccgccctgctgaacgtgcagagcggcatggagaagatctgcagcaagagcctggccaagagaagactgagcgagagcgcctgcagattctacagccagcagatgaagggcaagcagctggccatcaagaagatgaacgagatccagaagaacatcgacggctgggagggcaaggacatcggccagtgctgcaacgagttcatcatggagggcaccctgaccagagtgggcgccaagcacgagagacacatcttcctgttcgacggcctgatgatctgctgcaagagcaaccacggccagcccagactgcccggcgccagcaacgccgagtacagactgaaggagaagttcttcatgagaaaggtgcagatcaacgacaaggacgacaccaacgagtacaagcacgccttcgagatcatcctgaaggacgagaacagcgtgatcttcagcgccaagagcgccgaggagaagaacaactggatggccgccctgatcagcctgcagtacagaagcaccctggagagaatgctggacgtgaccatgctgcaggaggagaaggaggagcagatgagactgcccagcgccgacgtgtacagattcgccgagcccgacagcgaggagaacatcatcttcgaggagaacatgcagcccaaggccggcatccccatcatcaaggccggcaccgtgatcaagctgatcgagagactgacctaccacatgtacgccgaccccaacttcgtgagaaccttcctgaccacctacagaagcttctgcaagccccaggagctgctgagcctgatcatcgagagattcgagatccccgagcccgagcccaccgaggccgacagaatcgccatcgagaacggcgaccagcccctgagcgccgagctgaagagattcagaaaggagtacatccagcccgtgcagctgagagtgctgaacgtgtgcagacactgggtggagcaccacttctacgacttcgagagagacgcctacctgctgcagagaatggaggagttcatcggcaccgtgagaggcaaggccatgaagaagtgggtggagagcatcaccaagatcatccagagaaagaagatcgccagagacaacggccccggccacaacatcaccttccagagcagcccccccaccgtggagtggcacatcagcagacccggccacatcgagaccttcgacctgctgaccctgcaccccatcgagatcgccagacagctgaccctgctggagagcgacctgtacagagccgtgcagcccagcgagctggtgggcagcgtgtggaccaaggaggacaaggagatcaacagccccaacctgctgaagatgatcagacacaccaccaacctgaccctgtggttcgagaagtgcatcgtggagaccgagaacctggaggagagagtggccgtggtgagcagaatcatcgagatcctgcaggtgttccaggagctgaacaacttcaacggcgtgctggaggtggtgagcgccatgaacagcagccccgtgtacagactggaccacaccttcgagcagatccccagcagacagaagaagatcctggaggaggcccacgagctgagcgaggaccactacaagaagtacctggccaagctgagaagcatcaaccccccctgcgtgcccttcttcggcatctacctgaccaacatcctgaagaccgaggagggcaaccccgaggtgctgaagagacacggcaaggagctgatcaacttcagcaagagaagaaaggtggccgagatcaccggcgagatccagcagtaccagaaccagccctactgcctgagagtggagagcgacatcaagagattcttcgagaacctgaaccccatgggcaacagcatggagaaggagttcaccgactacctgttcaacaagagcctggagatcgagcccagaaaccccaagcccctgcccagattccccaagaagtacagctaccccctgaagagccccggcgtgagacccagcaaccccagacccggcaccatgagacaccccacccccctgcagcaggagcccagaaagatcagctacagcagaatccccgagagcgagaccgagagcaccgccagcgcccccaacagccccagaacccccctgacccccccccccgccagcggcgccagcagcaccaccgacgtgtgcagcgtgttcgacagcgaccacagcagccccttccacagcagcaacgacaccgtgttcatccaggtgaccctgccccacggccccagaagcgccagcgtgagcagcatcagcctgaccaagggcaccgacgaggtgcccgtgcccccccccgtgccccccagaagaagacccgagagcgcccccgccgagagcagccccagcaagatcatgagcaagcacctggacagcccccccgccatcccccccagacagcccaccagcaaggcctacagccccagatacagcatcagcgacagaaccagcatcagcgacccccccgagagcccccccctgctgccccccagagagcccgtgagaacccccgacgtgttcagcagcagccccctgcacctgcagcccccccccctgggcaagaagagcgaccacggcaacgccttcttccccaacagccccagccccttcacccccccccccccccagacccccagcccccacggcaccagaagacacctgcccagcccccccctgacccaggaggtggacctgcacagcatcgccggcccccccgtgccccccagacagagcaccagccagcacatccccaagctgccccccaagacctacaagagagagcacacccaccccagcatgcacagagacggcccccccctgctggagaacgcccacagcagctag

SEQ ID NO: 158040 - DNA, 3315 bp, Artificial Sequence
  derived and/or modified sequence
atgcaggctcaacagctaccctatgagttcttctctgaggagaatgccccaaagtggagggggctactagtccctgcactaaagaaagtgcagggccaggtacatccgacactggaatcaaacgacgatgccctgcagtacgtcgaggaactgattttgcagcttctgaacatgctctgccaagcccagccccgtagtgcctcagacgttgaagaaagagtgcaaaaaagctttccccacccaatcgacaaatgggctatcgccgatgcccagtccgcaattgagaaaaggaagcggagaaacccattatccctcccggtcgaaaaaattcaccccttgttaaaagaagttttgggctataaaatcgatcaccaggtgagcgtatatatcgtggcggtgctcgagtatatctccgccgatatcctaaagctggtgggcaactatgtgaggaacattcgccactacgagatcaccaaacaggacataaaggtggctatgtgcgcagataaagtattaatggatatgtttcatcaggatgtggaggacattaacattttgtcgctgaccgacgaagaaccctctacctctggcgagcaaacatattatgatctggttaaagcttttatggcagaaattagacaatacatacgcgaacttaatttgattatcaaggtgttcagagagcctttcgtgagtaatagtaagctgttctcagccaatgacgtcgaaaacatcttctctagaatcgttgacattcacgaactttccgtaaagctgctgggccacatagaagataccgtggagatgactgatgaggggtctccccaccccctcgtagggtcctgcttcgaagacctcgctgaggaacttgcattcgatccatatgaaagctacgcccgagacattttgcggcctggcttccacgaccgcttcctgtcacagcttagcaagccgggcgcagccctctatctgcagtccatcggtgagggcttcaaggaggctgtacaatacgttctgcccaggctcttgctggctccggtctaccattgtctacactattttgaactactaaaacagctggaagaaaaaagcgaagaccaggaggataaagaatgcttgaagcaggcgattacagctcttctgaatgtgcagtccggaatggagaagatctgtagcaagtctcttgccaagcggaggttatctgaatcagcgtgcagattctattcccagcagatgaaggggaagcagttggcaattaagaagatgaacgagattcagaagaacatagacggctgggagggcaaggatatcgggcagtgttgcaatgagttcattatggaaggcaccttaactagagtgggcgccaaacatgaacggcacatttttcttttcgacgggcttatgatatgttgcaagagcaatcacggccagccgcgcctgcctggcgcttctaatgctgagtatcggctcaaagagaagtttttcatgcgcaaagtgcagatcaacgacaaagacgacaccaatgagtacaagcacgcatttgagatcatcctcaaagacgaaaacagcgttatcttttctgcaaaatcagccgaggaaaaaaataattggatggcggctttgatttctctgcaatacaggagcaccctggagcgaatgctcgacgtgacaatgctccaagaggagaaggaagagcagatgcgattgcccagtgccgatgtctacaggttcgccgagccggactctgaggaaaatattatttttgaagagaacatgcagccaaaggctggtattccaatcatcaaggcagggactgtcatcaaattaatagagcggctcacctatcacatgtatgccgatcctaatttcgttagaacattcctgaccacgtaccgaagcttctgtaagcctcaggaattactctcactgatcatcgaacgcttcgagattcctgaacccgagccaactgaggcggatcgaatagccatcgagaatggcgatcagcctctgtcagccgaattgaagaggtttcgcaaggaatatattcagcccgtacaactaagagtgctcaacgtgtgtcgccactgggtcgagcaccacttctacgatttcgaacgtgacgcatatctgctgcagcgaatggaggagttcatcggtaccgtccgcgggaaggcgatgaaaaagtgggtcgagtccatcaccaagatcatccagcgaaaaaagatagcgagagataacggacctggccacaacattacctttcagtccagtccccctactgtggaatggcatatctcccgaccagggcacatcgaaacctttgacttgctgacactgcatcctattgagattgccagacagctgacgttgctggaatctgacctctatagagctgtccagccgtcagaattggttggcagcgtgtggaccaaagaggacaaggaaatcaattccccaaatctcctaaaaatgattcggcacactaccaatcttactctgtggttcgagaaatgcatcgttgaaaccgagaatctggaggaaagagtggccgtcgtgtcgcgcatcatcgagatactgcaggtgttccaagagctgaataactttaatggagtcctagaggtagtctctgcaatgaactcctcaccagtgtaccgtctggatcatacatttgaacaaatcccttcgcgccagaaaaaaattttggaggaagctcacgagttgtctgaagatcactataaaaaatacctggcgaaattgaggtcaattaaccccccgtgcgtgccattctttggaatttacctgactaacatcctcaaaaccgaggagggcaacccagaggtcctcaaaagacacggtaaagagttgatcaatttcagcaaacgaagaaaggtggcagagataactggagagatccagcagtaccagaaccagccctactgtctgcgcgtggaaagcgacataaaaaggttttttgagaacttaaatcctatgggcaactccatggagaaggaattcacagactaccttttcaataaatccttagagatcgaaccgagaaatcccaaaccattgccacggttcccgaagaaatattcatacccacttaagtcacccggggttcggcctagcaatcctagacctgggaccatgcggcacccaacccctctgcagcaagaacccaggaagatatcttatagtcgcattccggagagtgagacggaaagcacggcctcagccccgaactcccctaacactgttaatacatctgcttgtttttggtgcttccagtaccacaggtgcctgcaatgtatctag

SEQ ID NO: 158041 - DNA, 4002 bp, Artificial Sequence
  derived and/or modified sequence
atgcaggcccagcagctgccttatgagttcttcagcgaggaaaacgccccaaagtggcggggtctcctggtgcctgcgctgaaaaaagttcagggacaggttcaccccactcttgagtccaatgatgatgccctccaatacgtggaagaattaattctgcagctcctaaatatgctgtgtcaagcccagccacgtagtgcctccgatgtggaggaacgcgtgcagaagagctttcctcacccaattgacaagtgggccatcgctgacgcacaaagtgccatcgagaaaaggaagagacgaaacccactaagcctccccgtggaaaaaatccaccccctcctcaaagaagtgttggggtataaaattgatcaccaagtatccgtgtacattgtggccgtcctcgaatatattagcgcagatatcctcaaactggtgggcaactacgtgagaaacatcaggcattacgagatcacgaaacaggacatcaaagtagcgatgtgtgcagataaggtgctcatggacatgttccaccaggacgtggaggatataaacattctctcgctgactgatgaggaacccagcaccagcggcgaacagacctactacgatctcgttaaggcatttatggcggaaattcgacagtatatccgagagctgaatcttattatcaaggtttttagagaaccattcgtgtctaatagtaaactttttagcgcaaacgacgtggagaatatattctcccgtatcgttgatatccacgagctctccgtgaagttgctcggacatattgaggacacagtagaaatgaccgatgagggcagcccacacccacttgttgggtcatgcttcgaggatctggcagaggaactcgctttcgatccctatgagagctacgcgagggacatcctgagacctggctttcatgacagatttctgagccagttatccaaaccaggggcagccctgtacctgcagagcattggcgagggcttcaaggaggctgtccagtatgtcctgccacgcctcctcctagcaccggtgtatcactgtcttcactacttcgagctcctcaaacaactcgaagagaagagcgaagatcaggaagacaaagagtgtttgaaacaagctattacagcactgctcaatgtccagtcaggcatggagaagatctgttccaagagcttagccaaaagacgcctttccgagagtgcctgtcggttctactctcagcagatgaaggggaaacagctggctatcaaaaagatgaacgagatccagaagaacatcgacggctgggagggcaaggatatcgggcagtgttgcaatgagttcatcatggaaggaaccctgacccgtgtcggtgcaaaacacgaacgtcatatctttctgttcgacggactaatgatttgctgcaagagcaaccacgggcagccacggctgcccggagcaagcaatgccgagtacagactgaaggaaaagttctttatgagaaaggtacagatcaacgataaagacgacaccaacgagtataaacatgcttttgagatcatcctgaaagatgaaaactcagtaatcttctccgccaagagtgcagaggaaaagaacaattggatggctgctctgatctccctgcagtacagatccacactggagaggatgttggacgtgaccatgttacaggaggagaaagaagaacagatgcgcctacctagcgcagatgtataccgatttgcagagccagatagcgaggagaacattatttttgaggagaatatgcagccgaaagcaggcatccccattatcaaggcagggacggtgataaagcttatcgaacgcctgacataccacatgtatgcggatccgaattttgttaggacctttctcaccacttataggtcgttctgcaaaccacaggaattgctgtcactaatcatcgaacgtttcgaaattcctgagccggagcctaccgaggctgataggatcgcaattgaaaacggcgaccagcccctctctgccgaactgaaacggtttcgcaaagaatacattcaacccgtccagctgcgagtgttgaacgtgtgtcgccattgggtcgaacaccatttttatgacttcgagcgagacgcctatctcctgcagcgtatggaagaatttattgggacagtacgcggaaaagctatgaaaaagtgggtcgagtccataacaaagatcattcagcgtaagaagatagctcgcgataatggacctgggcacaatatcacttttcagtcttcgcctcctacagtcgagtggcacatctcgagaccaggtcacatagaaacgttcgatctcctaaccttgcacccaatcgagatagcaagacagctgactctgctggaatccgatctgtatcgcgccgtgcagcccagcgagttagttggcagcgtgtggacaaaagaggacaaggagataaactctccaaacttgctgaagatgatccggcatacgaccaacctgacattgtggtttgagaaatgcatcgtggaaaccgagaacttagaagaacgggtcgccgtggtgtcaagaattatcgagattctacaggtcttccaagaactgaacaactttaatggggtgctcgaggttgtgagcgcaatgaattcttccccagtatacaggttggaccatacctttgagcagattccatctcgacaaaagaaaatactggaggaagcccacgaactaagtgaagatcattataagaagtatctggcgaaactgaggtccattaacccaccatgtgttccattttttggaatctatttaactaatatcttgaagacagaagagggcaaccccgaggtgctgaaaagacatggaaaagaactcattaacttctccaagcggcgtaaagttgccgagataacaggcgagattcagcagtaccagaaccagccatattgtcttcgagtggaatcagatattaaacgtttttttgagaacctcaatcctatggggaattcaatggagaaagagttcactgattacctgtttaataagagtctcgaaatcgaacctagaaacccaaagcccctgccacggttcccaaaaaagtactcatatccattaaaatcgcccggtgtgcgcccttccaatccgagacctggaaccatgagacacccaaccccgctgcagcaggagccacgcaagatttcttacagccgaattcccgagagtgagacagagtctaccgcatctgcccctaactcgcctaggacacctctgacaccacctcccgccagcggcgccagctccaccacagacgtctgctctgtttttgactccgatcacagttccccctttcacagctccaacgacacggttttcattcaggtgactctgcctcacggtccaagatcagcatccgttagcagcatttcattgactaagggtactgacgaagtcccagtgccaccacccgtcccacctaggaggagaccggagtccgctcccgcggaaagctctccttcgaaaatcatgtctaaacacctcgacagtccacctgccattccccctcgacagcccactagtaaggcctacagtcccaggtactccatatcagacaggacttctatctctgatcccccagaatcaccccccctgctgccgcctagagagcccgtacgcacccccgacgtgttctcctcgtcgccgctccacctgcaacctccaccccttggcaaaaagtccgaccatggcaacgcattctttccgaacagcccctcccccttcacccccccccccccgcagacgccttctccacacggtaccagaagacacctgccaagcccccctctcactcaagaagtagacctgcattccattgcaggccctcccgtgcctcctcggcagtctacatcccaacatatacccaaactgccaccgaagacctacaagagggagcacacacatccaagcatgcaccgtgacgggccacctctgctcgagaatgcccactcgagctag

SEQ ID NO: 158042 - DNA, 4002 bp, Artificial Sequence
  derived and/or modified sequence
atgcaagcccagcaattgccatatgagtttttcagtgaggagaacgccccgaagtggagaggcctgctggtgcccgctctgaaaaaggttcaaggccaggtgcatcccacactggagtccaacgacgacgccctgcagtatgtggaggagctgatccttcagctgcttaatatgctgtgtcaggctcagcccaggagcgctagcgatgtggaagaacgcgttcagaagtcctttccacaccctatcgataagtgggctatcgcagacgcacagagcgctatcgaaaagaggaagagacggaacccgctgagcctccctgtggagaagatccaccctttgttgaaagaagtcctgggctacaagattgatcaccaggtatccgtttacatagtggcggtgcttgaatatatctcagccgacatactgaagcttgtgggcaattacgtccggaacattcggcattatgagattacaaaacaagatattaaggtggcaatgtgcgctgacaaagtattaatggacatgtttcaccaagatgtggaggatatcaatatcctcagtctaaccgacgaagagccatctacctcgggcgagcagacctattacgatttagtgaaggcattcatggccgagattaggcaatacattcgcgagctgaatctaatcattaaggtgtttcgagagccttttgtcagtaatagcaagctgttttccgcaaacgacgtggagaatatatttagcagaatcgtggacatccacgaactgtctgtgaagctcctcgggcatatcgaggatacagttgagatgaccgatgaaggaagtccacaccctctcgtgggctcttgttttgaggaccttgccgaggaacttgccttcgacccttatgagtcctatgcaagggacattttgcgacccggcttccacgaccgattcctgtcccaactgagcaaacctggagccgcactgtacctgcagtctattggcgagggctttaaggaggccgtgcaatacgtacttccccggcttctgttggcgcccgtttaccattgtcttcattatttcgagctcctcaaacaattagaagagaaatctgaagatcaagaggacaaagaatgcttgaaacaggcaataaccgccctgctgaatgtgcagtctggcatggagaagatatgtagtaagtccctggctaaacggcgactttcagaatcagcctgtcgtttttattctcaacagatgaaagggaaacaattggccatcaaaaagatgaacgagatccaaaagaacattgacggctgggagggcaaggatattggccagtgttgtaatgaatttattatggaggggacattaacgcgggtgggagcaaagcatgaacgtcacatcttccttttcgatggcctgatgatttgctgtaaatcgaaccatggacagccccggctgcccggcgccagtaatgccgagtaccgcctcaaagagaagttttttatgcggaaagttcagatcaacgataaagacgacacgaatgaatataagcacgctttcgagattatccttaaggacgaaaactcggtgatcttttctgcaaaaagtgcagaggaaaagaacaattggatggctgccctcattagtctgcagtacaggtcaactttagaaagaatgctcgatgtaaccatgcttcaagaggagaaagaggagcagatgaggctgccatccgcggacgtttacaggttcgccgagccggatagcgaagaaaacatcatttttgaggaaaatatgcagcccaaagcaggaatccctatcataaaagccggcaccgtcataaagttgatcgagcgcctgacataccacatgtatgcagatcccaactttgtaaggacctttctgaccacctatcggtccttctgtaaacctcaggaactattgtctctgatcatcgagaggtttgagatacctgagcctgagccaacggaagctgacaggattgccattgagaacggcgatcagccactcagtgcagagctgaagcgattccggaaagagtacatacaacctgtgcaactccgggtcttgaacgtgtgcagacactgggttgaacaccatttctatgactttgagcgggatgcatatctcttacaaagaatggaggagtttatcggaacagttcggggaaaggcgatgaagaaatgggtcgaatccatcaccaagataattcagaggaaaaagattgcgcgagacaatggtcccgggcacaacatcaccttccaaagttcccctcccaccgtagagtggcatatatcccggccgggccacattgaaacatttgacctgctcactctgcatcctatcgagattgcgagacagctaaccctcttagagtcagacttgtaccgcgctgttcaaccctcggaactggtgggatcagtctggactaaggaggataaagagatcaactcacctaatctgctgaagatgatcagacacacgaccaatttgaccctttggttcgaaaaatgtatagtcgaaaccgagaacctggaagagagagtagcagtggtcagcagaatcatcgaaatcctacaggtctttcaggagctcaataatttcaacggcgttctggaggtcgtgtcagccatgaattcatcccctgtctatcggctggaccacacctttgagcagattccttccagacaaaaaaaaatcttagaggaagcccacgaattgagcgaggatcattacaagaaatacctggcaaaactgcggtcaatcaacccaccctgcgtgcctttctttgggatctacctgaccaatattctgaagaccgaggagggcaatcctgaagtgctgaagcgtcacggtaaggaactcataaactttagcaaacgtcgaaaggtggcagaaattacaggcgagatacagcaatatcaaaaccaaccatactgtcttcgagtggagagcgacataaagagattcttcgaaaatttgaaccccatggggaacagcatggaaaaggaatttacagactacttgttcaacaaatcgttggaaatcgagccacgaaaccccaaaccattgccgcggttccccaaaaaatattcttacccactcaaaagtccaggagtgcggccttcaaaccctaggccaggtacaatgagacaccctacgccacttcagcaggagccccgcaaaatttcctatagccgcattcctgagagcgaaacagagagtaccgcctctgctccaaactcacctagaacacccctgacaccgcctccagcgtcgggtgcaagttcaaccaccgatgtgtgcagcgtattcgactcggatcacagttccccatttcacagctccaacgatacagtctttatacaggtcacgctgccacacgggccccgaagcgcctccgtttcttcgatttccctcaccaagggcacagacgaagtccccgtgcctccaccagttccccctcgaaggagaccagaatcagcgccggccgagtcttccccttcaaagatcatgtctaagcatttggattccccccctgctatacccccacggcagccgacgagcaaggcttacagtccacgttattctatctccgatcgaacaagcatttcagatcccccggaatctccacctctcttgcctccccgggagccggtgagaactcccgacgttttcagctcctccccattgcacctccagccccctcccctgggaaagaaaagcgaccacggcaatgcgtttttccccaatagcccgtcaccctttacgccgcctcctcctcagactccctctccgcacggaactcggaggcacctgcctagtccacctctcacgcaggaagtagacttgcattctatagcgggtccacctgtgccacctagacaatcaaccagccagcatatcccaaagttacccccaaagacttacaagcgcgagcacactcatccctctatgcatcgagacgggcctcccctgctcgaaaacgcacacagtagctag

SEQ ID NO: 158043 - DNA, 3315 bp, Artificial Sequence
  derived and/or modified sequence
atgcaggcccagcagctgccctatgagttcttcagcgaggagaatgcccccaagtggaggggcctgctggtgcctgccctgaagaaggtgcagggccaggtgcaccccaccctggagagcaatgatgatgccctgcagtatgtggaggagctgatcctgcagctgctgaacatgctgtgccaggcccagcccaggtctgccagtgatgtggaggagcgggtgcagaagagcttcccccaccccatcgacaagtgggccatcgcagatgcccagagcgccatcgagaagaggaagagaagaaaccccctgagcctgcctgtggagaagatccaccccctgctgaaggaggtgctgggctacaagattgaccaccaggtgtctgtgtacatcgtggccgtgctggagtacatctctgctgacatcctgaagctggtgggcaactacgtgaggaacatccgccactatgagatcaccaagcaggacatcaaggtggccatgtgtgccgacaaggtgctgatggacatgttccaccaggatgtggaggacatcaacatcctgagcctgacagatgaggagcccagcaccagcggggagcagacctactatgacctggtgaaggccttcatggccgagatccggcagtacatccgggagctgaacctgatcatcaaggtgttccgggagccctttgtgagcaacagcaagctgttcagcgccaatgatgtggagaacatcttcagcagaattgtggacatccacgagctgtctgtgaagctgctgggccacatcgaggacacagtggagatgacagatgagggcagcccccaccccctggtgggcagctgctttgaggacctggccgaggagctggcctttgacccctatgagagctatgcccgggacatcctgcggcccggcttccatgaccgcttcctgagccagctgagcaagccaggggccgccctgtacctgcagagcattggagagggcttcaaggaggccgtgcagtatgtgctgccccggctgctgctggcccctgtgtaccactgcctgcactactttgagctgctgaagcagctggaggagaagtctgaggaccaggaggacaaggaatgtctgaagcaggccatcacagccctgctgaatgtgcagagcggcatggagaagatctgcagcaagagcctggccaagaggcggctgtctgagagcgcctgccgcttctacagccagcagatgaagggcaagcagctggccatcaagaagatgaatgagatccagaagaacattgatggctgggagggcaaggacatcggccagtgctgcaatgagttcatcatggagggcaccctgaccagggtgggcgccaagcatgagcggcacatcttcctgtttgatggcctgatgatctgctgcaagagcaaccacggccagccccggctgcccggggccagcaatgctgagtaccgcctgaaggagaagttcttcatgaggaaggtgcagatcaatgacaaggatgacaccaatgagtacaagcacgcctttgagatcatcctgaaggatgaaaattctgtcatcttcagcgccaagtctgctgaggagaagaacaactggatggccgccctgatcagcctgcagtaccgcagcaccctggagaggatgctggatgtgaccatgctgcaggaggagaaggaggagcagatgaggctgcccagcgcagatgtgtacagatttgctgagccagacagcgaggagaacatcatctttgaggagaacatgcagcccaaggccggcatccccatcatcaaggccggcaccgtcatcaagctgattgaaaggctgacctaccacatgtatgctgaccccaactttgtgaggaccttcctgaccacctaccgctccttctgcaagccccaggagctgctgagcctcatcatcgagagatttgagatccctgagcctgagcccacagaggccgacagaattgccattgaaaatggagaccagcccctgtctgctgagctgaagcgcttcaggaaggagtacatccagcctgtgcagctgcgggtgctgaatgtgtgccgccactgggtggagcaccacttctatgactttgaaagagatgcctacctgctgcagaggatggaggagttcatcggcaccgtgcggggcaaggccatgaagaagtgggtggagagcatcaccaagatcatccagaggaagaagatcgcccgggacaatggacctggccacaacatcaccttccagagcagcccccccaccgtggagtggcacatcagccggcccggccacatcgagacctttgacctgctgaccctgcaccccatcgagatcgcccggcagctgaccctgctggagagtgacctgtacagagctgtgcagcccagcgagctggtgggctctgtgtggaccaaggaggacaaggagatcaacagccccaacctgctgaagatgatccgccacaccaccaacctgaccctgtggtttgagaagtgcatcgtggagacagagaacctggaggagcgggtggccgtggtgagccgcatcatcgagatcctgcaggtgttccaggagctgaacaacttcaatggagtgctggaggtggtgtctgccatgaacagcagccctgtgtaccgcctggaccacacctttgagcagatccccagccggcagaagaagatcctggaggaggcccacgagctgtctgaggaccactacaagaagtacctggccaagctgcggagcatcaaccccccctgtgtgcccttcttcggcatctacctgaccaacatcctgaagacagaggagggcaaccctgaggtgctgaagagacatggcaaggagctgatcaacttcagcaagaggaggaaggtggccgagatcaccggggagatccagcagtaccagaaccagccctactgcctgcgggtggagagtgacatcaagcgcttctttgagaacctgaaccccatgggcaacagcatggagaaggagttcacagactacctgttcaacaagagcctggagattgagcccaggaaccccaagcccctgccccgcttccccaagaagtacagctaccccctgaagagccctggggtgcggcccagcaaccccaggcctggcaccatgaggcaccccacccccctgcagcaggagcccaggaagatctcctacagccgcatccctgagagcgagacagagagcacagccagcgcccccaacagccccaacacagtgaacaccagcgcctgcttctggtgcttccagtaccaccgctgcctgcagtgcatctag

SEQ ID NO: 158044 - DNA, 4002 bp, Artificial Sequence
  derived and/or modified sequence
atgcaggcccagcagctgccctatgagttcttcagcgaggagaatgcccccaagtggaggggcctgctggtgcctgccctgaagaaggtgcagggccaggtgcaccccaccctggagagcaatgatgatgccctgcagtatgtggaggagctgatcctgcagctgctgaacatgctgtgccaggcccagcccaggtctgccagtgatgtggaggagcgggtgcagaagagcttcccccaccccatcgacaagtgggccatcgcagatgcccagagcgccatcgagaagaggaagagaagaaaccccctgagcctgcctgtggagaagatccaccccctgctgaaggaggtgctgggctacaagattgaccaccaggtgtctgtgtacatcgtggccgtgctggagtacatctctgctgacatcctgaagctggtgggcaactacgtgaggaacatccgccactatgagatcaccaagcaggacatcaaggtggccatgtgtgccgacaaggtgctgatggacatgttccaccaggatgtggaggacatcaacatcctgagcctgacagatgaggagcccagcaccagcggggagcagacctactatgacctggtgaaggccttcatggccgagatccggcagtacatccgggagctgaacctgatcatcaaggtgttccgggagccctttgtgagcaacagcaagctgttcagcgccaatgatgtggagaacatcttcagcagaattgtggacatccacgagctgtctgtgaagctgctgggccacatcgaggacacagtggagatgacagatgagggcagcccccaccccctggtgggcagctgctttgaggacctggccgaggagctggcctttgacccctatgagagctatgcccgggacatcctgcggcccggcttccatgaccgcttcctgagccagctgagcaagccaggggccgccctgtacctgcagagcattggagagggcttcaaggaggccgtgcagtatgtgctgccccggctgctgctggcccctgtgtaccactgcctgcactactttgagctgctgaagcagctggaggagaagtctgaggaccaggaggacaaggaatgtctgaagcaggccatcacagccctgctgaatgtgcagagcggcatggagaagatctgcagcaagagcctggccaagaggcggctgtctgagagcgcctgccgcttctacagccagcagatgaagggcaagcagctggccatcaagaagatgaatgagatccagaagaacattgatggctgggagggcaaggacatcggccagtgctgcaatgagttcatcatggagggcaccctgaccagggtgggcgccaagcatgagcggcacatcttcctgtttgatggcctgatgatctgctgcaagagcaaccacggccagccccggctgcccggggccagcaatgctgagtaccgcctgaaggagaagttcttcatgaggaaggtgcagatcaatgacaaggatgacaccaatgagtacaagcacgcctttgagatcatcctgaaggatgaaaattctgtcatcttcagcgccaagtctgctgaggagaagaacaactggatggccgccctgatcagcctgcagtaccgcagcaccctggagaggatgctggatgtgaccatgctgcaggaggagaaggaggagcagatgaggctgcccagcgcagatgtgtacagatttgctgagccagacagcgaggagaacatcatctttgaggagaacatgcagcccaaggccggcatccccatcatcaaggccggcaccgtcatcaagctgattgaaaggctgacctaccacatgtatgctgaccccaactttgtgaggaccttcctgaccacctaccgctccttctgcaagccccaggagctgctgagcctcatcatcgagagatttgagatccctgagcctgagcccacagaggccgacagaattgccattgaaaatggagaccagcccctgtctgctgagctgaagcgcttcaggaaggagtacatccagcctgtgcagctgcgggtgctgaatgtgtgccgccactgggtggagcaccacttctatgactttgaaagagatgcctacctgctgcagaggatggaggagttcatcggcaccgtgcggggcaaggccatgaagaagtgggtggagagcatcaccaagatcatccagaggaagaagatcgcccgggacaatggacctggccacaacatcaccttccagagcagcccccccaccgtggagtggcacatcagccggcccggccacatcgagacctttgacctgctgaccctgcaccccatcgagatcgcccggcagctgaccctgctggagagtgacctgtacagagctgtgcagcccagcgagctggtgggctctgtgtggaccaaggaggacaaggagatcaacagccccaacctgctgaagatgatccgccacaccaccaacctgaccctgtggtttgagaagtgcatcgtggagacagagaacctggaggagcgggtggccgtggtgagccgcatcatcgagatcctgcaggtgttccaggagctgaacaacttcaatggagtgctggaggtggtgtctgccatgaacagcagccctgtgtaccgcctggaccacacctttgagcagatccccagccggcagaagaagatcctggaggaggcccacgagctgtctgaggaccactacaagaagtacctggccaagctgcggagcatcaaccccccctgtgtgcccttcttcggcatctacctgaccaacatcctgaagacagaggagggcaaccctgaggtgctgaagagacatggcaaggagctgatcaacttcagcaagaggaggaaggtggccgagatcaccggggagatccagcagtaccagaaccagccctactgcctgcgggtggagagtgacatcaagcgcttctttgagaacctgaaccccatgggcaacagcatggagaaggagttcacagactacctgttcaacaagagcctggagattgagcccaggaaccccaagcccctgccccgcttccccaagaagtacagctaccccctgaagagccctggggtgcggcccagcaaccccaggcctggcaccatgaggcaccccacccccctgcagcaggagcccaggaagatctcctacagccgcatccctgagagcgagacagagagcacagccagcgcccccaacagccccaggacccccctgaccccacctccagccagcggggccagcagcaccacagatgtgtgcagcgtgtttgacagcgaccacagcagccccttccacagcagcaatgacacagtgttcatccaggtgaccctgccccacggccccaggtctgcctctgtgagcagcatcagcctgaccaagggcacagatgaggtgcctgtgcccccacctgtgccccccaggagaagacctgagagcgccccagctgagagcagccccagcaagatcatgagcaagcacctggacagccccccagccatccccccccggcagcccaccagcaaggcctacagcccccgctacagcatcagtgacaggaccagcatcagtgaccccccagagagcccccccctgctgcccccccgggagcctgtgaggaccccagatgtgttcagcagcagccccctgcacctgcagcccccacccctgggcaagaagagtgaccacggcaatgccttcttccccaacagccccagccccttcaccccacctccaccccagacccccagcccccacggcacccggcggcacctgcccagcccccccctgacccaggaggtggacctgcacagcattgctggcccccctgtgcccccccggcagagcaccagccagcacatccccaagctgccccccaagacctacaagcgggagcacacccaccccagcatgcacagagatggcccccccctgctggagaatgcccacagcagctag

SEQ ID NO: 158045 - DNA, 3315 bp, Artificial Sequence
  derived and/or modified sequence
atgcaggcccagcagctgccctacgagttcttcagcgaggagaacgcccctaagtggagaggcctactggtgcctgctctgaagaaagtgcagggacaagtccacccaaccttggaaagtaacgacgacgcactgcaatacgtcgaagagttaatcctccaactcctgaatatgctgtgccaggctcaaccccggtcagcttcagacgtagaagaacgggtccagaagagctttcctcatcctatcgataagtgggcaattgccgatgcccagagcgctatcgagaaacggaagcggaggaacccactgagtctaccggtcgagaagatacatcccctcctgaaagaagtccttggatataagatagatcatcaggtttcagtgtatatcgttgcagtcctcgaatatatttccgccgacatcctcaaacttgtgggcaattatgttcgcaatattcggcattatgaaattactaagcaagacatcaaagtagctatgtgtgcagataaggtattaatggatatgttccaccaggacgttgaagatatcaatatcctgtccctgaccgacgaagagccttcaacctctggagaacagacttactacgatctggtcaaagcattcatggccgaaattcgccagtatattcgagaactgaatctgataatcaaagtctttcgtgagcccttcgtgagcaattcaaagctgttcagcgccaatgatgtggagaatatctttagtcggatcgtggacatccatgagctcagcgtgaagcttttagggcatatagaagacacagtggaaatgacagacgaggggtcccctcacccgctagttgggtcttgttttgaggaccttgcggaagaattggcctttgatccatatgagtcatacgcaagagacatcctgagacctgggtttcacgatcgctttctgtcccagcttagcaagccaggtgccgccctgtatctccagtctatcggagaggggttcaaggaagctgtgcagtacgtcctgccccggctgctcctggccccagtataccactgtttgcattatttcgagctgctgaaacagctggaggaaaaatcagaagatcaggaagacaaagaatgcctcaagcaagccataactgctcttttaaacgtgcagagcgggatggaaaagatatgcagcaagtcattagccaaacgacgtctttccgaatccgcctgtcggttttattcccagcagatgaagggaaagcagctggcgataaaaaagatgaatgaaattcagaaaaacattgacggatgggagggtaaagatatcggacagtgctgtaacgagtttattatggagggaacccttacaagagtaggggctaagcacgagcggcacatcttcctttttgacggtctgatgatctgctgtaagtccaaccacgggcaaccgcggctgcctggcgcgtctaacgcagaatacaggctgaaggaaaagttctttatgcggaaggtgcagattaatgacaaggacgatacgaatgagtacaagcacgcttttgagataatactgaaggatgagaacagcgtgattttcagtgccaagtcagcagaggaaaaaaataattggatggccgcactcatttccttacagtataggtcaactctcgaaaggatgcttgatgtgaccatgctgcaggaggagaaagaggagcagatgagactgcctagtgccgatgtgtacaggtttgccgagcctgatagtgaagaaaacatcatctttgaagagaacatgcagcctaaagccggaatcccgatcatcaaggccggtactgtgataaagttgatcgaaaggcttacctaccatatgtatgctgacccaaattttgtacgaacttttctgaccacatatagatctttttgtaaacctcaggagttgctttctttgatcatcgaacggttcgagatccctgagcccgagccaactgaggctgatagaattgctatcgaaaacggtgatcagcccctgtctgctgagctgaagcggttcagaaaggaatatatccagcccgttcagctgagggtgctaaatgtttgtcgccactgggtagaacatcacttttacgattttgaacgagatgcttatctgctgcagaggatggaggaatttattggaacagtcaggggcaaagccatgaagaaatgggtggaaagcatcaccaaaatcatccagagaaagaaaatcgcaagggacaatggccctgggcacaacattacctttcagtccagtcctccaaccgttgagtggcatatttccaggcctggtcacatcgaaacattcgatttgctgacactccaccctattgaaattgcgagacagcttactctgctggagtccgacttatacagggctgtgcagccaagcgagcttgtcggatctgtttggacaaaggaggataaggaaatcaatagccccaatctgctgaaaatgattaggcacaccaccaatctgaccttatggttcgagaagtgcatagtcgagacagaaaacctggaagaaagggtggccgtggtttcacgcattattgagatactgcaggtattccaggagctaaacaactttaatggggtgcttgaggttgtgtccgcaatgaactccagcccggtatatcgacttgatcataccttcgagcagatcccctcaaggcagaagaagattctcgaagaagctcacgagctgtcagaggatcactataagaaatatctggccaaattacgatctattaaccctccttgcgtgccctttttcggtatttatctgaccaacatcctcaagacagaggaagggaatcccgaggtgctcaagagacatggcaaggagctcataaatttctccaaaaggagaaaagttgcagagattactggcgaaatccagcaatatcaaaatcaaccttactgcttaagagtagaatcagatatcaaaaggtttttcgagaatctgaacccaatgggtaattccatggaaaaggagtttactgattacttgttcaacaagtccctggaaattgaaccccgaaaccctaaacctttgccccggttccccaaaaaatattcatatccacttaaaagcccaggagtgaggccttctaacccaaggcccggcaccatgcgccacccaacccccctgcagcaggagccccgaaagataagctactcccggataccggagtcagagactgaaagcactgcttctgccccaaactccccaaatactgttaacacatccgcatgcttctggtgctttcaataccatcggtgtctgcagtgcatatag

SEQ ID NO: 158046 - DNA, 4002 bp, Artificial Sequence
  derived and/or modified sequence
atgcaggcccagcagctgccctacgagttcttcagcgaggagaacgctcccaagtggcgcggcctgttggttccggccctcaagaaggttcaggggcaggtgcaccccactttagaaagcaacgacgatgccctgcagtatgttgaggagctaatacttcagctgctcaacatgctgtgtcaggcacagccacggtctgcaagtgatgtggaggaacgagtacagaagtcattccctcaccctattgataagtgggccatcgcagacgcacagtcagctatagagaagcggaaacggcgcaacccgctctcactgcccgttgaaaagattcatcccttgctcaaggaagtgttggggtacaaaatcgatcaccaggtgagcgtgtacatcgtggccgtcctggagtatatatccgctgatattctaaagctggtgggaaattacgtccgtaacattcggcattatgaaattacgaagcaggacatcaaggtggctatgtgcgctgacaaggtgctaatggacatgtttcaccaagacgtagaagacataaacatcctctctctaactgacgaagagcccagcaccagcggggagcaaacgtactacgatctggttaaggcttttatggcagagatacgccagtacattcgggaactgaatttgattattaaggtgtttcgtgaacccttcgtcagtaattccaagctctttagcgcaaatgacgttgagaatatctttagcaggatagtggacatccatgaactttcagtgaagctactcggccatattgaggatacggtggaaatgacagacgaaggatctccccatccactcgtggggtcctgcttcgaagatctggcggaggagctcgccttcgatccttacgaatcttatgcacgtgatatcttacggccggggttccatgatcgatttctttctcagctgtccaagccaggcgcagctctgtacctgcaatccataggagagggcttcaaagaagccgtgcagtacgtgctgccgcgcctcctgctcgctcctgtgtaccactgcctgcattacttcgagctgctaaaacaacttgaagagaagtctgaagatcaggaagacaaggaatgtttgaagcaggctataacagccttgctgaatgttcagagcggaatggaaaagatctgtagcaagtcgctggctaaacggaggttgtcggagtctgcctgtcgattttatagccaacagatgaaggggaagcagctggcgattaagaaaatgaatgagattcagaagaacatcgatggctgggagggaaaggatatcgggcaatgctgcaatgagtttatcatggaggggaccttgactcgagtgggtgctaaacacgagagacacatctttctctttgacggactcatgatttgttgcaagtctaatcacggtcagcctcggctgccaggcgccagtaacgccgagtatcgccttaaagaaaagttcttcatgagaaaagtgcagataaacgacaaggatgacacaaacgaatacaagcatgccttcgagataatcctcaaggatgaaaattcagtcatattctctgcaaaatcagctgaagagaaaaataattggatggccgcactgattagcttgcagtacagatccactctggagcggatgctggatgtcaccatgcttcaggaagagaaggaagaacagatgcgtctcccatcggccgacgtgtacaggttcgcagagccagactcggaggaaaatattatcttcgaagaaaacatgcagcccaaggcgggcatccccattattaaagccggtacggttattaagcttattgaaaggttgacttaccatatgtatgccgacccaaactttgtgcgtaccttcctgacgacgtatcggagtttctgtaagccccaggaattgttatctctgattatcgaaagatttgagatccctgaacccgagccgactgaagccgataggatcgccatcgagaacggagaccagcctctgtccgcagaactcaagagattccgcaaggaatatatccagcccgtccagctgcgcgttctaaacgtctgtagacactgggttgaacatcatttttacgactttgagcgggatgcatacctgctgcagcgcatggaggaattcattggcaccgtacgaggcaaggccatgaagaaatgggtggagtctattacaaagatcattcagaggaaaaagatagcccgtgacaatggccccggacacaatattactttccagtctagcccccccaccgttgaatggcacatctcccgccccggccacatcgaaacattcgacctcctcacgttgcacccgattgaaatcgctcgacagttaacgctccttgagtcggatttgtaccgagccgttcagcccagtgagttagtgggctccgtctggactaaagaggataaagaaatcaacagtccaaacctcctgaaaatgataaggcatactactaaccttaccttatggtttgagaaatgcatagtggagactgagaacctggaggaaagggtagcagtggtgtcccgcattatcgagattttgcaggtgtttcaggagctgaacaacttcaacggggtgctggaggtggtcagcgcaatgaatagcagcccagtgtatcggctggaccacacgttcgaacagatcccttcccggcagaaaaaaatcctcgaagaggcacacgagctctccgaagatcattataaaaaatatttggcaaagctccgatctattaacccgccctgtgtgccttttttcgggatttatcttactaatatattgaagaccgaagagggcaaccctgaagtcctaaaaaggcacggtaaggaacttataaatttcagtaagcggagaaaagtggccgagatcaccggagaaatacagcagtaccagaaccagccatactgcctgagagtggaaagcgatatcaaacgattcttcgagaatctgaatcccatgggtaattccatggaaaaagaattcactgactacttgtttaataagtcactcgaaatcgagccgcgaaatcccaagcctctgcccaggtttcccaagaaatactcataccctctcaaatctccaggagtgcgccccagcaaccccagaccaggcactatgagacacccaacaccccttcagcaggagcctcgaaaaataagctacagtagaattcctgagtcagagactgaatcgacagcctctgcacccaatagccccaggaccccactgacaccgcctcccgctagtggagcatctagcacgaccgatgtttgctcagtgtttgactccgaccatagctcccccttccactcgtcgaacgacacagtgttcattcaggttacgctgcctcatggccccaggtccgcttccgtttcttcgataagcctgacaaaagggaccgatgaggtgcccgttccaccacccgtgccaccccgacggcgtccagagtctgccccagccgagtcaagcccaagtaaaatcatgagcaaacaccttgatagtcctcctgccataccccccagacagcctacttccaaagcctacagcccacgatactccatttccgatagaacttcaatttccgacccaccggagtcaccccccctgcttcctcctcgcgaacctgtgaggaccccagacgtattttcttcttcccctctccacctgcagcctcctcccctcggtaagaagagtgatcacggtaacgcatttttccccaattccccgagccctttcacccccccacctcctcagacgccaagccctcacggcacgcgccgccatttgccctcacctcccttgacacaagaagtcgatctgcattcgatagccggcccccccgtgcccccgcgccagtccacctcacagcacattccaaagctccctcccaaaacttacaagcgtgaacacacacaccctagtatgcaccgagatggccctcctctattagaaaatgctcattcatcatag

SEQ ID NO: 158047 - DNA, 4002 bp, Artificial Sequence
  derived and/or modified sequence
atgcaggcccagcagctgccctacgagttcttcagcgaggagaacgccccgaaatggcgtggtctcttagtgccagcgctgaagaaggtccagggacaggtgcaccccacactcgagtcaaacgatgatgcactccagtacgtggaagagttaatccttcagctgctgaatatgctctgccaggcccaacctcgttctgcttctgacgtagaggagcgggttcagaagagttttccacaccctatcgacaaatgggcaatcgccgatgctcagtcagcgattgaaaagcgcaagcggcgaaatccactttctctacctgtggaaaaaattcatcctctcctgaaagaagtcttgggctacaaaatcgatcatcaggtttctgtgtatattgtagccgtcctcgaatatatatcggcagacatcctgaagctcgttggcaactacgtgagaaacatccgccactacgagatcacaaaacaggatataaaggtggccatgtgcgctgacaaggtccttatggatatgtttcaccaggacgtggaggacataaacatcctgagtcttacggatgaggaaccttccacaagcggcgagcaaacctattatgatttggtaaaggctttcatggctgaaattcgccagtatataagagaacttaatctgattatcaaagtgttccgggaaccttttgtatcaaactcaaagttattttcagcaaatgacgtcgaaaatattttttcaaggattgtcgatatccacgaattgagcgtcaagcttttagggcatattgaggacacagtagaaatgacggacgaggggtctcctcaccctcttgtcggatcatgcttcgaggatttagcggaggaattagccttcgacccatacgagagttacgcaagagatatcctgagaccagggtttcacgatcggtttctctctcagctatcaaagcccggggctgccctgtatctgcaaagtatcggcgagggattcaaagaggcagtgcagtacgttctccctcgcctgcttctcgccccagtgtaccactgtctgcattacttcgagcttttaaagcagctcgaggaaaaatcagaggatcaggaggataaagaatgtttaaaacaagcaattaccgccctgctaaacgtccagagcggaatggagaaaatctgctcaaagagcttagccaaacgtcggctgagtgagagtgcttgcaggttctacagccagcagatgaaaggcaagcagctcgcaatcaagaagatgaacgaaattcagaaaaacatcgacggatgggagggaaaggacatcggccagtgttgcaacgaatttatcatggagggcactttgacacgtgtgggcgctaagcacgagagacatattttccttttcgacggactgatgatctgctgtaaaagcaaccacggccagccaagacttccaggcgctagcaatgcggagtatagactgaaagaaaagttttttatgaggaaagtccagatcaacgacaaggatgacaccaacgaatacaaacacgccttcgagatcatccttaaagacgagaacagtgtcatcttctccgccaagtctgctgaagagaagaacaactggatggctgcacttataagtctgcagtacaggagtactctggagagaatgctggacgtaacaatgttgcaggaagagaaagaggaacagatgaggctcccctccgctgatgtgtatcggtttgccgagcctgacagcgaagagaacatcattttcgaggaaaatatgcaaccaaaggcaggtattccaattatcaaggccgggacagtaataaagttaatcgagcgcctgacctaccatatgtatgctgaccctaacttcgtcaggactttcctaaccacttaccgctcattttgtaagcctcaggagctgctctccttgatcattgagcgcttcgagattcccgagcctgagcctactgaagctgatcggattgcaatcgagaatggcgatcagcccctgagcgccgagctgaagagattccgcaaggagtatattcagcctgtacagctgagagtactcaacgtgtgccggcattgggtggagcaccacttttatgattttgagcgagacgcatacttgctgcagcggatggaagagtttatcgggaccgttcgcggcaaagcgatgaagaagtgggtggaaagtattaccaaaattatccagcgaaaaaagatcgcccgtgataacggacccgggcacaacatcacgttccagagctcccctccaactgtggagtggcacatctcacgaccagggcacattgagactttcgatcttctaacacttcatccgattgagatcgcaaggcaacttactctattggaatccgatttgtatcgggctgtccagcctagcgaactggtgggcagcgtgtggaccaaagaggacaaggagattaactcccccaacctattgaaaatgatccggcacactaccaacctgaccttgtggtttgagaagtgcatagttgaaacagaaaatctggaagaaagagtggccgtcgtctcgagaataatcgagattctgcaggtgtttcaggagttgaacaacttcaacggagtgctggaggtggtgtctgcgatgaattccagccctgtgtatcgcctggaccatacctttgagcagatccctagtcggcaaaaaaaaattctggaggaagctcacgagctgtcagaagaccattacaagaaatatctggccaaactgagatctattaatccaccatgcgtgccgttcttcgggatctacctgacgaacatccttaagaccgaagaggggaatccagaggtgcttaagcgacacgggaaggaactgatcaatttttcaaagcggcgaaaggtggccgagatcacaggggagattcaacagtaccagaaccagccctattgtctgcgagtcgagagtgatataaaacgattttttgagaatctgaaccctatggggaattcaatggaaaaagagttcacagactacttgttcaacaaatctctcgagattgagcctaggaacccgaagcctctgccccggtttcctaagaagtatagctaccccctgaagtctccgggtgttcgcccttctaaccctaggcctggaactatgcgccaccctaccccattgcagcaagagccccggaaaatcagttactccagaatccctgaatctgagacagagtctacagcctcagcgccaaactcccctcggacccccctgaccccccctccagccagtggagccagtagcacaacagatgtttgctcggtctttgacagcgatcattctagcccattccactccagcaacgacaccgtctttatacaggtgacactgccacatggaccgcgctccgccagtgtgtctagcattagtcttacaaaaggcacggatgaagtgcccgtgccaccaccagtgcctccaagaagaagacctgagtccgctcccgccgaaagtagccctagcaagatcatgtctaagcacctggactctcctccagccattccaccccgacaaccaacctccaaagcttacagccccaggtactccatcagtgaccgaacttccatcagcgacccacctgaatcccctccattgctgcccccacgtgaacccgtaaggactcccgacgtatttagcagctcaccattacacctccagccaccgcctctcggcaagaagagtgatcatggaaacgcctttttccctaactcaccaagtccatttactccaccgcccccccagaccccatcacctcacgggactaggcggcacctgccttcacccccactgacccaagaggtcgacctgcacagtatagcgggcccccctgtgccaccaaggcagagcacctcacaacacattccaaagttacctcccaagacgtataagagggaacacacccacccgagcatgcatagggatggcccgcccctgctggagaatgcccactcaagttag

SEQ ID NO: 158048 - DNA, 3315 bp, Artificial Sequence
  derived and/or modified sequence
atgcaggcccagcagcttccctatgagttcttttctgaggagaacgctccaaagtggcgcggactgctcgtgcctgcgctgaagaaggtgcagggacaggtgcaccccacgctggaatcaaacgacgatgccctccagtacgtggaagaactgatcctgcagctgcttaatatgttgtgccaggcgcagccacggtccgcctctgacgtggaagagcgcgtgcagaaatcctttccgcatcccatcgataaatgggctatcgctgacgcccagagcgctattgagaaacgcaaaagaaggaaccctctgagcctccccgtcgagaaaattcatcctctgttaaaagaagttctaggatataagatcgaccaccaggtctctgtgtacatcgtcgccgtgttagaatatatctcagcagatatactgaagttggttggcaactatgtgagaaacatcaggcactacgaaattaccaagcaggacataaaagttgccatgtgtgcggacaaggtgctgatggatatgtttcatcaggatgtggaggacattaacatccttagcttaaccgacgaggagcccagcacgtccggcgaacagacttattatgacttggttaaggcctttatggcagaaataagacagtatattcgcgagctgaaccttatcataaaggtgttccgggaaccattcgtttcaaacagcaaattattctctgccaatgatgttgagaacatcttcagtagaatcgtcgatattcacgagctctccgtaaaactgcttggccatattgaggacactgtggaaatgaccgatgagggctcccctcacccactcgttggatcttgctttgaggatctggctgaggagttggctttcgacccttacgagagttatgcgcgagacatcctcaggcctgggtttcacgaccgattcctcagccagttgtccaaaccaggggctgctctgtacctccaatcgattggcgagggtttcaaagaggcagtgcagtatgtactccctcggcttctcttagcgccagtgtatcattgtctccactactttgaactcctgaagcagctcgaagaaaagtccgaagaccaggaagacaaggaatgcttgaaacaggctatcacggcgctcctgaacgtgcagtctgggatggaaaagatatgctcaaagagtctggctaaaaggaggcttagtgaaagcgcgtgtcgcttttattctcagcagatgaagggcaaacagcttgccatcaagaagatgaacgagatccagaaaaatatcgatggttgggagggcaaagatatcgggcagtgttgcaatgagtttatcatggagggcaccctcacccgcgtcggcgcaaaacacgagcgtcacatctttctcttcgatgggctgatgatttgctgcaaatccaatcatggccagcctagactgcctggagcttccaatgcggagtaccgcttaaaagaaaagttttttatgcgaaaagttcagattaacgataaggatgatacgaatgaatataagcatgctttcgagatcatactcaaagacgagaattcagtcattttctccgcgaaatctgcagaggagaagaataactggatggccgctctgatcagcctccagtacagatccaccttggagagaatgctggatgtgacaatgctgcaggaagagaaggaggagcaaatgagactccccagtgccgacgtgtaccggtttgcagagcctgactctgaggaaaatatcatcttcgaggaaaatatgcagcctaaggccggaattcctatcattaaggccggaaccgtcattaagctgattgagaggttaacataccacatgtatgccgacccaaatttcgtccgcacctttctcactacatacagatctttctgtaagccgcaagaacttctgagcctgattatagaacgcttcgaaatccccgagcctgaaccaaccgaggccgaccggatcgctatcgagaacggggatcagccactgtccgcagagttaaagaggttccggaaggagtatatccagccagtgcagctacgggtgcttaacgtgtgcaggcattgggtagagcatcacttctatgattttgagcgcgacgcttacctgctgcaacggatggaagagttcattggcacagtcagaggtaaggccatgaaaaagtgggtggagtctattaccaaaatcattcaaaggaaaaagattgcacgggacaacggccctggacataacataacattccagagttcccccccaaccgtagaatggcatatcagccggcctggccatattgaaacctttgacctgttaacactccaccccatcgagattgcgcgtcagctgacccttctagaatctgacctttatcgtgccgtgcaacccagtgagctggttggcagcgtctggacgaaggaggataaagaaataaactcaccaaatttgcttaaaatgatccgacacactacaaaccttactctgtggtttgaaaagtgtatagtcgaaacagagaatcttgaagagagggtagctgtagtttctagaattattgagatcctacaagtcttccaggagctcaacaatttcaatggcgtcctggaggttgtcagcgcaatgaattcatcccctgtatacagactggaccacaccttcgaacagatccctagtaggcagaagaagatcctggaagaagcccacgagctatccgaagatcattacaagaaataccttgcaaagctccgcagcattaatcccccatgcgtccccttttttggtatatacttgacaaatattttgaaaactgaggaggggaatccggaggtgttgaaacggcacggaaaagagctgataaacttcagcaaacggcgtaaagtggcagaaattaccggagaaattcaacaataccagaaccagccatattgtctgagagtggaatccgacatcaaacgcttttttgaaaacctgaatcctatgggcaactctatggagaaggagttcacagactacttgtttaacaaatctcttgagattgagccccgtaatcctaagccactgccacggtttcccaagaagtactcttatcccttgaagtccccgggtgtacgaccaagtaacccacgtcctgggaccatgaggcaccccacacctttacagcaggagcctagaaagattagctactcacggatcccagaaagtgagacagagagcactgctagcgccccaaactccccaaacactgtcaacacctccgcctgtttctggtgttttcagtaccatcggtgtttgcagtgcatttag

SEQ ID NO: 158049 - DNA, 4002 bp, Artificial Sequence
  derived and/or modified sequence
atgcaggcgcagcaactgccctatgagttcttctctgaagaaaacgctcccaaatggcgtgggctcctggttcctgctctaaagaaggtacaggggcaggtccacccaaccctcgagagcaatgatgatgcactgcaatatgtcgaggagctgatcctgcagcttctcaacatgttatgtcaagcacagcccagatcagctagcgatgtggaggaaagggtgcagaagagcttcccgcatccaatcgacaaatgggcgatagccgacgcacaatctgctattgagaaacggaagcgcagaaatcccctgtccctgcctgtggagaaaatccacccgttattgaaggaggtccttggttacaaaatcgaccaccaggtgagcgtctacattgtcgccgtgttggagtatattagcgctgacattcttaagctggtgggcaattatgtgcgcaacattcgccactatgaaatcactaaacaagatataaaagtggcgatgtgcgctgataaggtgttgatggacatgttccatcaggatgtggaggacatcaacattctttccctgactgatgaagagccaagcacttcaggtgagcaaacgtactatgacctggtgaaagccttcatggctgagattcggcagtatatcagagaattaaacctgataatcaaggttttccgagagccatttgtatcaaactctaaattattcagtgcaaatgatgtcgagaatatcttttcccggatcgtagatatccacgagctgtccgtaaagctcctaggtcatatcgaagacactgtcgagatgacagacgagggctcacctcaccccttagtaggtagttgcttcgaagacttggccgaagaattagcctttgacccctatgaaagctatgcaagagatatactgcgcccaggatttcacgacagatttctgagccaactgagcaaaccaggcgcagccctgtatctgcaatccatcggcgaaggcttcaaagaagcggttcagtatgtcctgccgaggttgttgttagcgccagtctaccactgcctgcactacttcgaacttctgaagcaactcgaagagaagtccgaggatcaggaagacaaggaatgtttgaaacaggcgattaccgctctcctgaatgttcaatcgggcatggagaagatctgcagcaagagtctggcgaagagaagactgagtgaatctgcctgcagattctattcccagcagatgaaagggaaacagttggctatcaaaaagatgaacgaaattcaaaagaatatcgacggatgggagggtaaggacatcggtcagtgctgtaatgagtttattatggaaggtactctcacacgggtgggcgcaaagcacgagcgccatattttcctgtttgatggcctaatgatctgttgtaagtcaaatcatggacagccacgtctgccaggcgctagcaatgccgagtacagactcaaggagaaattttttatgcggaaggtacagatcaatgacaaagacgataccaatgagtacaaacacgctttcgaaatcatactcaaagacgaaaatagcgtcatattttctgcaaaaagtgctgaagagaaaaataactggatggccgcactcatctctctgcaatataggtcaaccctggagcgcatgctggatgttaccatgctgcaggaagaaaaagaagaacagatgaggctgccttctgccgatgtctatcgcttcgccgaacccgacagtgaggagaacatcatttttgaagaaaacatgcagcccaaagcaggcatccctatcattaaggccggaaccgttataaagctgattgaacgcctgacataccacatgtatgcagaccctaatttcgtgcgtacctttctcactacataccgcagtttttgcaaaccacaggaacttttgtctctaatcatagagagattcgaaatccctgagccagaacctacagaggctgaccgcatcgccatcgagaacggagatcagccgctgtcagccgagctgaagcgcttccgaaaagagtatatccagccagttcaattgcgggtgctgaatgtgtgccggcattgggtcgagcaccacttttacgattttgaacgtgacgcctatctgcttcagcgtatggaagagtttatcggcactgtgaggggaaaggctatgaagaaatgggtagagtcaatcacaaagataattcagaggaagaagattgctagagacaacgggccaggccataatatcacattccagtcttctccgcctactgtggagtggcacatcagtaggcctgggcacattgaaacatttgatctgctgacccttcaccctatcgaaatcgcccgacagctgactcttctggaatccgacttgtatcgagcagtgcagccgtcagaactggttggctccgtttggacaaaggaggacaaggagatcaatagcccgaacctccttaagatgatcaggcacactaccaacctgaccctgtggtttgaaaaatgtatcgtagagactgagaacctagaggagcgcgttgccgtggtttcgcggatcatagagatattacaagtcttccaggagttgaacaactttaacggcgttctcgaggttgtgtccgccatgaattcttccccggtgtatcggctagaccacacctttgagcagataccgtctcgccagaaaaagatcttagaggaggcccacgagctttcggaagatcactacaaaaagtatttggccaagctgcgctccatcaaccctccctgtgtccctttcttcgggatttacctgacaaatattctgaaaacagaagaagggaacccagaggtgctcaaacggcatgggaaagagctgataaactttagcaagcggcgaaaggtggctgaaatcacaggtgagatccagcagtatcagaaccagccctattgcctccgggtggaaagtgacatcaagcgattctttgaaaatttaaacccaatgggtaactcaatggagaaagaattcacagattatttgttcaacaagtccctcgagatcgaaccacgaaatcctaaaccattgccccgattccccaaaaagtacagctatcccctcaaatcgccaggtgttcgacctagcaacccacgacctgggactatgaggcacccaacccccctccagcaagagcctcgaaagatctcctactcccgaatcccagaatcggaaacagagagcacagcgagcgcaccaaacagtccaagaacacctctaactccacctcctgccagcggggcatcatctacaaccgatgtctgctcagtgtttgattccgaccactccagcccatttcatagttcaaatgatactgtgtttattcaagtaactctgccccacggcccaagatcagcgtccgtgagttccataagcctgaccaagggcactgacgaagtcccagtgccacccccagttccccctcgtcggaggccggaaagcgcacctgctgaatcgtccccctctaaaatcatgtccaaacaccttgattcaccacctgccatccctccccgtcagcctacaagcaaagcgtatagtccaagatattccatctcagaccgaacttccatctctgaccctcccgagtcacctcccctgttgcctccacgggaacccgtgaggactccggatgttttctctagctccccactccacctgcagcctcccccactgggcaagaagtcagatcacggaaacgcctttttccctaacagcccaagcccctttactcctccgcctccacaaaccccaagtcctcatgggacaaggagacacctgccatccccacccctcactcaggaggtagacttacactctatagccggaccccctgttccaccacgccagtccacttcccaacacattcccaagctcccgcctaagacgtataaacgcgaacacactcaccccagcatgcacagagacgggcctcctttgctcgaaaacgctcactccagttag

SEQ ID NO: 158050 - DNA, 4002 bp, Artificial Sequence
  derived and/or modified sequence
atgcaggctcagcaacttccttatgagttcttcagtgaggagaatgcccctaaatggcggggtctgctggtgcctgctctgaaaaaagtgcaaggacaggttcacccaacactcgagagtaacgacgatgctctccagtatgtcgaagagctcattctccagctgctcaacatgctgtgccaggcccaacccagatccgcgagcgatgtcgaggaacgggtgcagaagtcatttccacatcctattgacaaatgggcaattgccgacgctcagtccgccattgagaagcggaagaggcgaaacccgttgtcactccccgtggaaaaaattcacccccttttgaaggaggtcctggggtataaaatcgatcaccaggtttctgtgtacatcgttgccgtgttggagtatatcagcgcagacatccttaagcttgtggggaattatgtcagaaatatccgccattatgagattaccaaacaagacatcaaagtagctatgtgtgcggacaaggtgctgatggacatgttccatcaggacgttgaggacattaatatcctgagcctaacagatgaggagccaagcacaagcggagagcagacatattatgacctcgtgaaggcttttatggcagagatcagacaatatatccgtgagcttaatcttattattaaggtcttccgggaaccgttcgtatcaaatagcaagctgttttcggcaaacgacgttgaaaatatcttctctcgcatcgtggacatccacgagcttagcgtaaagcttctgggacacatcgaagataccgtcgagatgacagacgagggctctccccatcccttggttggcagttgtttcgaggacttggccgaagaattagcctttgacccttacgagtcttacgctcgggacatactgaggccagggttccatgacagatttttaagccagctgagcaaacccggagccgcactctatttacaatctattggtgaaggtttcaaggaggccgtgcagtacgttctcccacgtctgctgctggcacccgtgtatcattgtctgcactactttgagttgcttaaacagctcgaggagaagtccgaggaccaggaggacaaagaatgcttgaaacaagctatcacagctctactgaacgtgcagagcggcatggaaaagatttgttctaaaagcctggcaaagcgacgcctgtctgaaagtgcatgtcgtttctactcacagcagatgaagggaaagcagctagccattaagaaaatgaatgaaatacagaagaacattgacggttgggaaggtaaagatattgggcagtgttgcaacgagttcataatggagggcactctgacgcgggtgggggcaaagcatgagcgccacatcttcctcttcgacggattgatgatctgctgtaagtctaaccatgggcagccaagactgcccggtgcaagtaatgcggaatatcgactcaaagagaaattcttcatgcgtaaggttcaaataaacgacaaggacgatacaaatgaatataaacacgcttttgaaattattctgaaggatgagaacagcgtcatcttctctgctaagtccgccgaagagaaaaacaattggatggctgcattgatctccctgcaatacaggtccactctcgaaagaatgttggacgtgactatgctccaggaggagaaggaggagcagatgagactgccatcagctgacgtgtacagatttgccgaacccgattccgaagaaaacattattttcgaggagaacatgcagccaaaggccggaatcccaattattaaagctggcacagtgataaaactcattgagcgactcacatatcacatgtacgcagatcccaattttgtgagaacgtttctaacgacataccgtagcttttgtaaaccccaagaactgctatcccttattatcgagaggttcgaaattccagaaccggagcctactgaagcagaccggatcgcgatagagaacggggaccaacccctctcagcagagctgaagagattcagaaaggagtacattcagcccgttcagctgcgagtactcaacgtttgccgtcattgggtggaacatcatttctatgattttgaacgcgatgcgtatctgctgcagagaatggaggaatttattggaaccgtgaggggaaaggccatgaagaaatgggtggaaagcatcaccaagatcatccagcgaaagaaaatcgccagagacaacgggcctggtcacaacattactttccagtcatcaccaccaacagtcgagtggcatatttctaggccaggccacattgaaacatttgacctcctgactctgcatccaatcgaaatagcgaggcagctgaccttgctggagtctgatctgtaccgggctgtacagccttcagaactggtgggcagtgtttggactaaagaggataaggaaattaactctccaaatttgcttaaaatgatcaggcatacaacaaatcttacactgtggtttgaaaaatgtatcgtggagactgaaaatctggaggagagggttgcagttgtttctcgcatcattgaaatcctgcaggttttccaggagttgaacaattttaatggagtgcttgaggtggtcagcgcaatgaacagtagccctgtatacagactggaccacactttcgagcagatcccttcacggcaaaagaagattttggaagaggcgcacgaactgagcgaagatcactacaagaaatacttggctaagcttcgcagtataaatcccccatgcgtgccgttctttggtatttacttaaccaacattctcaaaacagaagagggcaaccccgaagtgctgaagcggcatgggaaagagcttatcaactttagtaaacgacgaaaagtggcagagataacaggggaaatccagcagtatcagaatcagccttattgtctgagagtcgaaagtgatatcaagaggttcttcgaaaacctcaatccaatggggaattctatggaaaaggagttcaccgactatttgtttaataagtccctggagattgagcccaggaatcccaagcctctaccccgtttcccaaaaaaatattcttaccctctgaagagtcccggagtacgaccttccaaccctcggcctggtactatgagacacccaactcccctgcagcaggaaccgaggaaaatctcctattcaaggatccctgaatccgagacggagtctacagcctccgcgccaaacagtccacgcacccccctgaccccacctcccgcaagcggcgcaagctcgaccacggatgtttgcagcgtgttcgactcagatcattctagcccctttcactctagtaatgacacagtattcatccaggttacattgccccacggccctcgttcagcttccgtgtcttccatttcgttaaccaagggaactgacgaggtgcctgtgccgcctccagttccccctcgtaggcgcccagagtcagcccctgccgagtcgtctccttccaaaatcatgagtaagcacctggactctcctccagccatccctcctagacaacccaccagcaaagcatattcccccagatactccattagtgataggacgtccattagcgaccctcctgaatcaccccctcttcttccccctcgagaacccgtgagaacccctgatgtgtttagctcttcgccactccacctgcagccaccacccctcgggaaaaagagcgaccatgggaacgcttttttccctaacagcccatcccctttcacccccccaccaccgcaaacaccctctccacacggcacccggagacatctgccatccccgcctttaactcaggaggtggacttgcacagcattgccggacccccagtcccccctagacagtctacatcccagcatataccaaagttgccccctaagacttacaagcgcgagcatacccacccatctatgcatagggacgggccacctctcttggagaatgcccattctagttag

SEQ ID NO: 158051 - DNA, 3356 bp, Artificial Sequence
  derived and/or modified sequence
ccgccgcccctctccccgcccagaggcgccccgggggcaccatgcaggcgcagcagctgccctacgagtttttcagcgaagagaacgcgcccaagtggcggggactactggtgcctgcgctgaaaaaggtccaggggcaagttcatcctactctcgagtctaatgatgatgctcttcagtatgttgaagaattaattttgcaattattaaatatgctatgccaagctcagccccgaagtgcttcagatgtagaggaacgtgttcaaaaaagtttccctcatccaattgataaatgggcaatagctgatgcccaatcagctattgaaaagaggaagcgaagaaaccctttatctctcccagtagaaaaaattcatcctttattaaaggaggtcctaggttataaaattgaccaccaggtttctgtttacatagtagcagtcttagaatacatttctgcagacattttaaagctggttgggaattatgtaagaaatatacggcattatgaaattacaaaacaagatattaaagtggcaatgtgtgctgacaaggtattgatggatatgtttcatcaagatgtagaagatattaatatattatctttaactgacgaagagccttccacctcaggagaacaaacttactatgatttggtaaaagcatttatggcagaaattcgacaatatataagggaactaaatctaattataaaagtttttagagagccctttgtctccaattcaaaattgttttcagctaatgatgtagaaaatatatttagtcgcatagtagatatacatgaacttagtgtaaagttactgggccatatagaagatacagtagaaatgacagatgaaggcagtccccatccactagtaggaagctgctttgaagacttagcagaggaactggcatttgatccatatgaatcgtatgctcgagatattttgcgacctggttttcatgatcgtttccttagtcagttatcaaagcctggggcagcactttatttgcagtcaataggcgaaggtttcaaagaagctgttcaatatgttttacccaggctgcttctggcccctgtttaccactgtctccattactttgaacttttgaagcagttagaagaaaaaagtgaagatcaagaagacaaggaatgtttaaaacaagcaataacagctttgcttaatgttcagagtggtatggaaaaaatatgttctaaaagtcttgcaaaacgaagactgagtgaatctgcatgtcggttttatagtcagcaaatgaaggggaaacaactagcaatcaagaagatgaacgagattcagaagaatattgatggttgggagggaaaagacattggacagtgttgtaatgaatttataatggaaggaactcttacacgtgtaggagccaaacatgagagacacatatttctctttgatggcttaatgatttgctgtaaatcaaatcatgggcagccaagacttcctggtgctagcaatgcagaatatcgtcttaaagaaaagttttttatgcgaaaggtacaaattaatgataaagatgacaccaatgaatacaagcatgcttttgaaataattttaaaagatgaaaatagtgttatattttctgccaagtcagctgaagagaaaaacaattggatggcagcattgatatctttacagtaccggagtacactggaaaggatgcttgatgtaacaatgctacaggaagagaaagaggagcagatgaggctgcctagtgctgatgtttatagatttgcagagcctgactctgaagagaatattatatttgaagagaacatgcagcccaaggctggaattccaattatcaaagcaggaactgttattaaacttatagagaggcttacgtaccatatgtacgcagatcccaattttgttcggacatttcttacaacatacagatccttttgcaaacctcaagaactactgagtcttataatagaaaggtttgaaattccagagcctgagccaacagaagctgatcgcatagctatagagaatggagatcaacccttgagtgcagaactgaaaagatttagaaaagaatatatacagcctgtgcaactgcgagtattaaatgtatgtcggcactgggtagagcaccacttctatgattttgaaagagatgcatatcttttgcaacgaatggaagaatttattggaacagtaagaggtaaagcaatgaaaaaatgggttgaatccatcactaaaataatccaaaggaaaaaaattgcaagagacaatggaccaggtcataatattacatttcagagttcacctcccacagttgagtggcatataagcagacctgggcacatagagacttttgacctgctcaccttacacccaatagaaattgctcgacaactcactttacttgaatcagatctataccgagctgtacagccatcagaattagttggaagtgtgtggacaaaagaagacaaagaaattaactctcctaatcttctgaaaatgattcgacataccaccaacctcactctgtggtttgagaaatgtattgtagaaactgaaaatttagaagaaagagtagctgtggtgagtcgaattattgagattctacaagtctttcaagagttgaacaactttaatggtgtccttgaggttgtcagtgctatgaattcatcacctgtttacagactagaccacacatttgagcaaataccaagtcgccagaagaaaattttagaagaagctcatgaattgagtgaagatcactataagaaatatttggcaaaactcaggtctattaatccaccatgtgtgcctttctttggaatttatctcactaatatcttgaaaacagaagaaggcaaccctgaggtcctaaaaagacatggaaaagagcttataaactttagcaaaaggaggaaagtagcagaaataacaggagagatccagcagtaccaaaatcagccttactgtttacgagtagaatcagatatcaaaaggttctttgaaaacttgaatccgatgggaaatagcatggagaaggaatttacagattatcttttcaacaaatccctagaaatagaaccacgaaaccctaagcctctcccaagatttccaaaaaaatatagctatcccctaaaatctcctggtgttcgtccatcaaacccaagaccaggtaccatgaggcatcccacacctctgcagcaggagccaaggaaaattagttatagtaggatccctgaaagtgaaacagaaagtacagcatctgcaccaaattctccaaacaccgttaacacctccgcctgcttctggtgcttccagtaccacagatgtttgcagtgtatttga

SEQ ID NO: 158052 - DNA, 8314 bp, Artificial Sequence
  derived and/or modified sequence
ccgccgcccctctccccgcccagaggcgccccgggggcaccatgcaggcgcagcagctgccctacgagtttttcagcgaagagaacgcgcccaagtggcggggactactggtgcctgcgctgaaaaaggtccaggggcaagttcatcctactctcgagtctaatgatgatgctcttcagtatgttgaagaattaattttgcaattattaaatatgctatgccaagctcagccccgaagtgcttcagatgtagaggaacgtgttcaaaaaagtttccctcatccaattgataaatgggcaatagctgatgcccaatcagctattgaaaagaggaagcgaagaaaccctttatctctcccagtagaaaaaattcatcctttattaaaggaggtcctaggttataaaattgaccaccaggtttctgtttacatagtagcagtcttagaatacatttctgcagacattttaaagctggttgggaattatgtaagaaatatacggcattatgaaattacaaaacaagatattaaagtggcaatgtgtgctgacaaggtattgatggatatgtttcatcaagatgtagaagatattaatatattatctttaactgacgaagagccttccacctcaggagaacaaacttactatgatttggtaaaagcatttatggcagaaattcgacaatatataagggaactaaatctaattataaaagtttttagagagccctttgtctccaattcaaaattgttttcagctaatgatgtagaaaatatatttagtcgcatagtagatatacatgaacttagtgtaaagttactgggccatatagaagatacagtagaaatgacagatgaaggcagtccccatccactagtaggaagctgctttgaagacttagcagaggaactggcatttgatccatatgaatcgtatgctcgagatattttgcgacctggttttcatgatcgtttccttagtcagttatcaaagcctggggcagcactttatttgcagtcaataggcgaaggtttcaaagaagctgttcaatatgttttacccaggctgcttctggcccctgtttaccactgtctccattactttgaacttttgaagcagttagaagaaaaaagtgaagatcaagaagacaaggaatgtttaaaacaagcaataacagctttgcttaatgttcagagtggtatggaaaaaatatgttctaaaagtcttgcaaaacgaagactgagtgaatctgcatgtcggttttatagtcagcaaatgaaggggaaacaactagcaatcaagaagatgaacgagattcagaagaatattgatggttgggagggaaaagacattggacagtgttgtaatgaatttataatggaaggaactcttacacgtgtaggagccaaacatgagagacacatatttctctttgatggcttaatgatttgctgtaaatcaaatcatgggcagccaagacttcctggtgctagcaatgcagaatatcgtcttaaagaaaagttttttatgcgaaaggtacaaattaatgataaagatgacaccaatgaatacaagcatgcttttgaaataattttaaaagatgaaaatagtgttatattttctgccaagtcagctgaagagaaaaacaattggatggcagcattgatatctttacagtaccggagtacactggaaaggatgcttgatgtaacaatgctacaggaagagaaagaggagcagatgaggctgcctagtgctgatgtttatagatttgcagagcctgactctgaagagaatattatatttgaagagaacatgcagcccaaggctggaattccaattatcaaagcaggaactgttattaaacttatagagaggcttacgtaccatatgtacgcagatcccaattttgttcggacatttcttacaacatacagatccttttgcaaacctcaagaactactgagtcttataatagaaaggtttgaaattccagagcctgagccaacagaagctgatcgcatagctatagagaatggagatcaacccttgagtgcagaactgaaaagatttagaaaagaatatatacagcctgtgcaactgcgagtattaaatgtatgtcggcactgggtagagcaccacttctatgattttgaaagagatgcatatcttttgcaacgaatggaagaatttattggaacagtaagaggtaaagcaatgaaaaaatgggttgaatccatcactaaaataatccaaaggaaaaaaattgcaagagacaatggaccaggtcataatattacatttcagagttcacctcccacagttgagtggcatataagcagacctgggcacatagagacttttgacctgctcaccttacacccaatagaaattgctcgacaactcactttacttgaatcagatctataccgagctgtacagccatcagaattagttggaagtgtgtggacaaaagaagacaaagaaattaactctcctaatcttctgaaaatgattcgacataccaccaacctcactctgtggtttgagaaatgtattgtagaaactgaaaatttagaagaaagagtagctgtggtgagtcgaattattgagattctacaagtctttcaagagttgaacaactttaatggtgtccttgaggttgtcagtgctatgaattcatcacctgtttacagactagaccacacatttgagcaaataccaagtcgccagaagaaaattttagaagaagctcatgaattgagtgaagatcactataagaaatatttggcaaaactcaggtctattaatccaccatgtgtgcctttctttggaatttatctcactaatatcttgaaaacagaagaaggcaaccctgaggtcctaaaaagacatggaaaagagcttataaactttagcaaaaggaggaaagtagcagaaataacaggagagatccagcagtaccaaaatcagccttactgtttacgagtagaatcagatatcaaaaggttctttgaaaacttgaatccgatgggaaatagcatggagaaggaatttacagattatcttttcaacaaatccctagaaatagaaccacgaaaccctaagcctctcccaagatttccaaaaaaatatagctatcccctaaaatctcctggtgttcgtccatcaaacccaagaccaggtaccatgaggcatcccacacctctgcagcaggagccaaggaaaattagttatagtaggatccctgaaagtgaaacagaaagtacagcatctgcaccaaattctccaagaacaccgttaacacctccgcctgcttctggtgcttccagtaccacagatgtttgcagtgtatttgattccgatcattcgagcccttttcactcaagcaatgataccgtctttatccaagttactctgccccatggcccaagatctgcttctgtatcatctataagtttaaccaaaggcactgatgaagtgcctgtccctcctcctgttcctccacgaagacgaccagaatctgccccagcagaatcttcaccatctaagattatgtctaagcatttggacagtcccccagccattcctcctaggcaacccacatcaaaagcctattcaccacgatattcaatatcagaccggacctctatctcagaccctcctgaaagccctcccttattaccaccacgagaacctgtgaggacacctgatgttttctcaagctcaccactacatctccaacctccccctttgggcaaaaaaagtgaccatggcaatgccttcttcccaaacagcccttccccctttacaccacctcctcctcaaacaccttctcctcacggcacaagaaggcatctgccatcaccaccattgacacaagaagtggaccttcattccattgctgggccgcctgttcctccacgacaaagcacttctcaacatatccctaaactccctccaaaaacttacaaaagggagcacacacacccatccatgcacagagatggaccaccactgttggagaatgcccattcttcctgagttcctctgtactgggatgtatattttcctagccccaaatccattgctggcaatggatgcactgaatgtgccagcactgaggagttaaaatgagaactccaaacactaacgactcttcttcaagatgcagtataagacaatgaattttaacctagatgtaattatacaatggaaatggtattccagtttagaatatggaaagaccgacctagaggaattggacaactgattgcacctgaaaatcataaagggactttttctggccaataggcaggagtcctctttttgtgaagtgatcttttgtgaagtgatcattaaagggatggaaaacacagtctagtgtccagcaggcccacatgacagtttttgtaattcaaattatgcacttttaaaaaaaaaaacttaaacagggatcttaatatcttcctttgttttcctttgctttactcttctactttagaatattttcttaaaaatcactcaaaggactgtgaggaaaggctgtggtacctgaccttgttgaaatcaaggcccggcactgtactacaggcctgtttacagattattacggtgaactgaatgggtaccgaggcttcaccaaagaggtacttttttgttgttgttgttgttttaggaataattgtaccaattttaagagcattccccccacctgtccccacacacccaaacaaaatgtggtggtgttgccttcaaaaaagagaagttttgtgtcattaacatgacagaagaactttttaaaaaaaaataactgtcaactattctatttgcatttaggagactgttcatctatgctagattgtcattttccctccttctcccacagaagtttactggtagtccatgtcatggctcgtagctatccctctaaccataccatggaaatgcaggcacccaatgtgaaaaggagcacttgctgggcatcactgacaccgctcatgttttacacatagttgagtaatcagcatatctagaattatcttgcattgcctaaatcatatgtatatagtgaatgttatataatatacctggcaggtctgttttaatttaattgaataaagatacaaatactttgtttggctggcatatattaaattattatatgaagaaaatggttgattcttatttcttttagttgaaaaacacacaaaaacactaaacataaaagcacgttttgtggtacgccttggtttctagttctggatatatgtattaatcttaaagaatgatctaaagtcacagcttggcatataggaagatacttggttagaataggatgggtatcttttaagcagaactttgtaagtaagttttaagttcctaagcaacaagtatacagtttgttaaggtttatattgaacattctaccttgcttgaggttttctgctttatcaaaactattcataatagaacatctacctgcatcattactatcataatatggattattcataaagcgtatgtactgttcttctgagtctaacaaatactgtgactgaaatgcatgcaccttgttgaagagaaaacattttattaatctccactataatgtctgtgaaatgtgcagtattccatccttagagagtttatctggttcatcagcatctgcatgtatcctctgaataatgaagcaacatttcagcaattctgttaaccacaccattagagacatttttagaagtgctgcaacatggtgggaacctagtactttaataatttcctatgatatttattagagcataaaatgtacatcacgatagtacagtatgtagtcctttaagaccagaaggtatgttaactgcaccatcattaagcagtctatcctattttcttatttatttgttagaattgaatcctttctcaatatctgtaccattcctatgatggtagccattcttctctttataaaatatttcctctttgaaaagcgtcctaaaacattaatttcaaatcccctcttggatgcaaagtgtccctaagaccatccattcaacagtatttatgtgagccaacttactagagccgctacaactaatcatgatagacagtccagaatctccctggactttatactgggccagcctcattgtccctaagatttctctttttatgtctcatggattacttctctttttaattgccccaggcacattccaaatgagaacctggtaaaagtcacattggacccccttcagtatgtcttcggctaatgtgttagccttcaataaggtgataaccccttttcaacctatctagtctataaagaggaaaaattcagatttggagttctaatcctatttctcccaaagggaactattcttctaccccatggttctaggagaccacttcactgtgcaacagttttacatgcattgtggatggaggatatttttattctgaactgttacatttaggtaaaaatattttctgcagtggtaactgattagaaaaatgccaattggatgcccttaggtggaggtgagaaaatggcatccttgccttcttctcaatatgaaacattaactagttgacaaatttatccttgtagtaatgaaaatctatttaatcagggaccagaaatggctgaggagataaatgcatcattacaaaattctgcttttgaatcctggacattacaagggggtaaatgcagcatgactttttgttaaccacattccaaaatgtggaacatttcttttagaaatgaaaatatttcaaggctgatgtattttaagactacacattatcaggaaacatacattgagagttcgcttaattaaaggttgttgggcatcaaattatgtttagtaggttactattctctaacaactcaaggatgctttaatggatctgaatttgacaaagagcatgccacactaatactacagtcaacaacagcccagagaacaattactatgtcagctggaggctatattatgattctaaattcttaaaggtttttttccctccataaatcaaaaattaccttatgtaaaccaaaaattagttggtatttatggtcatgatcttaattctcaagtttagcttaatcttgtatttcattgtttgtcttctaatatgacagcttaaattcagatttttaagtgactcagcaaaataggaggagtgtcccaatttattagtgttgtacatattgaagaaaacctttttgttccttcagatttagaaagaaacagtttaaccatttatttcttggtattctgctgctgtgaataggtttacttattcttttaacatatattgtgtgactacgcaagtataggtcctgttgtattgcattaatctttaccagtaactaaacatcacaaggttaatattggtttggctgaaagaattatgcagtaaagttatttataagggaacatgatgactttattcaatatttttcttctttgaaacatctcattactaacttttaagattatttcataatcccttatacatgagccaatgaaatattttgagctctacttaagaagcatgaagtctatattataaatctaaacaacaaaagcacttgtaacttgtttagtaaattccatgccttattttccatttttgacaccgtaaagtgcattttctgtcgactgtgagcaaatttcccttttgcctttaatgaaaatagtgcattaagtagccaattgctgcagaattataaagcaaattagctaacagtgggtcacattggactaccactcaaagaaacaagatgcataacagatgatggaaggtacatgtggtgtggcttagggagagcgcacctgtgccagatgcatgccactttcagtagctgccaaatgtgcctttaattaagaacatctctaatttttttcttcagatcaagtcagcatttggggtcgggatttgggcagggaactttggggtgcaaatatctggtgaaaccaccagagaatttgtttgtcaaagtgacatgtataattttagttgagacgtgtttgtgtatatatgtgtatttgcctttgtttagtagcacggttatttgctaaaataattgtcaaaaaattgctctgtcggtcggtctttgatgtaagaacaaagtgtggtctatacatctaatatggcctttgtacctaaccatgttcataggtaatctttgtactctgtgtgcagcagtatttggtttgcatttaaagtgaaaataacggctgttatttttctggcattactaagataaactgaaaaataataaagaaaaatgccttacatagccc

SEQ ID NO: 158053 - DNA, 8517 bp, Artificial Sequence
  derived and/or modified sequence
agtagcgagcaggttcagttcgctagtaggaagctccagcgctacaccgccgcccctctccccgcccagaggcgccccgggggcaccatgcaggcgcagcagctgccctacgagtttttcagcgaagagaacgcgcccaagtggcggggactactggtgcctgcgctgaaaaaggtccaggggcaagttcatcctactctcgagtctaatgatgatgctcttcagtatgttgaagaattaattttgcaattattaaatatgctatgccaagctcagccccgaagtgcttcagatgtagaggaacgtgttcaaaaaagtttccctcatccaattgataaatgggcaatagctgatgcccaatcagctattgaaaagaggaagcgaagaaaccctttatctctcccagtagaaaaaattcatcctttattaaaggaggtcctaggttataaaattgaccaccaggtttctgtttacatagtagcagtcttagaatacatttctgcagacattttaaagctggttgggaattatgtaagaaatatacggcattatgaaattacaaaacaagatattaaagtggcaatgtgtgctgacaaggtattgatggatatgtttcatcaagatgtagaagatattaatatattatctttaactgacgaagagccttccacctcaggagaacaaacttactatgatttggtaaaagcatttatggcagaaattcgacaatatataagggaactaaatctaattataaaagtttttagagagccctttgtctccaattcaaaattgttttcagctaatgatgtagaaaatatatttagtcgcatagtagatatacatgaacttagtgtaaagttactgggccatatagaagatacagtagaaatgacagatgaaggcagtccccatccactagtaggaagctgctttgaagacttagcagaggaactggcatttgatccatatgaatcgtatgctcgagatattttgcgacctggttttcatgatcgtttccttagtcagttatcaaagcctggggcagcactttatttgcagtcaataggcgaaggtttcaaagaagctgttcaatatgttttacccaggctgcttctggcccctgtttaccactgtctccattactttgaacttttgaagcagttagaagaaaaaagtgaagatcaagaagacaaggaatgtttaaaacaagcaataacagctttgcttaatgttcagagtggtatggaaaaaatatgttctaaaagtcttgcaaaacgaagactgagtgaatctgcatgtcggttttatagtcagcaaatgaaggggaaacaactagcaatcaagaagatgaacgagattcagaagaatattgatggttgggagggaaaagacattggacagtgttgtaatgaatttataatggaaggaactcttacacgtgtaggagccaaacatgagagacacatatttctctttgatggcttaatgatttgctgtaaatcaaatcatgggcagccaagacttcctggtgctagcaatgcagaatatcgtcttaaagaaaagttttttatgcgaaaggtacaaattaatgataaagatgacaccaatgaatacaagcatgcttttgaaataattttaaaagatgaaaatagtgttatattttctgccaagtcagctgaagagaaaaacaattggatggcagcattgatatctttacagtaccggagtacactggaaaggatgcttgatgtaacaatgctacaggaagagaaagaggagcagatgaggctgcctagtgctgatgtttatagatttgcagagcctgactctgaagagaatattatatttgaagagaacatgcagcccaaggctggaattccaattatcaaagcaggaactgttattaaacttatagagaggcttacgtaccatatgtacgcagatcccaattttgttcggacatttcttacaacatacagatccttttgcaaacctcaagaactactgagtcttataatagaaaggtttgaaattccagagcctgagccaacagaagctgatcgcatagctatagagaatggagatcaacccttgagtgcagaactgaaaagatttagaaaagaatatatacagcctgtgcaactgcgagtattaaatgtatgtcggcactgggtagagcaccacttctatgattttgaaagagatgcatatcttttgcaacgaatggaagaatttattggaacagtaagaggtaaagcaatgaaaaaatgggttgaatccatcactaaaataatccaaaggaaaaaaattgcaagagacaatggaccaggtcataatattacatttcagagttcacctcccacagttgagtggcatataagcagacctgggcacatagagacttttgacctgctcaccttacacccaatagaaattgctcgacaactcactttacttgaatcagatctataccgagctgtacagccatcagaattagttggaagtgtgtggacaaaagaagacaaagaaattaactctcctaatcttctgaaaatgattcgacataccaccaacctcactctgtggtttgagaaatgtattgtagaaactgaaaatttagaagaaagagtagctgtggtgagtcgaattattgagattctacaagtctttcaagagttgaacaactttaatggtgtccttgaggttgtcagtgctatgaattcatcacctgtttacagactagaccacacatttgagcaaataccaagtcgccagaagaaaattttagaagaagctcatgaattgagtgaagatcactataagaaatatttggcaaaactcaggtctattaatccaccatgtgtgcctttctttggaatttatctcactaatatcttgaaaacagaagaaggcaaccctgaggtcctaaaaagacatggaaaagagcttataaactttagcaaaaggaggaaagtagcagaaataacaggagagatccagcagtaccaaaatcagccttactgtttacgagtagaatcagatatcaaaaggttctttgaaaacttgaatccgatgggaaatagcatggagaaggaatttacagattatcttttcaacaaatccctagaaatagaaccacgaaaccctaagcctctcccaagatttccaaaaaaatatagctatcccctaaaatctcctggtgttcgtccatcaaacccaagaccaggtaccatgaggcatcccacacctctgcagcaggagccaaggaaaattagttatagtaggatccctgaaagtgaaacagaaagtacagcatctgcaccaaattctccaagaacaccgttaacacctccgcctgcttctggtgcttccagtaccacagatgtttgcagtgtatttgattccgatcattcgagcccttttcactcaagcaatgataccgtctttatccaagttactctgccccatggcccaagatctgcttctgtatcatctataagtttaaccaaaggcactgatgaagtgcctgtccctcctcctgttcctccacgaagacgaccagaatctgccccagcagaatcttcaccatctaagattatgtctaagcatttggacagtcccccagccattcctcctaggcaacccacatcaaaagcctattcaccacgatattcaatatcagaccggacctctatctcagaccctcctgaaagccctcccttattaccaccacgagaacctgtgaggacacctgatgttttctcaagctcaccactacatctccaacctccccctttgggcaaaaaaagtgaccatggcaatgccttcttcccaaacagcccttccccctttacaccacctcctcctcaaacaccttctcctcacggcacaagaaggcatctgccatcaccaccattgacacaagaagtggaccttcattccattgctgggccgcctgttcctccacgacaaagcacttctcaacatatccctaaactccctccaaaaacttacaaaagggagcacacacacccatccatgcacagagatggaccaccactgttggagaatgcccattcttcctgagttcctctgtactgggatgtatattttcctagccccaaatccattgctggcaatggatgcactgaatgtgccagcactgaggagttaaaatgagaactccaaacactaacgactcttcttcaagatgcagtataagacaatgaattttaacctagatgtaattatacaatggaaatggtattccagtttagaatatggaaagaccgacctagaggaattggacaactgattgcacctgaaaatcataaagggactttttctggccaataggcaggagtcctctttttgtgaagtgatcttttgtgaagtgatcattaaagggatggaaaacacagtctagtgtccagcaggcccacatgacagtttttgtaattcaaattatgcacttttaaaaaaaaaaacttaaacagggatcttaatatcttcctttgttttcctttgctttactcttctactttagaatattttcttaaaaatcactcaaaggactgtgaggaaaggctgtggtacctgaccttgttgaaatcaaggcccggcactgtactacaggcctgtttacagattattacggtgaactgaatgggtaccgaggcttcaccaaagaggtacttttttgttgttgttgttgttttaggaataattgtaccaattttaagagcattccccccacctgtccccacacacccaaacaaaatgtggtggtgttgccttcaaaaaagagaagttttgtgtcattaacatgacagaagaactttttaaaaaaaaataactgtcaactattctatttgcatttaggagactgttcatctatgctagattgtcattttccctccttctcccacagaagtttactggtagtccatgtcatggctcgtagctatccctctaaccataccatggaaatgcaggcacccaatgtgaaaaggagcacttgctgggcatcactgacaccgctcatgttttacacatagttgagtaatcagcatatctagaattatcttgcattgcctaaatcatatgtatatagtgaatgttatataatatacctggcaggtctgttttaatttaattgaataaagatacaaatactttgtttggctggcatatattaaattattatatgaagaaaatggttgattcttatttcttttagttgaaaaacacacaaaaacactaaacataaaagcacgttttgtggtacgccttggtttctagttctggatatatgtattaatcttaaagaatgatctaaagtcacagcttggcatataggaagatacttggttagaataggatgggtatcttttaagcagaactttgtaagtaagttttaagttcctaagcaacaagtatacagtttgttaaggtttatattgaacattctaccttgcttgaggttttctgctttatcaaaactattcataatagaacatctacctgcatcattactatcataatatggattattcataaagcgtatgtactgttcttctgagtctaacaaatactgtgactgaaatgcatgcaccttgttgaagagaaaacattttattaatctccactataatgtctgtgaaatgtgcagtattccatccttagagagtttatctggttcatcagcatctgcatgtatcctctgaataatgaagcaacatttcagcaattctgttaaccacaccattagagacatttttagaagtgctgcaacatggtgggaacctagtactttaataatttcctatgatatttattagagcataaaatgtacatcacgatagtacagtatgtagtcctttaagaccagaaggtatgttaactgcaccatcattaagcagtctatcctattttcttatttatttgttagaattgaatcctttctcaatatctgtaccattcctatgatggtagccattcttctctttataaaatatttcctctttgaaaagcgtcctaaaacattaatttcaaatcccctcttggatgcaaagtgtccctaagaccatccattcaacagtatttatgtgagccaacttactagagccgctacaactaatcatgatagacagtccagaatctccctggactttatactgggccagcctcattgtccctaagatttctctttttatgtctcatggattacttctctttttaattgccccaggcacattccaaatgagaacctggtaaaagtcacattggacccccttcagtatgtcttcggctaatgtgttagccttcaataaggtgataaccccttttcaacctatctagtctataaagaggaaaaattcagatttggagttctaatcctatttctcccaaagggaactattcttctaccccatggttctaggagaccacttcactgtgcaacagttttacatgcattgtggatggaggatatttttattctgaactgttacatttaggtaaaaatattttctgcagtggtaactgattagaaaaatgccaattggatgcccttaggtggaggtgagaaaatggcatccttgccttcttctcaatatgaaacattaactagttgacaaatttatccttgtagtaatgaaaatctatttaatcagggaccagaaatggctgaggagataaatgcatcattacaaaattctgcttttgaatcctggacattacaagggggtaaatgcagcatgactttttgttaaccacattccaaaatgtggaacatttcttttagaaatgaaaatatttcaaggctgatgtattttaagactacacattatcaggaaacatacattgagagttcgcttaattaaaggttgttgggcatcaaattatgtttagtaggttactattctctaacaactcaaggatgctttaatggatctgaatttgacaaagagcatgccacactaatactacagtcaacaacagcccagagaacaattactatgtcagctggaggctatattatgattctaaattcttaaaggtttttttccctccataaatcaaaaattaccttatgtaaaccaaaaattagttggtatttatggtcatgatcttaattctcaagtttagcttaatcttgtatttcattgtttgtcttctaatatgacagcttaaattcagatttttaagtgactcagcaaaataggaggagtgtcccaatttattagtgttgtacatattgaagaaaacctttttgttccttcagatttagaaagaaacagtttaaccatttatttcttggtattctgctgctgtgaataggtttacttattcttttaacatatattgtgtgactacgcaagtataggtcctgttgtattgcattaatctttaccagtaactaaacatcacaaggttaatattggtttggctgaaagaattatgcagtaaagttatttataagggaacatgatgactttattcaatatttttcttctttgaaacatctcattactaacttttaagattatttcataatcccttatacatgagccaatgaaatattttgagctctacttaagaagcatgaagtctatattataaatctaaacaacaaaagcacttgtaacttgtttagtaaattccatgccttattttccatttttgacaccgtaaagtgcattttctgtcgactgtgagcaaatttcccttttgcctttaatgaaaatagtgcattaagtagccaattgctgcagaattataaagcaaattagctaacagtgggtcacattggactaccactcaaagaaacaagatgcataacagatgatggaaggtacatgtggtgtggcttagggagagcgcacctgtgccagatgcatgccactttcagtagctgccaaatgtgcctttaattaagaacatctctaatttttttcttcagatcaagtcagcatttggggtcgggatttgggcagggaactttggggtgcaaatatctggtgaaaccaccagagaatttgtttgtcaaagtgacatgtataattttagttgagacgtgtttgtgtatatatgtgtatttgcctttgtttagtagcacggttatttgctaaaataattgtcaaaaaattgctctgtcggtcggtctttgatgtaagaacaaagtgtggtctatacatctaatatggcctttgtacctaaccatgttcataggtaatctttgtactctgtgtgcagcagtatttggtttgcatttaaagtgaaaataacggctgttatttttctggcattactaagataaactgaaaaataataaagaaaaatgccttacatagcccacaagtgtattatttttgcatgtatttattttagagggcagtatttttgaaatcattagtgattctcatttagctcatatatgccatatagaaatattttgcatttttattgtggtctttctttggaggcacttttttcctgtatcaagttataaaa

SEQ ID NO: 158054 - protein, 446 aa, Artificial Sequence
  derived and/or modified sequence
MRPVRENSSGARSPRVPADLARSILISLPFPPDSLAHRPPSSAPTESQGLFTVAAPAPGAPSPPATLAHLLPAPAMYSLLETELKNPVGTPTQAAGTGGPAAPGGAGKSSANAAGGANSGGGSSGGASGGGGGTDQDRVKRPMNAFMVWSRGQRRKMALENPKMHNSEISKRLGADWKLLTDAEKRPFIDEAKRLRAVHMKEYPDYKYRPRRKTKTLLKKDKYSLPSGLLPPGAAAAAAAAAAAAAAASSPVGVGQRLDTYTHVNGWANGAYSLVQEQLGYAQPPSMSSPPPPPALPPMHRYDMAGLQYSPMMPPGAQSYMNVAAAAAAASGYGGMAPSATAAAAAAYGQQPATAAAAAAAAAAMSLGPMGSVVKSEPSSPPPAIASHSQRACLGDLRDMISMYLPPGGDAADAASPLPGGRLHGVHQHYQGAGTAVNGTVPLTHI

SEQ ID NO: 158055 - DNA, 2074 bp, Artificial Sequence
  derived and/or modified sequence
atgcgacctgttcgagagaactcatcaggtgcgagaagcccgcgggttcctgctgatttggcgcggagcattttgataagcctacccttcccgccggactcgctggcccacaggcccccaagctccgctccgacggagtcccagggccttttcaccgtggccgctccagccccgggagcgccttctcctcccgccacgctggcgcaccttcttcccgccccggcaatgtacagccttctggagactgaactcaagaaccccgtagggacacccacacaagcggcgggcaccggcggccccgcagccccgggaggcgcaggcaagagtagtgcgaacgcagccggcggcgcgaactcgggcggcggcagcagcggtggtgcgagcggaggtggcgggggtacagaccaggaccgtgtgaaacggcccatgaacgccttcatggtatggtcccgcgggcagcggcgcaaaatggccctggagaaccccaagatgcacaattctgagatcagcaagcgcttgggcgccgactggaaactgctgaccgacgccgagaagcgaccattcatcgacgaggccaagcgacttcgcgccgtgcacatgaaggagtatccggactacaagtaccgaccgcgccgcaagaccaagacgctgctcaagaaagataagtactccctgcccagcggcctcctgcctcccggtgccgcggccgccgccgccgctgccgcggccgcagccgctgccgccagcagtccggtgggcgtgggccagcgcctggacacgtacacgcacgtgaacggctgggccaacggcgcgtactcgctggtgcaggagcagctgggctacgcgcagcccccgagcatgagcagcccgccgccgccgcccgcgctgccgccgatgcaccgctacgacatggccggcctgcagtacagcccaatgatgccgcccggcgctcagagctacatgaacgtcgctgccgcggccgccgccgcctcgggctacgggggcatggcgccctcagccacagcagccgcggccgccgcctacgggcagcagcccgccaccgccgcggccgcagctgcggccgcagccgccatgagcctgggccccatgggctcggtagtgaagtctgagcccagctcgccgccgcccgccatcgcatcgcactctcagcgcgcgtgcctcggcgacctgcgcgacatgatcagcatgtacctgccacccggcggggacgcggccgacgccgcctctccgctgcccggcggtcgcctgcacggcgtgcaccagcactaccagggcgccgggactgcagtcaacggaacggtgccgctgacccacatctgagcaccggcctgcgctcgtccacccttgttccccacccccacccccactcccgccccgcacccccaagttgggacgccttgtttagctttgcttgcctgggactgttgccttgtaccgatgatggggagggctgaaagttttgctgtagctgtcgggttttgtacaaaagcaaaaataagtcaggagcagcgaaaatgggacttctagagagctctcttgccccacgccgctgctcctttcacctttgtaggctgggaatcgctgtgttatttgcaaagaaaaaacagcccccactcctcctcctgagttccagggttattctgttacatttgaaaatgttgtcttgttagtttgcagttagccaaggagtgaatgggagaaacatagtatcgggtgaggccagctggagaactgcaacgcctacgcccccagtcgtgtcgcgtctgttttcctcgtggttttttggggcgctgaccgctccaagcagcgcggcagctaaagccaatgttaatttatagccaggtgtgcgtgtgtctcccgcctcgccgcccctggccgcgggacagcttctgtccaatcatgttgagttggtgatttctgccgtgatctgtttgatatttcttcgcgctaatgtgttcagatttcgtttgggtagtggggaggggctactttgtttcagggttttcaagcttttactcttaattcctaaatgagatcaataaattttataacc

SEQ ID NO: 158056 - DNA, 249 bp, Artificial Sequence
  derived and/or modified sequence
atggaccccggccccaagggccactgccactgcggcggccacggccatccacccggccattgcgggcccccacctggtcacgggcctgggccttgcggaccccctccccaccatggcccgggcccttgtgggccgccacctggacacgggcctggcccctgcggcccaccaccacaccatggacctggcccctgcgggccacctcctgggcatggccccgggcatcccccccccgggccccaccactag

SEQ ID NO: 158057 - DNA, 1341 bp, Artificial Sequence
  derived and/or modified sequence
atgagacccgtgagagagaacagcagcggcgccagaagccccagagtgcccgccgacctggccagaagcatcctgatcagcctgcccttcccccccgacagcctggcccacagaccccccagcagcgcccccaccgagagccagggcctgttcaccgtggccgcccccgcccccggcgcccccagcccccccgccaccctggcccacctgctgcccgcccccgccatgtacagcctgctggagaccgagctgaagaaccccgtgggcacccccacccaggccgccggcaccggcggccccgccgcccccggcggcgccggcaagagcagcgccaacgccgccggcggcgccaacagcggcggcggcagcagcggcggcgccagcggcggcggcggcggcaccgaccaggacagagtgaagagacccatgaacgccttcatggtgtggagcagaggccagagaagaaagatggccctggagaaccccaagatgcacaacagcgagatcagcaagagactgggcgccgactggaagctgctgaccgacgccgagaagagacccttcatcgacgaggccaagagactgagagccgtgcacatgaaggagtaccccgactacaagtacagacccagaagaaagaccaagaccctgctgaagaaggacaagtacagcctgcccagcggcctgctgccccccggcgccgccgccgccgccgccgccgccgccgccgccgccgccgccgccagcagccccgtgggcgtgggccagagactggacacctacacccacgtgaacggctgggccaacggcgcctacagcctggtgcaggagcagctgggctacgcccagccccccagcatgagcagccccccccccccccccgccctgccccccatgcacagatacgacatggccggcctgcagtacagccccatgatgccccccggcgcccagagctacatgaacgtggccgccgccgccgccgccgccagcggctacggcggcatggcccccagcgccaccgccgccgccgccgccgcctacggccagcagcccgccaccgccgccgccgccgccgccgccgccgccgccatgagcctgggccccatgggcagcgtggtgaagagcgagcccagcagccccccccccgccatcgccagccacagccagagagcctgcctgggcgacctgagagacatgatcagcatgtacctgccccccggcggcgacgccgccgacgccgccagccccctgcccggcggcagactgcacggcgtgcaccagcactaccagggcgccggcaccgccgtgaacggcaccgtgcccctgacccacatctag

SEQ ID NO: 158058 - DNA, 1341 bp, Artificial Sequence
  derived and/or modified sequence
atgcgccctgtgagggaaaattcctctggcgcccggtcccctagagtgcctgccgaccttgctcggtcaatcttgatttcattaccattccctccagatagtctcgcacatcgcccaccttctagtgcccctacggagtcacaaggcctgtttaccgtagctgcaccagccccgggagccccctctccacctgcgacactcgcccacctcctgcctgccccagctatgtactcattgctcgaaacagagttgaagaatcctgtgggtacaccaacacaggccgctggaacagggggccctgccgctccagggggcgccggtaagagtagcgctaacgccgcaggaggcgcaaactcaggaggaggcagtagcggcggagcatcgggtggcgggggcggcaccgaccaggacagggtaaagaggcctatgaatgctttcatggtatggagccggggccagcggaggaagatggccttagaaaatcccaaaatgcacaattctgaaatctctaaacggctcggagccgactggaaactgctcaccgatgcggagaagcgccctttcattgacgaggccaaaagattgagagccgtgcatatgaaggagtaccctgattacaagtaccgcccgaggcgcaagaccaagacactgctcaagaaggacaagtactcccttccgagcggcttgcttccacccggcgccgccgcagcggctgctgccgctgccgctgccgcagccgccgcatcctccccagtgggggtgggtcagcgcctagacacctacacacacgtgaacggctgggctaacggcgcctactccctcgtccaagagcaactaggctacgcacagcccccctccatgagctctcctcccccaccaccagccttaccacccatgcatcgatacgacatggccggcttgcagtactctcccatgatgccacccggggcacagagctacatgaacgtagctgctgctgctgcagcagcgagcggatatggcggcatggccccctcagctactgctgcagccgctgctgcttatgggcagcagccagccacagccgctgccgctgcagctgctgcagcagccatgagtctaggtcccatggggtctgtggtgaaaagcgagccttcatcgccacccccagctatcgccagccactcccagagagcgtgcttgggagacctgagagacatgatatctatgtatctaccacctggtggggacgccgccgatgctgcttctccgctgccaggaggtcgacttcatggtgtgcaccagcattaccagggggcgggtactgccgttaacggcaccgtccctttgacacatatttag

SEQ ID NO: 158059 - DNA, 1341 bp, Artificial Sequence
  derived and/or modified sequence
atgaggcctgtgcgggagaacagcagcggggcccggagcccccgggtgcctgctgacctggcccggagcatcctgatcagcctgcccttccccccagacagcctggcccacaggcctcccagcagcgcccccacagagagccagggcctcttcaccgtggccgccccagcccctggggcccccagccccccagccaccctggcccacctgctgcctgccccagccatgtacagcctgctggagacagagctgaagaaccctgtgggcacccccacccaggccgccggcactggaggccctgctgcccctggaggagctgggaagagcagcgccaatgctgctgggggcgccaacagcggcggcggcagcagcggcggggccagcggcggcggcggcggcacagaccaggacagagtgaagaggcccatgaatgccttcatggtgtggagccggggccagaggaggaagatggccctggagaaccccaagatgcacaacagcgagatcagcaagaggctgggcgctgactggaagctgctgacagatgctgagaagaggcccttcattgatgaggccaagaggctgcgggctgtgcacatgaaggagtacccagactacaagtaccggcccaggaggaagaccaagaccctgctgaagaaggacaagtacagcctgcccagcggcctgctgcccccaggagctgctgctgctgctgctgctgctgctgctgctgctgctgctgccagcagccctgtgggcgtgggccagaggctggacacctacacccacgtgaatggctgggccaatggagcctacagcctggtgcaggagcagctgggctacgcccagccccccagcatgagcagccccccacctcctccagccctgccccccatgcacagatatgacatggccggcctgcagtacagccccatgatgcctcctggggcccagagctacatgaatgtggccgctgctgctgctgctgccagcggctatggaggcatggcccccagcgccacagctgctgctgctgctgcctacggccagcagcctgccacagctgctgctgctgctgctgctgctgctgccatgagcctgggccccatgggctctgtggtgaagtctgagcccagcagccccccaccagccatcgccagccacagccagagggcctgcctgggggacctgcgggacatgatctccatgtacctgcccccaggaggagatgctgctgatgctgccagccccctgcccggcggccgcctgcacggcgtgcaccagcactaccagggcgccggcacagctgtgaatggcaccgtgcccctgacccacatctag

SEQ ID NO: 158060 - DNA, 1341 bp, Artificial Sequence
  derived and/or modified sequence
atgcggcccgtgcgggagaacagcagcggcgcccggagcccccgggtgccagctgatctggcacgatccatcttaatatctctgcccttccctccagatagcctcgcacaccgccctccatcgtctgctccaacggaaagtcaaggactgttcacagtggccgcgcccgcccccggagcaccttctccacccgccactctggcccacctcttacctgcccctgctatgtacagcttactcgagactgagctcaaaaacccagtggggacgccgactcaggccgcaggaaccggcggcccagccgccccagggggggctgggaaatcgtctgcaaatgctgccggtggcgcaaatagcgggggaggcagttcaggcggggcctcaggaggcggtgggggtactgaccaggatagagtgaagaggcccatgaatgcgttcatggtgtggtctcggggacagcgcaggaaaatggctctggagaaccctaaaatgcacaactcggagatctctaagagactgggtgccgattggaaactccttacggatgcagagaaaaggccatttattgatgaagcaaaacggttgcgtgccgtgcacatgaaggagtaccctgactacaaataccggccaagacgcaaaaccaagactctcctgaaaaaagacaagtattctctgccttctggtctgttgccccccggggctgcggcggcggcagcagcagccgccgccgcagctgcggccgctagtagccctgtaggggtcggccagcggcttgatacctatactcatgtcaacggctgggcaaacggggcatactcattggtacaagagcagttgggctacgcccaacctccttcaatgtcctctcctccccctccccctgcactcccaccgatgcatcgttacgacatggcagggctccagtatagccccatgatgcccccaggcgcccagtcctatatgaacgtcgctgctgctgcagcagcggcgagcggttacggaggaatggcaccatctgctactgcagctgcagcggctgcctacggtcaacagcctgctaccgccgccgccgccgcagcagccgccgccgcgatgtccctcgggcccatggggagtgtcgtgaaaagcgagccgtcatcaccgccccctgccattgctagccactctcagcgcgcctgccttggtgacctgcgcgacatgattagtatgtatctccctcctggcggggacgcagcagacgccgctagccccctgcctgggggtcggctccacggagtccatcaacactatcagggtgccgggaccgctgtaaacgggacagtccctctgacacatatctag

SEQ ID NO: 158061 - DNA, 1341 bp, Artificial Sequence
  derived and/or modified sequence
atgagacccgttcgcgagaactcatcgggggctcggagtccacgggttcctgcagacctggcgaggagcatcctaatttcccttccattcccgccagactctctggctcacaggccaccatcttcagcgcctactgaatcgcagggcctgtttacagtagcagcccctgcaccaggggctcccagtcctcccgctaccctcgcccacctgctgcccgcacccgcaatgtactccttgctagagacagaacttaagaaccccgtcgggactccaacccaagcagcgggtacaggcggaccagccgcacccggaggcgctgggaaatccagtgctaatgcagcgggaggcgctaactccgggggaggttcctctggaggggcttcaggtggtgggggtggtacggatcaggaccgcgtcaaacgaccgatgaacgcttttatggtctggtcaagagggcaaagaaggaaaatggctcttgagaatcccaagatgcacaattcggagattagcaaacgtctgggggcagattggaagttgttgaccgacgctgaaaaacggccattcatcgacgaagccaaacgccttagggcagtgcatatgaaggagtacccggattataaatacaggccaaggaggaagacaaaaactctcttaaagaaagacaaatacagcttgccctccggcctcctgcctcccggagccgcagcagctgccgctgcggctgccgctgccgctgcagccgctagcagtccagtcggggttggacagagactcgatacttacacgcacgtgaatggctgggccaatggtgcctatagtttagtgcaagaacagctgggttacgctcagccaccctcgatgtctagccctccaccgccacccgctcttccacccatgcaccggtatgatatggctggcctacaatatagccctatgatgcccccaggggcacagagttacatgaacgtcgcagccgcagccgcagctgcttctggatatggtggcatggcaccatcagcaactgccgctgctgcagccgcttacggacaacagcccgctactgccgctgctgccgctgctgccgctgctgcgatgagtctgggaccaatgggaagtgttgtgaagtccgaaccatcaagccccccaccggcaatcgcaagtcactcccagcgggcttgtcttggagacctacgagacatgatatctatgtaccttccacccggaggagacgcagcagatgccgctagccctctgccaggagggagactgcacggggttcatcaacattaccagggggctggtactgcagtcaatggaacggtcccccttacccacatttag

SEQ ID NO: 158062 - protein, 188 aa, Artificial Sequence
  derived and/or modified sequence
MNGDDAFAKRPRDDAKASEKRSKAFDDIAKYFSKEEWEKMKFSEKISCVHMKRKYEAMTKLGFNVTLSLFMRNKRATDSQRNDSDNDRNRGNEVERPQMTFGRLQRIIPKIMPEKPAEEGSDSKGVPEASGPQNDGKKLCPPGKASSSEKIHERSGPKRGKHAWTHRLRERKQLVIYEEISDPEEDDK

SEQ ID NO: 158063 - protein, 188 aa, Artificial Sequence
  derived and/or modified sequence
MNGDDTFAKRPRDDAKASEKRSKAFDDIATYFSKKEWKKMKYSEKISYVYMKRNYKAMTKLGFKVTLPPFMCNKQATDFQGNDFDNDHNRRIQVEHPQMTFGRLHRIIPKIMPKKPAEDENDSKGVSEASGPQNDGKQLHPPGKANISEKINKRSGPKRGKHAWTHRLRERKQLVIYEEISDPEEDDE

SEQ ID NO: 158064 - DNA, 1271 bp, Artificial Sequence
  derived and/or modified sequence
cactttgtcaccaactgctgccaactcgccaccactgctgccgacctcgcaaccactgctttgtctctgaagtgagactgctcctggtgccatgaacggagacgacacctttgcaaagagacccagggatgatgctaaagcatcagagaagagaagcaaggcctttgatgatattgccacatacttctctaagaaagagtggaaaaagatgaaatactcggagaaaatcagctatgtgtatatgaagagaaactataaggccatgactaaactaggtttcaaagtcaccctcccacctttcatgtgtaataaacaggccacagacttccaggggaatgattttgataatgaccataaccgcaggattcaggttgaacatcctcagatgactttcggcaggctccacagaatcatcccgaagatcatgcccaagaagccagcagaggacgaaaatgattcgaagggagtgtcagaagcatctggcccacaaaacgatgggaaacaactgcaccccccaggaaaagcaaatatttctgagaagattaataagagatctggacccaaaagggggaaacatgcctggacccacagactgcgtgagagaaagcagctggtgatttatgaagagatcagtgaccctgaggaagatgacgagtaactcccctgggggatacgacacatgcccttgatgagaagcagaacgtggtgacctttcacgaacatgggcatggctgcggctccctcgtcatcaggtgcatagcaagtgaaagcaagtgttcacaacggtgaaacttgagcgtcatttttcttagtgtgccaagagttcgatgttagtgtttccattgtattttcttacagtgtgccattctgttagatactatccttataattgatgagcaagacatactgaatgcatatttcggtttgtgtatccatgcacctacgtcagaaaacaagtattgtcaggtattctctccatagaacagcactatcctcatctctccccagatgtgactactgagggcagttctgagtgtttaatttcagactttttcctctgcatttacacacacacacacacacacacgcacacacacacaccaagtaccagtataagcatctcccatctgcttttcccattgccatgcgtcctggtcaagcccccctcactctgtttcctgttcagcatgtactcccctcatccgattcccctgtatcagtcactgacagttaataaacctttgcaaacgttcaaaaaaaaaaaaaaaaaa

SEQ ID NO: 158065 - DNA, 1281 bp, Artificial Sequence
  derived and/or modified sequence
tctgattttggaagaatctaaagagaatatcagagcatgcatactctgaacttggagtagccaatcccaggggacgctttaggcgggaaaatcagagtctccgtcagagtgctcctggtgccatgaacggagacgacgcctttgcaaagagacccagggatgatgctaaagcatcagagaagagaagcaaggccttcgatgatattgccaaatacttctctaaggaagagtgggaaaagatgaaattctcggagaaaatcagctgtgtgcatatgaagagaaagtatgaggccatgactaaactaggtttcaacgtcaccctctcacttttcatgcgtaataaacgggccacagactctcagaggaatgattctgataatgaccgtaaccgtgggaatgaggttgaacgtcctcagatgacttttggcaggctccagagaatcatcccgaagatcatgcccgagaagccagcagaggaaggaagtgattcgaagggagtgccagaagcatctggcccacagaacgatgggaaaaagctgtgcccgccgggaaaagcaagtagctctgagaagattcacgagagatctggacccaaaagggggaaacatgcctggacccacagactgcgtgagagaaagcagctggtgatttatgaagagatcagcgaccctgaggaagatgacaagtaactcccctcagggatacgacacatgcccatgatgagaagcagaacgtggtgacctttcacgaacgtgggcatggctgcggacccctcgtcatcaggtgtatagcaagtgaaagcaagtgttcacaacagtgaaaagttgagcgtcatttttcttagtgtgccaagagttcgatgttggcgtttccgttgtattttcttgcagtgtgccattctgttagacattagcattttcgttgatgagcaagacatgcttaatgcatatttcggcttgtgtatccatgcacctacctcagaaaacaagtattgtcaggtattctctccatagaacagcactaccctcctctctccccagatgtgactactgaggggaggtctgagtgtttaatttccgattttttcctctgcatttacacacacaccacacacgcacacacacacaccaagtaccagtataagcatctcccatctgcttttctccactgccatgtgtcctggtcaagcccccctcactctgtttcctgttcagcatgtactcccctcatccgattcccctctatcagtcactgacagttaataaacctttgcaaacgttc

SEQ ID NO: 158066 - DNA, 1253 bp, Artificial Sequence
  derived and/or modified sequence
cactttgtcaccaactgctgccaactcgccaccactgctgccgacctcgccaccactgctttgtctctgagtgagagtgctcctggtgccatgaacggagacgacgcctttgcaaagagacccagggatgatgataaagcatcagagaagagaagcaaggccttcaatgatattgccacatacttctctaagaaagagtgggaaaagatgaaatactcggagaaaatcagctatgtgtatatgaagagaaactatgaggccatgactaaactaggtttcaatgtcaccctcccacctttcatgtgtaataaacaggccacagacttccaggggaattattttgataatgaccgtaaccgcaggattcaggttgaacgtcctcagatgacttttggcaggctccagagaatcatcccgaagatcatgcccaagaagccagcagaggaaggaaatgattcgaagggagtgtcagaagcatctggcccacagaacgatgggaaacagctgcgccgccccgggaaaagcaaatacttctgagaagattaataagagatctggacccaaaagggggagacatgcctggacccacagactgcgtgagagaaaccagctggtgatttatgaagagatcagagaccctgaggaagatgatgagtaactcccctgggggatatgacacatgcccatgatgagaagcagaacatggtgacctttcacgaacatgggcatggctgcggaccctcgtcatcaggtgcatagcaagtgaaagcaagtgttcacaacagtgaaaagttgagcgtcatttttcttagtgtgccaagagttcgatgttagtgtttccattgtattttcttacactgtgccattctgttagatactatccttttcaatgatgagcaagacatacttaatgcatatttcggtttgtgtatccatgcacctacgtcagaaaacaagtattgtcatgtattctctgcatagaacagcactatcctcatctctccccagatgtgactactgagggcagtcctgagtgtttaatttcagacttcttcctctgcatttacacaccacacaacacacacacacacacacacacaccaagtaccattataagcatctcccatctgcttttcccattgccgtgcatcctggtcaagcccccctcactctgtttcctgttcagcatgtactcccctcatccgattcccctctatcagtcactgacagttaacaaacctttgcaaacattc

SEQ ID NO: 158067 - DNA, 567 bp, Artificial Sequence
  derived and/or modified sequence
atgaacggagacgatgctttcgccaagcgtccacgtgacgatgcaaaggcctccgaaaagcggtccaaagcttttgatgatattgccaagtacttcagtaaagaagaatgggaaaagatgaagttcagtgagaaaattagctgcgtccatatgaagaggaaatacgaggcaatgacgaaacttggattcaacgtcacattgtctctttttatgcgaaacaagcgggctacagatagccagcggaacgattcggacaacgatagaaacagaggtaatgaggttgagcggccccagatgaccttcggccgattacagagaattatccctaaaatcatgcctgagaagccagctgaggagggctcagacagcaagggtgtaccggaagctagtgggccacaaaacgatgggaagaaactgtgtcctcctggaaaggctagcagctctgagaaaatccacgaacgatcaggacctaaaagaggcaagcatgcctggacccatagacttcgtgaaagaaaacaactggtaatctacgaagagatcagcgaccctgaggaagatgacaagtag

SEQ ID NO: 158068 - DNA, 567 bp, Artificial Sequence
  derived and/or modified sequence
atgaatggagatgatgcctttgccaagaggcccagagatgatgccaaggccagcgagaagaggagcaaggcctttgatgacatcgccaagtacttcagcaaggaggagtgggagaagatgaagttcagcgagaagatcagctgtgtgcacatgaagaggaaatatgaggccatgaccaagctgggcttcaacgtgaccctgagcctcttcatgaggaacaagagggccacagacagccagagaaatgacagcgacaatgacaggaacagaggaaatgaggtggagcggccccagatgaccttcggccgcctgcagaggatcatccccaagatcatgcctgagaagccagctgaggagggcagtgacagcaagggcgtgcctgaggccagcggcccccagaatgatggcaagaagctgtgccccccaggcaaggccagcagcagcgagaagatccacgagaggagcggccccaagaggggcaagcacgcctggacccaccggctgcgggagaggaagcagctggtgatctatgaggagatcagtgaccctgaagaagatgacaagtag

SEQ ID NO: 158069 - DNA, 567 bp, Artificial Sequence
  derived and/or modified sequence
atgaacggcgacgacgccttcgccaagcggccccgggacgacgccaaagcaagcgagaagcggtctaaagcattcgatgacatcgctaaatatttctcaaaggaggaatgggaaaaaatgaagttcagcgaaaaaatcagctgcgttcacatgaaaaggaaatatgaggcaatgacaaagctgggttttaatgtgaccctgagcctattcatgagaaataagcgcgctactgactcccagagaaacgacagtgacaatgaccggaaccgaggcaatgaagtggagcgcccacagatgactttcggccggctgcagagaatcattccaaaaatcatgcccgagaagcccgctgaggaggggtctgactcaaagggcgtacctgaagcatctgggccacagaatgacggaaaaaaactctgcccccccggcaaagcaagctcatcggaaaagatccatgaaagatcgggtccaaaacggggcaagcatgcttggacgcaccggctgagagaaaggaagcagctagtaatatacgaggagatatctgatcccgaagaagacgataagtag

SEQ ID NO: 158070 - DNA, 1286 bp, Artificial Sequence
  derived and/or modified sequence
acactttgtcaccaactgctgccgacctcgccaccactgctttgtctctgaggtcagagtgctcctggtgccatgaacggagacgacgcctttgcaaagagacccagggatgatgctaaagcatcagagaagagaagcaaggccttcgatgatattgccaaatacttctctaaggaagagtgggaaaagatgaaattctcggagaaaatcagctgtgtgcatatgaagagaaagtatgaggccatgactaaactaggtttcaacgtcaccctctcacttttcatgcgtaataaacgggccacagactctcagaggaatgattctgataatgaccgtaaccgtgggaatgaggttgaacgtcctcagatgacttttggcaggctccagagaatcatcccgaagatcatgcccgagaagccagcagaggaaggaagtgattcgaagggagtgccagaagcatctggcccacagaacgatgggaaaaagctgtgcccgccgggaaaagcaagtagctctgagaagattcacgagagatctggacccaaaagggggaaacatgcctggacccacagactgcgtgagagaaagcagctggtgatttatgaagagatcagcgaccctgaggaagatgacaagtaactccataagtgaaccttcggctcaccctccacatccctgcagatgtgctattctgttatgcctcagggatacgacacatgcccatgatgagaagcagaacgtggtgacctttcacgaacgtgggcatggctgcggacccctcgtcatcaggtgtatagcaagtgaaagcaagtgttcacaacagtgaaaagttgagcgtcatttttcttagtgtgccaagagttcgatgttggcgtttccgttgtattttcttgcagtgtgccattctgttagacattagcattttcgttgatgagcaagacatgcttaatgcatatttcggcttgtgtatccatgcacctacctcagaaaacaagtattgtcaggtattctctccatagaacagcactaccctcctctctccccagatgtgactactgaggggaggtctgagtgtttaatttccgattttttcctctgcatttacacacacaccacacacgcacacacacacaccaagtaccagtataagcatctcccatctgcttttctccactgccatgtgtcctggtcaagcccccctcactctgtttcctgttcagcatgtactcccctcatccgattcccctctatcagtcactgacagttaataaacctttgcaaacgtt

SEQ ID NO: 158071 - DNA, 1237 bp, Artificial Sequence
  derived and/or modified sequence
ccacactttgtcaccaactgctgccgacctcgccaccactgctttgtctctgaggtcagagtgctcctggtgccatgaacggagacgacgcctttgcaaagagacccagggatgatgctaaagcatcagagaagagaagcaaggccttcgatgatattgccaaatacttctctaaggaagagtgggaaaagatgaaattctcggagaaaatcagctgtgtgcatatgaagagaaagtatgaggccatgactaaactaggtttcaacgtcaccctctcacttttcatgcgtaataaacgggccacagactctcagaggaatgattctgataatgaccgtaaccgtgggaatgaggttgaacgtcctcagatgacttttggcaggctccagagaatcatcccgaagatcatgcccgagaagccagcagaggaaggaagtgattcgaagggagtgccagaagcatctggcccacagaacgatgggaaaaagctgtgcccgccgggaaaagcaagtagctctgagaagattcacgagagatctggacccaaaagggggaaacatgcctggacccacagactgcgtgagagaaagcagctggtgatttatgaagagatcagcgaccctgaggaagatgacaagtaactcccctcagggatacgacacatgcccatgatgagaagcagaacgtggtgacctttcacgaacgtgggcatggctgcggacccctcgtcatcaggtgtatagcaagtgaaagcaagtgttcacaacagtgaaaagttgagcgtcatttttcttagtgtgccaagagttcgatgttggcgtttccgttgtattttcttgcagtgtgccattctgttagacattagcattttcgttgatgagcaagacatgcttaatgcatatttcggcttgtgtatccatgcacctacctcagaaaacaagtattgtcaggtattctctccatagaacagcactaccctcctctctccccagatgtgactactgaggggaggtctgagtgtttaatttccgattttttcctctgcatttacacacacaccacacacgcacacacacacaccaagtaccagtataagcatctcccatctgcttttctccactgccatgtgtcctggtcaagcccccctcactctgtttcctgttcagcatgtactcccctcatccgattcccctctatcagtcactgacagttaataaacctttgcaaacgttcccca

SEQ ID NO: 158072 - DNA, 567 bp, Artificial Sequence
  derived and/or modified sequence
atgaatggtgatgatgccttcgctaagcgccctcgtgacgatgctaaggccagtgaaaaaaggtctaaagccttcgatgacatagcgaagtacttctccaaggaagagtgggagaagatgaaatttagcgaaaagatttcatgcgttcatatgaagaggaagtacgaggccatgacgaagctgggcttcaacgtcaccttatccctgttcatgcggaataagcgcgctacagacagtcaaagaaatgactccgacaacgataggaaccgcggaaacgaggtcgagagacctcagatgacctttggccgactgcagaggattattcctaaaattatgccagagaaacctgcagaagaggggagcgattctaagggagttcctgaggcttccgggccacagaatgatggcaaaaaattgtgtcctcctggcaaggccagctcgtcagaaaagatacatgaaagaagcgggcctaaacggggaaagcacgcttggacccatagactcagggagaggaaacaattggtcatctacgaggagatttcagaccccgaagaggacgacaaatag

SEQ ID NO: 158073 - DNA, 567 bp, Artificial Sequence
  derived and/or modified sequence
atgaacggcgacgacgccttcgccaagagacccagagacgacgccaaggccagcgagaagagaagcaaggccttcgacgacatcgccaagtacttcagcaaggaggagtgggagaagatgaagttcagcgagaagatcagctgcgtgcacatgaagagaaagtacgaggccatgaccaagctgggcttcaacgtgaccctgagcctgttcatgagaaacaagagagccaccgacagccagagaaacgacagcgacaacgacagaaacagaggcaacgaggtggagagaccccagatgaccttcggcagactgcagagaatcatccccaagatcatgcccgagaagcccgccgaggagggcagcgacagcaagggcgtgcccgaggccagcggcccccagaacgacggcaagaagctgtgcccccccggcaaggccagcagcagcgagaagatccacgagagaagcggccccaagagaggcaagcacgcctggacccacagactgagagagagaaagcagctggtgatctacgaggagatcagcgaccccgaggaggacgacaagtag

SEQ ID NO: 158074 - DNA, 567 bp, Artificial Sequence
  derived and/or modified sequence
atgaacggcgacgacaccttcgccaagagacccagagacgacgccaaggccagcgagaagagaagcaaggccttcgacgacatcgccacctacttcagcaagaaggagtggaagaagatgaagtacagcgagaagatcagctacgtgtacatgaagagaaactacaaggccatgaccaagctgggcttcaaggtgaccctgccccccttcatgtgcaacaagcaggccaccgacttccagggcaacgacttcgacaacgaccacaacagaagaatccaggtggagcacccccagatgaccttcggcagactgcacagaatcatccccaagatcatgcccaagaagcccgccgaggacgagaacgacagcaagggcgtgagcgaggccagcggcccccagaacgacggcaagcagctgcacccccccggcaaggccaacatcagcgagaagatcaacaagagaagcggccccaagagaggcaagcacgcctggacccacagactgagagagagaaagcagctggtgatctacgaggagatcagcgaccccgaggaggacgacgagtag

SEQ ID NO: 158075 - DNA, 567 bp, Artificial Sequence
  derived and/or modified sequence
atgaatggggacgataccttcgcaaagcggccacgggacgacgctaaagcgtccgagaagcggtcaaaggcttttgacgatatagctacatacttcagcaagaaagagtggaaaaaaatgaagtatagtgagaagatctcttacgtgtatatgaagagaaattataaggccatgaccaaactcggcttcaaggtcaccctcccccctttcatgtgcaataagcaggcgaccgattttcagggaaatgactttgacaacgatcataacagaaggatccaggttgaacacccacagatgacttttggaagactacacaggattattcccaagattatgcccaaaaaacccgcagaagacgagaatgactctaaaggagtgtccgaggcttccggacctcagaacgacggtaaacagttgcacccacccggcaaagccaatataagcgagaagatcaacaaaaggtccgggccaaagcgaggtaaacatgcctggacacatcggctgcgggagaggaagcaactggttatctatgaggagatcagcgaccccgaagaagatgacgaatag

SEQ ID NO: 158076 - DNA, 567 bp, Artificial Sequence
  derived and/or modified sequence
atgaatggagatgacacctttgccaagaggcccagagatgatgccaaggccagcgagaagaggagcaaggcctttgatgacatcgccacctacttcagcaagaaggagtggaagaagatgaagtacagcgagaagatctcctatgtgtacatgaagaggaactacaaggccatgaccaagctgggcttcaaggtgaccctgccccccttcatgtgcaacaagcaggccacagacttccagggcaatgactttgacaatgaccacaacagacgcatccaggtggagcacccccagatgaccttcggccgcctgcaccgcatcatccccaagatcatgcccaagaagccagcagaagatgaaaatgacagcaagggcgtgtctgaggccagcggcccccagaatgatggcaagcagctgcaccccccaggcaaggccaacatcagcgagaagatcaacaagaggagcggccccaagaggggcaagcacgcctggacccaccggctgcgggagaggaagcagctggtgatctatgaggagatcagtgaccctgaagaagatgatgaatag

SEQ ID NO: 158077 - DNA, 567 bp, Artificial Sequence
  derived and/or modified sequence
atgaacggcgacgacaccttcgccaagcggccccgggacgacgccaaagcttcggagaaacggagtaaggcattcgatgatattgccacgtacttctcaaagaaggaatggaagaaaatgaaatacagcgagaaaatatcctacgtgtatatgaagaggaattacaaggccatgacgaaactgggttttaaggtcacgctgccgccgtttatgtgtaataaacaggccactgactttcagggcaacgattttgataacgaccacaatagaaggatacaagtagagcacccgcagatgactttcgggcggttgcatcgaataattcctaagatcatgccaaagaagcctgccgaggatgagaacgactccaaaggcgtctctgaagcttctggccctcagaacgatgggaagcagctccacccgcctggaaaagccaacatttccgagaagataaataagcggtctgggccgaaacgtggcaaacacgcctggacccatcgccttcgagagcggaagcagctggtgatctacgaagagatttctgatccagaagaagacgacgagtag

SEQ ID NO: 158078 - DNA, 567 bp, Artificial Sequence
  derived and/or modified sequence
atgaatggcgatgacaccttcgctaagaggcccagggatgacgcaaaagctagcgagaagcgatcgaaagccttcgacgacatcgccacatactttagcaagaaggagtggaaaaaaatgaagtactccgagaagattagttacgtatacatgaagaggaattacaaagctatgactaaattgggatttaaagtgaccttgccgcctttcatgtgtaacaagcaggccaccgatttccagggaaatgacttcgataacgaccacaacaggcggatccaagtggagcatccccagatgacgtttgggaggcttcaccgaattatccctaagatcatgccgaagaaacccgctgaggatgaaaacgactctaagggcgtctccgaagcctccgggccacagaatgacgggaaacagctgcaccccccaggaaaagctaacatatccgagaaaattaacaaaaggagtggcccaaaaagagggaaacatgcttggactcaccgcctgcgagaacgcaagcagttggttatatacgaagagatctccgaccccgaggaagacgacgagtag

SEQ ID NO: 158079 - DNA, 1298 bp, Artificial Sequence
  derived and/or modified sequence
tcctggagcaatgacattgcagaatattttctcctcctccagccacactttgtcaccaactgctgccaactcgccaccactgctgccgacctcgcaaccactgctttgtctctgaagtgagactgctcctggtgccatgaacggagacgacacctttgcaaagagacccagggatgatgctaaagcatcagagaagagaagcaaggcctttgatgatattgccacatacttctctaagaaagagtggaaaaagatgaaatactcggagaaaatcagctatgtgtatatgaagagaaactataaggccatgactaaactaggtttcaaagtcaccctcccacctttcatgtgtaataaacaggccacagacttccaggggaatgattttgataatgaccataaccgcaggattcaggttgaacatcctcagatgactttcggcaggctccacagaatcatcccgaagatcatgcccaagaagccagcagaggacgaaaatgattcgaagggagtgtcagaagcatctggcccacaaaacgatgggaaacaactgcaccccccaggaaaagcaaatatttctgagaagattaataagagatctggacccaaaagggggaaacatgcctggacccacagactgcgtgagagaaagcagctggtgatttatgaagagatcagtgaccctgaggaagatgacgagtaactcccctgggggatacgacacatgcccttgatgagaagcagaacgtggtgacctttcacgaacatgggcatggctgcggctccctcgtcatcaggtgcatagcaagtgaaagcaagtgttcacaacggtgaaacttgagcgtcatttttcttagtgtgccaagagttcgatgttagtgtttccattgtattttcttacagtgtgccattctgttagatactatccttataattgatgagcaagacatactgaatgcatatttcggtttgtgtatccatgcacctacgtcagaaaacaagtattgtcaggtattctctccatagaacagcactatcctcatctctccccagatgtgactactgagggcagttctgagtgtttaatttcagactttttcctctgcatttacacacacacacacacacacacgcacacacacacaccaagtaccagtataagcatctcccatctgcttttcccattgccatgcgtcctggtcaagcccccctcactctgtttcctgttcagcatgtactcccctcatccgattcccctgtatcagtcactgacagttaataaacctttgcaaacgttc

SEQ ID NO: 158080 - protein, 387 aa, Artificial Sequence
  derived and/or modified sequence
MSVAFAAPRQRGKGEITPAAIQKMLDDNNHLIQCIMDSQNKGKTSECSQYQQMLHTNLVYLATIADSNQNMQSLLPAPPTQNMPMGPGGMNQSGPPPPPRSHNMPSDGMVGGGPPAPHMQNQMNGQMPGPNHMPMQGPGPNQLNMTNSSMNMPSSSHGSMGGYNHSVPSSQSMPVQNQMTMSQGQPMGNYGPRPNMSMQPNQGPMMHQQPPSQQYNMPQGGGQHYQGQQPPMGMMGQVNQGNHMMGQRQIPPYRPPQQGPPQQYSGQEDYYGDQYSHGGQGPPEGMNQQYYPDGNSQYGQQQDAYQGPPPQQGYPPQQQQYPGQQGYPGQQQGYGPSQGGPGPQYPNYPQGQGQQYGGYRPTQPGPPQPPQQRPYGYDQGQYGNYQQ

SEQ ID NO: 158081 - protein, 335 aa, Artificial Sequence [sequence omitted]

SEQ ID NO: 158082 - DNA, 1164 bp, Artificial Sequence
  derived and/or modified sequence
atgagcgtggccttcgccgcccccagacagagaggcaagggcgagatcacccccgccgccatccagaagatgctggacgacaacaaccacctgatccagtgcatcatggacagccagaacaagggcaagaccagcgagtgcagccagtaccagcagatgctgcacaccaacctggtgtacctggccaccatcgccgacagcaaccagaacatgcagagcctgctgcccgccccccccacccagaacatgcccatgggccccggcggcatgaaccagagcggccccccccccccccccagaagccacaacatgcccagcgacggcatggtgggcggcggcccccccgccccccacatgcagaaccagatgaacggccagatgcccggccccaaccacatgcccatgcagggccccggccccaaccagctgaacatgaccaacagcagcatgaacatgcccagcagcagccacggcagcatgggcggctacaaccacagcgtgcccagcagccagagcatgcccgtgcagaaccagatgaccatgagccagggccagcccatgggcaactacggccccagacccaacatgagcatgcagcccaaccagggccccatgatgcaccagcagccccccagccagcagtacaacatgccccagggcggcggccagcactaccagggccagcagccccccatgggcatgatgggccaggtgaaccagggcaaccacatgatgggccagagacagatccccccctacagacccccccagcagggccccccccagcagtacagcggccaggaggactactacggcgaccagtacagccacggcggccagggcccccccgagggcatgaaccagcagtactaccccgacggcaacagccagtacggccagcagcaggacgcctaccagggcccccccccccagcagggctaccccccccagcagcagcagtaccccggccagcagggctaccccggccagcagcagggctacggccccagccagggcggccccggcccccagtaccccaactacccccagggccagggccagcagtacggcggctacagacccacccagcccggccccccccagcccccccagcagagaccctacggctacgaccagggccagtacggcaactaccagcagtag

SEQ ID NO: 158083 - DNA, 1164 bp, Artificial Sequence
  derived and/or modified sequence
atgtccgtagcttttgccgcgccacggcaaaggggaaagggagaaatcacgcctgcagccattcaaaagatgctggatgacaacaatcatctgatacagtgcataatggattcccagaacaaggggaagaccagtgagtgcagccagtatcagcagatgctgcataccaatctggtgtacctggccactatcgcagacagcaatcagaatatgcagtctctgttgccagctcctccaactcaaaacatgcctatgggtcccggcgggatgaaccaatccggaccaccgccgcctccaaggtctcacaatatgccctctgacggcatggtcggaggaggccctcctgccccacacatgcagaatcagatgaacgggcaaatgcctggcccaaaccatatgccaatgcaggggcccgggccaaatcaattaaacatgacaaactcctcgatgaatatgcctagttcctcgcacggcagtatgggcgggtataatcactctgtgccttcttcacagtcaatgcccgtgcagaatcagatgaccatgagtcagggtcagcctatgggaaactacggcccaaggcccaatatgtccatgcagcccaaccagggccccatgatgcaccagcagcccccatcacagcaatacaatatgcctcagggaggcgggcagcattatcagggtcagcagccccccatggggatgatggggcaggtgaaccagggcaaccacatgatggggcaaagacagattccaccatacaggcctccgcagcaagggccaccccagcagtacagcggccaggaagattactacggagaccaatattcgcatggaggtcagggcccccccgaaggcatgaaccagcaatattaccccgatggtaacagtcaatacggccagcagcaagatgcataccagggacctccaccccagcaaggttaccctccgcagcagcagcagtatccaggtcagcaaggctacccgggtcagcagcagggttatggaccaagccaggggggccccggcccgcagtatccgaactacccacaggggcaaggccaacaatacgggggctatcgccctacccagcccggccctcctcagccccctcagcagaggccctacggttacgatcagggtcagtacggtaattaccaacagtag

SEQ ID NO: 158084 - DNA, 1164 bp, Artificial Sequence
  derived and/or modified sequence
atgtctgtggcctttgctgccccccggcagagaggaaaaggagagatcaccccagctgccatccagaagatgctggatgacaacaaccacctgatccagtgcatcatggacagccagaacaagggcaagaccagcgagtgcagccagtaccagcagatgctgcacaccaacctggtgtacctggccaccatcgctgacagcaaccagaacatgcagagcctgctgcctgccccacccacccagaacatgcccatgggccctgggggcatgaaccagagcggccccccacctccacccaggagccacaacatgcccagtgatggcatggtgggcggcggccccccagccccccacatgcagaaccagatgaatggccagatgcctggccccaaccacatgcccatgcagggccctggccccaaccagctgaacatgaccaacagctccatgaacatgcccagcagcagccacggctccatgggcggctacaaccacagcgtgcccagcagccagagcatgcctgtgcagaaccagatgaccatgagccagggccagcccatgggcaactacggcccccggcccaacatgtccatgcagcccaaccagggccccatgatgcaccagcagccccccagccagcagtacaacatgccccagggcggcggccagcactaccagggccagcagccccccatgggcatgatgggccaggtgaaccagggcaaccacatgatgggccagaggcagatccccccctacagaccaccccagcagggccccccccagcagtacagcggccaggaggactactatggagaccagtacagccatggaggccagggccccccagagggcatgaaccagcagtactacccagatggcaacagccagtatggccagcagcaggatgcctaccagggccccccaccccagcagggctacccaccccagcagcagcagtacccaggccagcagggctacccaggccagcagcagggctacggccccagccagggcggccctggcccccagtaccccaactacccccagggccagggccagcagtatggaggctaccggcccacccagcccggccccccccagcccccccagcagaggccctacggctatgaccagggccagtatggcaactaccagcagtag

SEQ ID NO: 158085 - DNA, 1164 bp, Artificial Sequence
  derived and/or modified sequence
atgagcgtggccttcgccgccccccggcagcggggcaagggcgagatcacccccgccgccatccagaagatgctggatgacaataatcatctgatccaatgcatcatggattcccagaacaagggcaaaacatctgaatgtagccagtaccagcaaatgctgcacacaaatctcgtctatttggctactattgcagattccaaccagaacatgcaatcccttcttccggccccccccactcaaaatatgcccatggggcctgggggcatgaatcagtccggccccccaccccctccaaggagccacaacatgccttccgatggaatggtgggaggtggaccccccgcaccacacatgcagaaccaaatgaatggtcagatgcccggacctaatcacatgcctatgcaggggccgggaccaaatcagctcaacatgaccaattcctcgatgaatatgccttctagctctcatgggagcatgggcggatacaaccatagcgtgcccagttcacaaagcatgccggtacagaatcagatgaccatgtctcagggccaacccatgggcaactacggaccacggcctaatatgtccatgcagcctaaccagggccctatgatgcaccagcagcctccttctcagcagtacaacatgcctcagggtggggggcagcactatcaggggcagcagcctccgatggggatgatggggcaagtgaaccaaggcaatcatatgatgggtcagagacagattcccccttatcgccctccccaacaagggccccctcagcagtactccgggcaggaagattattacggagatcaatactcccacggcgggcagggaccaccggaaggaatgaatcagcaatattaccccgatggcaattctcaatacggccagcagcaagatgcataccagggcccgcccccgcagcagggttaccctccccagcaacagcagtatccagggcagcagggatatccgggccaacagcaaggttacggcccgagccaggggggtccagggccccagtacccaaactacccgcagggtcaagggcagcagtatggcggataccgccccacacagcccggtcctcctcagccgccacagcagcgaccctacggctacgatcagggccaatacgggaactaccagcagtag

SEQ ID NO: 158086 - DNA, 1164 bp, Artificial Sequence
  derived and/or modified sequence
atgagcgtggcctttgccgcacccagacaacgaggcaagggtgagataacccctgcggctatccagaaaatgctcgatgacaataaccacctaattcagtgcattatggactcccagaataaaggcaaaacctcagaatgctcccagtaccaacagatgctgcacactaatctcgtatatttggctacaatcgccgattcaaaccaaaatatgcagagtctcttgccggcacctcccacccaaaatatgccaatgggtcccggtggcatgaatcagagtgggcctccccctccccctcgctcacataatatgccttcagacggcatggtgggcggtgggcctccggcaccccacatgcagaaccagatgaacggccagatgcctgggccaaatcacatgccgatgcagggaccgggaccaaaccagcttaatatgaccaattctagtatgaacatgccctcaagctcgcacggcagcatgggcggttacaatcactctgtgccaagtagccagtccatgcctgtgcagaatcagatgactatgtcacagggtcaacccatgggtaattacggtcctagaccgaatatgagcatgcaaccaaaccagggccctatgatgcaccagcagcctcctagccagcagtataacatgccacaagggggtggacagcactatcaggggcaacaacccccaatgggaatgatggggcaggtgaatcaaggaaaccatatgatgggccagcgacaaattcctccttaccggccaccccagcaggggcctccacaacagtactctggacaggaggattattacggcgaccaatactcacacggaggacagggaccaccggagggcatgaaccaacaatactatcccgatgggaattcccagtacggacaacagcaggacgcgtatcaggggccacctcctcagcaggggtatccaccacagcaacagcaatacccgggtcaacaaggttatcctggacagcaacagggatacggtccgtcgcaggggggacctggtccacagtaccccaattacccccagggccaaggacagcagtacgggggttacagacccactcagcctggaccccctcagcctccacagcagcggccatacggctatgatcaggggcaatacggcaactatcagcaatag

SEQ ID NO: 158087 - DNA, 3341 bp, Artificial Sequence
  derived and/or modified sequence
gagaggccggcgtctctcccccagtttgccgttcacccggagcgctcgggacttgccgatagtggtgacggcggcaacatgtctgtggctttcgcggccccgaggcagcgaggcaagggggagatcactcccgctgcgattcagaagatgttggatgacaataaccatcttattcagtgtataatggactctcagaataaaggaaagacctcagagtgttctcagtatcagcagatgttgcacacaaacttggtataccttgctacaatagcagattctaatcaaaatatgcagtctcttttaccagcaccacccacacagaatatgcctatgggtcctggagggatgaatcagagcggccctcccccacctccacgctctcacaacatgccttcagatggaatggtaggtgggggtcctcctgcaccgcacatgcagaaccagatgaacggccagatgcctgggcctaaccatatgcctatgcagggacctggacccaatcaactcaatatgacaaacagttccatgaatatgccttcaagtagccatggatccatgggaggttacaaccattctgtgccatcatcacagagcatgccagtacagaatcagatgacaatgagtcagggacaaccaatgggaaactatggtcccagaccaaatatgagtatgcagccaaaccaaggtccaatgatgcatcagcagcctccttctcagcaatacaatatgccacagggaggcggacagcattaccaaggacagcagccacctatgggaatgatgggtcaagttaaccaaggcaatcatatgatgggtcagagacagattcctccctatagacctcctcaacagggcccaccacagcagtactcaggccaggaagactattacggggaccaatacagtcatggtggacaaggtcctccagaaggcatgaaccagcaatattaccctgatggaaattcacagtatggccaacagcaagatgcataccagggaccacctccacaacagggatatccaccccagcagcagcagtacccagggcagcaaggttacccaggacagcagcagggctacggtccttcacagggtggtccaggtcctcagtatcctaactacccacagggacaaggtcagcagtatggaggatatagaccaacacagcctggaccaccacagccaccccagcagaggccttatggatatgaccagggacagtatggaaattaccagcagtgaaaaagtacttacattccagtagccagtatctattagcagccatattgtcacctcagcactgtggacacctccctgtgaagagatccttccattccatctagtttttggaaaaaccttgtggataagtggctgtttcatcagtaagcagcctttgtggtttagttataaaaggctttagtagctcaaaaatactcttgatttcacatttctactctagatggcaacattggacagaaaatgcaatgacataaccaatttgtaatgattttggaactgtgtttcaaatggactgttacagactgaaaggtgtgaacagctttgtatgtttatgaagggtaagggaatttaatacttttccacagatttttttgtaaggggaagagggaaatgtacactttttacagcagcaatattttgtatattatgtttatttcatgtggtgaatatgcaaggcggtacactacgcactggacagcatcagaaatcctctgttaatgtggactggaacatggtagatgcttgattgttttggtctcaaaatggtgtgctataaagataaaggtgaggggaagacaaagcacaccatatgtccactgttctgttctcatagaggaaattcaaatcccttttatctattagataatcaagggcactgtgatacagttttgagtaaaaagacattttttaaaagccttccagttttgtggattaaacctttttataaagatcatttataatactgttttaaaatgtgaggcaataagaattactttgtgttggatctgaggaggctttggtaaaacagtttcatctaaatgaaagtggtaatcctcttctaaaatagcaataactgaaaatgaaagtgttaattttaccttgtttgagttatcagggaacttagtaagtaatatcaaagcattttataaatgatatcaaagaagagtcaacattgatccagtcattttattttgtaatattgagggataattggttattaaactgaatagttcaggagactttacaaacctttgtttcaactttcttatctggaaataatatcatttataaagggacacttttatgtttttcccttttttatgttggttgatataacacaaagagatatttaggaaaatgcttattgatgaggtttattctatctgtttttaaagcaccgaggttgcattctagataaccttgtttattagcatggcatattttaatcattatttgagactgtcctgtgcctgattattttagctaaattcagggagattgcgtggggcaggaaagcatgcattgaaaaatttctaaccacggttatttaagcataatctgaaaacatctagcccaaaggtaagttgctattttcatcacagttgcctatgcccagggaataagatgtattctttataattgaattggtttttcccacgtctaactggaaacaaaacagaaggggcgtcataaatttgaataagcagaacatactgttctcaacatactgtaatcaaaaggaggaatttcagtgggtctctgtgtgtgtatgagagagagagtgtgtgtttgtgtgtttcaaggtcagaacaggtttttttgtttttgttttttgttctttgtttttttttttgagatggagtcttgctcttgtcgcccaggctggagtgcagtggcgcaatctcagctcactgcaacctccgcctcccaggttcaagcagttctcctgcctcagcctcctgagtagctgggatgacaggcacccgccaccacacccagctaatttttgtacttttagtagagacgaggtttcgccatgttggccaggctggtctcgaactcctgacctcaggtgatccacccgcctcggccttccaaagtgctgggattacaggcgtgagccaccgtgcctggccagaataggttttttctttcaacttgatcagtagaaaatggacatcaagtttgaacagataaatcatggacagccttattgtgattgaaatgcttgtaggttctgtgccaattttccaccactgtgtactttgttgctatttaaaactgtatcaactctaacggaagaataaattatttgtgatttt

SEQ ID NO: 158088 - DNA, 1827 bp, Artificial Sequence
  derived and/or modified sequence
acttgccgatagtggtgacggcggcaacatgtctgtggctttcgcggccccgaggcagcgaggcaagggggagatcactcccgctgcgattcagaagatgttggatgacaataaccatcttattcagtgtataatggactctcagaataaaggaaagacctcagagtgttctcaggtgagtccaaactattccagagttgcataaatttcaaacaacaaaaaaaattagtgtcgatcattcatcgtaatttaaaagagttgtttaaatctgtagtttggaagataacttttattctataaagtgcattcccgttgtctaataaatattcatagcttctaggtatcagcagatgttgcacacaaacttggtataccttgctacaatagcagattctaatcaaaatatgcagtctcttttaccagcaccacccacacagaatatgcctatgggtcctggagggatgaatcagagcggccctcccccacctccacgctctcacaacatgccttcagatggaatggtaggtgggggtcctcctgcaccgcacatgcagaaccagatgaacggccagatgcctgggcctaaccatatgcctatgcagggacctggacccaatcaactcaatatgacaaacagttccatgaatatgccttcaagtagccatggatccatgggaggttacaaccattctgtgccatcatcacagagcatgccagtacagaatcagatgacaatgagtcagggacaaccaatgggaaactatggtcccagaccaaatatgagtatgcagccaaaccaaggtccaatgatgcatcagcagcctccttctcagcaatacaatatgccacagggaggcggacagcattaccaaggacagcagccacctatgggaatgatgggtcaagttaaccaaggcaatcatatgatgggtcagagacagattcctccctatagacctcctcaacagggcccaccacagcagtactcaggccaggaagactattacggggaccaatacagtcatggtggacaaggtcctccagaaggcatgaaccagcaatattaccctgatggaaattcacagtatggccaacagcaagatgcataccagggaccacctccacaacagggatatccaccccagcagcagcagtacccagggcagcaaggttacccaggacagcagcagggctacggtccttcacagggtggtccaggtcctcagtatcctaactacccacagggacaaggtcagcagtatggaggatatagaccaacacagcctggaccaccacagccaccccagcagaggccttatggatatgaccagggacagtatggaaattaccagcagtgaaaaagtacttacattccagtagccagtatctattagcagccatattgtcacctcagcactgtggacacctccctgtgaagagatccttccattccatctagtttttggaaaaaccttgtggataagtggctgtttcatcagtaagcagcctttgtggtttagttataaaaggctttagtagctcaaaaatactcttgatttcacatttctactctagatggcaacattggacagaaaatgcaatgacataaccaatttgtaatgattttggaactgtgtttcaaatggactgttacagactgaaaggtgtgaacagctttgtatgtttatgaagggtaagggaatttaatacttttccacagatttttttgtaaggggaagagggaaatgtacactttttacagcagcaatattttgtatattatgtttatttcatgtggtgaatatgcaaggcggtacactacgcact

SEQ ID NO: 158089 - DNA, 1545 bp, Artificial Sequence
  derived and/or modified sequence
acttgccgatagtggtgacggcggcaacatgtctgtggctttcgcggccccgaggcagcgaggcaagggggagatcactcccgctgcgattcagaagatgttggatgacaataaccatcttattcagtgtataatggactctcagaataaaggaaagacctcagagtgttctcaggtcatgaataaaccacatctgttagtatggtttggtcagtggtcctcagaaaatctcatgtcgtgcaaccatactaatactcaagcaaaggaaaacttgaaggcctagactgaaacaggtatcagcagatgttgcacacaaacttggtataccttgctacaatagcagattctaatcaaaatatgcagtctcttttaccagcaccacccacacagaatatgcctatgggtcctggagggatgaatcagagcggccctcccccacctccacgctctcacaacatgccttcagatggaatggtaggtgggggtcctcctgcaccgcacatgcagaaccagatgaacggccagatgcctgggcctaaccatatgcctatgcagggacctggacccaatcaactcaatatgacaaacagttccatgaatatgccttcaagtagccatggatccatgggaggttacaaccattctgtgccatcatcacagagcatgccagtacagaatcagatgacaatgagtcagggacaaccaatgggaaactatggtcccagaccaaatatgagtatgcagccaaaccaaggtccaatgatgcatcagcagcctccttctcagcaatacaatatgccacagggaggcggacagcattaccaaggacagcagccacctatgggaatgatgggtcaagttaaccaaggcaatcatatgatgggtcagagacagattcctccctatagacctcctcaacagggcccaccacagcagtactcaggccaggaagactattacggggaccaatacagtcatggtggacaaggtcctccagaaggcatgaaccagcaatattaccctgatggaaattcacagtatggccaacagcaagatgcataccagggaccacctccacaacagggatatccaccccagcagcagcagtacccagggcagcaaggttacccaggacagcagcagggctacggtccttcacagggtggtccaggtcctcagtatcctaactacccacagggacaaggtcagcagtatggaggatatagaccaacacagcctggaccaccacagccaccccagcagaggccttatggatatgaccagggacagtatggaaattaccagcagtgaaaaagtacttacattccagtagccagtatctattagcagccatattgtcacctcagcactgtggacacctccctgtgaagagatccttccattccatctagtttttggaaaaaccttgtggataagtggctgtttcatcagtaagcagcctttgtggtttagttataaaaggctttagtagctcaaaaatactcttgatttcacatttctactctagatggcaacattggacag

SEQ ID NO: 158090 - protein, 220 aa, Artificial Sequence
  derived and/or modified sequence
MAILFAVVARGTTILAKHAWCGGNFLEVTEQILAKIPSENNKLTYSHGNYLFHYICQDRIVYLCITDDDFERSRAFNFLNEIKKRFQTTYGSRAQTALPYAMNSEFSSVLAAQLKHHSENKGLDKVMETQAQVDELKGIMVRNIDLVAQRGERLELLIDKTENLVDSSVTFKTTSRNLARAMCMKNLKLTIIIIIVSIVFIYIIVSPLCGGFTWPSCVKK

SEQ ID NO: 158091 - DNA, 663 bp, Artificial Sequence
  derived and/or modified sequence
atggccatcctgttcgccgtggtggccagaggcaccaccatcctggccaagcacgcctggtgcggcggcaacttcctggaggtgaccgagcagatcctggccaagatccccagcgagaacaacaagctgacctacagccacggcaactacctgttccactacatctgccaggacagaatcgtgtacctgtgcatcaccgacgacgacttcgagagaagcagagccttcaacttcctgaacgagatcaagaagagattccagaccacctacggcagcagagcccagaccgccctgccctacgccatgaacagcgagttcagcagcgtgctggccgcccagctgaagcaccacagcgagaacaagggcctggacaaggtgatggagacccaggcccaggtggacgagctgaagggcatcatggtgagaaacatcgacctggtggcccagagaggcgagagactggagctgctgatcgacaagaccgagaacctggtggacagcagcgtgaccttcaagaccaccagcagaaacctggccagagccatgtgcatgaagaacctgaagctgaccatcatcatcatcatcgtgagcatcgtgttcatctacatcatcgtgagccccctgtgcggcggcttcacctggcccagctgcgtgaagaagtag

SEQ ID NO: 158092 - DNA, 663 bp, Artificial Sequence
  derived and/or modified sequence
atggcaattctgtttgcagtggtggcccgcgggaccaccatcctggccaaacacgcatggtgcggcgggaattttcttgaggtgacagagcagattctcgccaaaattccatccgagaacaacaagctcacatatagccacgggaattacctgtttcactatatttgtcaggataggatcgtctacttgtgtatcacagatgatgacttcgaaagaagccgggcttttaattttttgaatgagattaagaaacgctttcagactacctatggctctagagctcagaccgcactgccatatgcgatgaacagcgaattttcttccgtcctggccgctcagctcaagcaccattctgaaaataaaggactcgacaaggtgatggagactcaggcccaggtggacgagctgaagggaatcatggtgaggaacattgatctcgtggctcagaggggggaacgcctggagctgttgattgacaagaccgagaatttggtcgatagttccgtgacttttaaaacaacctcacggaatctcgccagggcaatgtgtatgaagaacctcaagctaaccattattatcattatcgttagtattgtgtttatttacatcatcgtttctccgctttgcggggggtttacatggccaagttgtgttaagaagtag

SEQ ID NO: 158093 - DNA, 663 bp, Artificial Sequence
  derived and/or modified sequence
atggccatcctgtttgctgtggtggcccggggcaccaccatcctggccaagcacgcctggtgtggcggcaacttcctggaggtgacagagcagatcctggccaagatccccagcgagaacaacaagctgacctacagccacggcaactacctgttccactacatctgccaggaccgcatcgtgtacctgtgcatcacagatgatgactttgagaggagccgggccttcaacttcctgaatgagatcaagaagcgcttccagaccacctacggcagccgggcccagacagccctgccctatgccatgaacagcgagttcagctctgtgctggccgcccagctgaagcaccacagtgaaaataaaggcctggacaaggtgatggagacccaggcccaggtggatgagctgaagggcatcatggtgaggaacatcgacctggtggcccagagaggagagcggctggagctgctgattgacaagacagagaacctggtggacagctctgtgaccttcaagaccaccagcaggaacctggcccgggccatgtgcatgaagaacctgaagctgaccatcatcatcatcatcgtgtccatcgtgttcatctacatcatcgtgagccccctgtgtggcggcttcacctggcccagctgtgtgaagaagtag

SEQ ID NO: 158094 - DNA, 663 bp, Artificial Sequence
  derived and/or modified sequence
atggccatcctgttcgccgtggtggcccggggcaccaccatcctggccaagcacgcctggtgcgggggcaatttcctcgaggtgactgagcagattttagctaaaatcccatccgagaacaacaaactgacttatagccatggcaattatctgttccactacatctgccaagatcgtattgtttacttatgcattacagatgacgatttcgagaggagtcgggcgttcaattttctgaatgagattaaaaaacggttccaaaccacgtacggaagtagagcccagactgcacttccctacgctatgaattcggagttttcgtccgtgctggctgctcaactgaagcaccacagcgagaataagggacttgataaagtaatggagacgcaggcccaggtggatgaactcaaggggatcatggttcgaaacatagatttggttgcacagagaggtgagaggctcgagctgctcatcgacaagaccgaaaatttagtcgatagcagcgtgaccttcaagacaacctcgcgaaacctggccagagcaatgtgtatgaagaatctgaagctgaccattattattataatcgtgagtatcgtcttcatttatatcatcgtgtcaccgttgtgcgggggtttcacatggccaagctgcgtgaagaaatag

SEQ ID NO: 158095 - DNA, 663 bp, Artificial Sequence
  derived and/or modified sequence
atggcaatattattcgcggtggtggcacgcggtaccaccattttggctaagcacgcctggtgtgggggaaacttcctcgaagttacagagcagatcctggccaagatcccaagcgagaataataagctaacatactcccacggcaactacctgtttcattatatatgtcaggatcgaattgtgtacctgtgcatcactgatgatgatttcgagcggtccagagccttcaatttccttaatgaaattaaaaaacgctttcagaccacttacgggtcaagagcgcagacggctctaccttacgctatgaacagcgaatttagcagtgtgctcgcggctcagctgaagcaccactcggagaacaaaggattagacaaggtgatggagacacaggcgcaggtcgacgagttaaaaggcatcatggttcggaacatcgacctggtggctcagcgaggagagcggctggagcttctcatcgataaaacagaaaatttggtggacagttctgtgaccttcaagactacgtccagaaacctcgccagagctatgtgtatgaaaaatctcaagttgactatcattatcattattgtaagcatagtgttcatatatatcatcgtctccccactgtgtggcggattcacttggccatcttgcgttaaaaagtag

SEQ ID NO: 158096 - protein, 422 aa, Artificial Sequence
  derived and/or modified sequence
MVSESHHEALAAPPVTTVATVLPSNATEPASPGEGKEDAFSKLKEKFMNELHKIPLPPWALIAIAIVAVLLVLTCCFCICKKCLFKKKNKKKGKEKGGKNAINMKDVKDLGKTMKDQALKDDDAETGLTDGEEKEEPKEEEKLGKLQYSLDYDFQNNQLLVGIIQAAELPALDMGGTSDPYVKVFLLPDKKKKFETKVHRKTLNPVFNEQFTFKVPYSELGGKTLVMAVYDFDRFSKHDIIGEFKVPMNTVDFGHVTEEWRDLQSAEKEEQEKLGDICFSLRYVPTAGKLTVVILEAKNLKKMDVGGLSDPYVKIHLMQNGKRLKKKKTTIKKNTLNPYYNESFSFEVPFEQIQKVQVVVTVLDYDKIGKNDAIGKVFVGYNSTGAELRHWSDMLANPRRPIAQWHTLQVEEEVDAMLAVKK

SEQ ID NO: 158097 - protein, 182 aa, Artificial Sequence
  derived and/or modified sequence
MVSESHHEALAAPPVTTVATVLPSNATEPASPGEGKEDAFSKLKEKFMNELHKIPLPPWALIAIAIVAVLLVLTCCFCICKKCLFKKKNKKKGKEKGGKNAINMKDVKDLGKTMKDQALKDDDAETGLTDGEEKEEPKEEEKLGKLQYSLDYDFQNNQLLVGIIQAAELPALDMGGTSDPYV

SEQ ID NO: 158098 - protein, 72 aa, Artificial Sequence
  derived and/or modified sequence
MVSESHHEALAAPPVTTVATVLPSNATEPASPGEGKEDAFSKLKEKFMNELHKIPLPPWALIAIAIVAVLLV

SEQ ID NO: 158099 - protein, 73 aa, Artificial Sequence
  derived and/or modified sequence
MVSESHHEALAAPPVTTVATVLPSNATEPASPGEGKEDAFSKLKEKFMNELHKIPLPPWALIAIAIVAVLLVL

SEQ ID NO: 158100 - protein, 94 aa, Artificial Sequence
  derived and/or modified sequence
MVSESHHEALAAPPVTTVATVLPSNATEPASPGEGKEDAFSKLKEKFMNELHKIPLPPWALIAIAIVAVLLVLTCCFCICKKCLFKKKNKKKGK

SEQ ID NO: 158101 - DNA, 1269 bp, Artificial Sequence
  derived and/or modified sequence
atggtgagcgagagccaccacgaggccctggccgccccccccgtgaccaccgtggccaccgtgctgcccagcaacgccaccgagcccgccagccccggcgagggcaaggaggacgccttcagcaagctgaaggagaagttcatgaacgagctgcacaagatccccctgcccccctgggccctgatcgccatcgccatcgtggccgtgctgctggtgctgacctgctgcttctgcatctgcaagaagtgcctgttcaagaagaagaacaagaagaagggcaaggagaagggcggcaagaacgccatcaacatgaaggacgtgaaggacctgggcaagaccatgaaggaccaggccctgaaggacgacgacgccgagaccggcctgaccgacggcgaggagaaggaggagcccaaggaggaggagaagctgggcaagctgcagtacagcctggactacgacttccagaacaaccagctgctggtgggcatcatccaggccgccgagctgcccgccctggacatgggcggcaccagcgacccctacgtgaaggtgttcctgctgcccgacaagaagaagaagttcgagaccaaggtgcacagaaagaccctgaaccccgtgttcaacgagcagttcaccttcaaggtgccctacagcgagctgggcggcaagaccctggtgatggccgtgtacgacttcgacagattcagcaagcacgacatcatcggcgagttcaaggtgcccatgaacaccgtggacttcggccacgtgaccgaggagtggagagacctgcagagcgccgagaaggaggagcaggagaagctgggcgacatctgcttcagcctgagatacgtgcccaccgccggcaagctgaccgtggtgatcctggaggccaagaacctgaagaagatggacgtgggcggcctgagcgacccctacgtgaagatccacctgatgcagaacggcaagagactgaagaagaagaagaccaccatcaagaagaacaccctgaacccctactacaacgagagcttcagcttcgaggtgcccttcgagcagatccagaaggtgcaggtggtggtgaccgtgctggactacgacaagatcggcaagaacgacgccatcggcaaggtgttcgtgggctacaacagcaccggcgccgagctgagacactggagcgacatgctggccaaccccagaagacccatcgcccagtggcacaccctgcaggtggaggaggaggtggacgccatgctggccgtgaagaagtag

SEQ ID NO: 158102 - DNA, 549 bp, Artificial Sequence
  derived and/or modified sequence
atggtgagcgagagccaccacgaggccctggccgccccccccgtgaccaccgtggccaccgtgctgcccagcaacgccaccgagcccgccagccccggcgagggcaaggaggacgccttcagcaagctgaaggagaagttcatgaacgagctgcacaagatccccctgcccccctgggccctgatcgccatcgccatcgtggccgtgctgctggtgctgacctgctgcttctgcatctgcaagaagtgcctgttcaagaagaagaacaagaagaagggcaaggagaagggcggcaagaacgccatcaacatgaaggacgtgaaggacctgggcaagaccatgaaggaccaggccctgaaggacgacgacgccgagaccggcctgaccgacggcgaggagaaggaggagcccaaggaggaggagaagctgggcaagctgcagtacagcctggactacgacttccagaacaaccagctgctggtgggcatcatccaggccgccgagctgcccgccctggacatgggcggcaccagcgacccctacgtgtag

SEQ ID NO: 158103 - DNA, 1269 bp, Artificial Sequence
  derived and/or modified sequence
atggtctcggagtcccatcacgaggctcttgccgccccccctgtaactacagtggccacggtcctgcccagcaacgcgacggaacccgcttccccaggcgaggggaaggaagacgcgttttcgaagctgaaagaaaagttcatgaacgaacttcacaagattcccctgccaccctgggccctgattgctatagctatagtagcagtgctgttggtcctgacttgctgcttctgcatctgtaagaagtgtctattcaagaaaaagaataagaaaaagggcaaagaaaaaggcggtaaaaacgcaattaatatgaaagacgtgaaggatttaggcaaaactatgaaggatcaggccctgaaagacgacgacgcggagacaggcctgacagacggcgaagagaaggaagagccaaaagaggaggagaaattgggcaagctgcagtatagcttagattatgactttcagaacaatcagctgctggtgggtatcattcaggctgccgagctgccagctttggatatggggggcacgagcgatccatacgtcaaagtgttcctactgccagacaagaagaagaaatttgagaccaaggtacatcgtaaaacccttaatcctgttttcaatgagcagttcacattcaaagtcccctatagtgaactgggcggtaagactctggtcatggcagtctacgattttgaccgtttctccaaacatgatataattggggagtttaaggtgccgatgaatacagtcgactttgggcacgtgactgaagaatggcgagacctgcagtcagccgagaaagaagagcaggagaaactgggtgacatttgttttagtcttcggtacgtgcctacagccggcaagctcaccgtcgttatcctcgaggccaaaaacctgaagaagatggatgttggtgggctctctgacccatatgtaaaaatccatctaatgcagaatggcaaacgtttaaagaaaaagaaaaccacaatcaaaaagaataccctgaacccctattataacgaatcctttagctttgaggtccctttcgagcagatacagaaagttcaggtggtggtaacagttctggactacgacaagattggcaaaaacgacgcaataggaaaggtatttgttgggtacaacagtactggcgccgaactgagacattggtctgatatgctggccaacccgcgtaggcccattgcccagtggcacaccctgcaggtcgaggaggaggttgacgcaatgctggccgttaaaaaatag

SEQ ID NO: 158104 - DNA, 1269 bp, Artificial Sequence
  derived and/or modified sequence
atggtgtcggagtcacatcacgaggcactcgcagccccaccagtcacaactgtcgccactgttctgccaagcaacgctaccgagccagctagcccaggagaaggcaaggaggacgcattctcaaaactgaaagaaaaatttatgaacgaactccacaaaataccactgcctccatgggcactgattgccatagccattgttgccgtgctgctcgtactcacatgctgtttttgtatttgcaagaagtgcttgtttaagaagaagaataaaaagaagggcaaagagaaaggggggaagaatgcaattaacatgaaggacgtcaaggatttgggcaaaaccatgaaggatcaagccttgaaggacgatgatgctgaaactggcctaacggatggagaagaaaaagaggaaccaaaggaagaagagaaactgggcaagctccagtattcacttgactacgactttcaaaacaatcaacttttggtgggaatcatccaagcggccgaactgcccgccctggacatgggtggcacctcagatccgtatgtgaaggttttcctgctgcctgacaagaaaaagaaattcgagactaaggtgcataggaaaaccctgaatcctgttttcaatgagcagttcacttttaaggtcccgtactccgaattaggcgggaaaaccttggtgatggccgtttatgatttcgatcgtttcagtaaacacgatatcatcggtgagttcaaagtacctatgaataccgtggactttggacatgtgacagaggaatggagggatctgcagtccgcagaaaaagaggaacaggagaagcttggggacatatgtttctcgctcagatatgttccaaccgccggaaagctcaccgtcgtaatcctggaggccaagaatcttaagaagatggatgtgggaggtctctcggatccttacgtcaagatccatctcatgcaaaatggcaagcgattaaaaaagaagaagaccactatcaagaagaacacccttaatccgtattataacgagagcttcagcttcgaggtgccatttgagcagattcaaaaagttcaagtggtggttaccgttctggattacgataagattggtaagaatgatgctataggaaaagtcttcgtgggctacaactctacgggtgctgaactgcgccactggtccgacatgttggccaacccacgtcgaccaattgcccagtggcatacgcttcaggtggaagaggaagtggatgccatgcttgctgtgaagaaatag

SEQ ID NO: 158105 - DNA, 549 bp, Artificial Sequence
  derived and/or modified sequence
atggtgtctgaaagccatcatgaagccttagccgctccaccagtgactaccgtggccaccgtgctgcctagcaatgccaccgaaccggctagtcctggggaaggcaaagaggacgcattctccaaactgaaggagaagttcatgaacgagctgcacaagatccccttgcctccctgggctctgatcgccatagctatcgtagcagtacttctggtactgacttgttgcttttgtatttgcaagaagtgtctatttaaaaaaaaaaataagaagaaaggaaaggaaaaaggagggaaaaacgctataaacatgaaggacgttaaagatcttggtaagacgatgaaggatcaggcactgaaggatgacgacgcggagaccggtctgaccgatggcgaggaaaaggaggagcctaaggaagaagaaaagcttggtaaattgcagtactcactggattatgacttccaaaacaaccagctacttgtgggcattatccaggccgctgagctgcccgccctggatatgggcggtacatctgacccctacgtgtag

SEQ ID NO: 158106 - DNA, 1269 bp, Artificial Sequence
  derived and/or modified sequence
atggtgtctgagagtcaccacgaggccttggccgcaccaccggtgaccaccgttgccacagttctgccaagtaacgctaccgaaccagcatctcccggtgaaggaaaagaggatgctttctcgaagctgaaagaaaagttcatgaacgaactgcacaaaatcccactgccaccgtgggcacttattgcaatcgccatagttgcggtgctgctggtgctcacctgctgcttctgtatttgcaaaaaatgtctctttaagaagaagaataaaaagaaaggtaaggagaagggcggcaaaaatgcaatcaacatgaaagatgttaaggatctgggcaaaacaatgaaggatcaggctctcaaggatgatgacgctgaaacaggcttgaccgacggagaggaaaaagaagagcccaaagaagaggaaaagctcggaaaactgcagtacagcctggactatgattttcagaataatcagttgctcgtggggattattcaggccgctgagttgccggcgttggatatgggaggaacgagtgatccctacgttaaggtgttcctcttacccgacaaaaagaaaaaatttgagaccaaagtccacaggaagaccctcaatccggtgtttaacgagcaattcaccttcaaggtaccctacagtgaactcggagggaagaccttggtgatggctgtgtatgactttgacagattttccaaacatgacataatcggggagttcaaagttccaatgaacacggtcgacttcggccacgttacggaggagtggcgggatttacagtcggctgagaaagaagagcaggagaaactcggcgacatctgcttttcactccgctatgtgcccactgccggcaagttaaccgtggttatcctcgaggcaaaaaatctcaagaagatggacgtgggagggctctcggatccatacgttaaaatccatctgatgcaaaacggtaaacgtctgaagaaaaagaaaaccacaattaagaagaatactctgaatccgtactataacgagagcttttcctttgaggtgccatttgaacagatacagaaggtgcaggtggtggtgactgtcttagattacgacaaaatcggcaagaacgatgccattgggaaagtgtttgtggggtacaatagcacaggtgctgagctaagacactggtccgatatgcttgctaatccccgcaggcctatcgctcagtggcacacccttcaagtcgaagaagaagtggatgcaatgctggcagtaaagaagtag

SEQ ID NO: 158107 - DNA, 1269 bp, Artificial Sequence
  derived and/or modified sequence
atggtgtctgagagccaccacgaggccctggccgcccctcctgtgaccaccgtggccaccgtgctgcccagcaatgccacagagcccgccagccctggagagggcaaggaggatgccttcagcaagctgaaggagaagttcatgaatgagctgcacaagatccccctgcccccctgggccctgattgccatcgccatcgtggccgtgctgctggtgctgacctgctgcttctgcatctgcaagaagtgcctcttcaagaagaagaacaagaagaagggcaaggagaagggcggcaagaatgccatcaacatgaaggatgtgaaggacctgggcaagaccatgaaggaccaggccctgaaggatgatgatgctgagaccggcctgacagatggagaggagaaggaggagcccaaggaggaggagaagctgggcaagctgcagtacagcctggactatgacttccagaacaaccagctgctggtgggcatcatccaggccgctgagctgcctgccctggacatgggcggcaccagtgacccctacgtgaaggtgttcctgctgcctgacaagaagaagaagtttgagaccaaggtgcacaggaagaccctgaaccctgtgttcaatgagcagttcaccttcaaggtgccctacagcgagctgggcggcaagaccctggtgatggctgtgtatgactttgaccgcttcagcaagcatgacatcattggagagttcaaggtgcccatgaacacagtggactttggacatgtgacagaggagtggagggacctgcagagcgctgagaaggaggagcaggagaagctgggggacatctgcttcagcctgcgctacgtgcccacagctgggaagctgactgtggtgatcctggaggccaagaacctgaagaagatggatgtgggcggcctgagtgacccctacgtgaagatccacctgatgcagaatggcaagaggctgaagaagaagaagaccaccatcaagaagaacaccctgaacccctactacaatgaaagcttctcctttgaggtgccctttgagcagatccagaaggtgcaggtggtggtgacagtgctggactatgacaagattggcaagaatgatgccatcggcaaggtgtttgtgggctacaacagcactggagctgagctgcggcactggagcgacatgctggccaacccccggcggcccatcgcccagtggcacaccctgcaggtggaggaggaggtggatgccatgctggccgtgaagaagtag

SEQ ID NO: 158108 - DNA, 549 bp, Artificial Sequence
  derived and/or modified sequence
atggtgtctgagagccaccacgaggccctggccgcccctcctgtgaccaccgtggccaccgtgctgcccagcaatgccacagagcccgccagccctggagagggcaaggaggatgccttcagcaagctgaaggagaagttcatgaatgagctgcacaagatccccctgcccccctgggccctgattgccatcgccatcgtggccgtgctgctggtgctgacctgctgcttctgcatctgcaagaagtgcctcttcaagaagaagaacaagaagaagggcaaggagaagggcggcaagaatgccatcaacatgaaggatgtgaaggacctgggcaagaccatgaaggaccaggccctgaaggatgatgatgctgagaccggcctgacagatggagaggagaaggaggagcccaaggaggaggagaagctgggcaagctgcagtacagcctggactatgacttccagaacaaccagctgctggtgggcatcatccaggccgctgagctgcctgccctggacatgggcggcaccagtgacccctacgtgtag

SEQ ID NO: 158109 - DNA, 1269 bp, Artificial Sequence
  derived and/or modified sequence
atggtgagcgagagccaccacgaggccctggccgccccccccgtgaccacagtggccacagttttaccgtccaatgctactgagccggcgagccccggtgagggtaaggaggacgccttcagcaaactgaaggaaaagttcatgaatgagcttcacaagatcccacttcccccttgggccttgatcgccattgctatcgtggccgttctcttagtactgacctgttgcttctgcatctgcaaaaagtgtctgtttaagaaaaaaaacaaaaagaagggtaaggagaagggagggaaaaacgctataaacatgaaagacgtgaaagatctgggaaaaactatgaaagaccaagcgctaaaggatgatgatgcagagacagggctcaccgacggggaagagaaagaagagcctaaggaggaggagaagctcggcaagttgcagtattccctggactacgactttcagaacaaccaacttctggtagggattatccaagccgctgagctgcccgcactcgacatgggcggcactagcgatccttatgttaaggtgttcttactcccggacaaaaaaaagaaatttgagactaaggttcaccggaagacactgaatccagtttttaatgaacagtttacctttaaggtgccttacagtgagttgggaggcaagaccctggtgatggctgtttatgatttcgataggttttcaaagcatgatatcatcggcgaattcaaggtgcccatgaacaccgtggattttggacatgtaacagaagagtggcgtgaccttcagtccgctgagaaggaagagcaagagaaactgggtgacatatgcttttctctgaggtacgttcccaccgccggtaagctgaccgtggtaattctagaggcaaaaaatctgaagaaaatggatgtgggtggtctatctgatccatatgtgaaaatccaccttatgcagaatggcaagaggctgaagaagaagaagacaaccattaagaaaaatacgcttaacccttactataacgagtccttctcatttgaggttcccttcgagcagatccaaaaagtacaggtggtggtaacagtgttggattatgacaaaatcgggaagaacgacgcaatcggaaaggtttttgtcggatataacagcactggggccgaactgagacattggagcgacatgctggctaacccacgccggcccatcgctcagtggcacactctccaggttgaagaggaggtagatgccatgctagcggtcaagaagtag

SEQ ID NO: 158110 - DNA, 1269 bp, Artificial Sequence
  derived and/or modified sequence
atggtgagcgagagccaccacgaggccctggccgccccccccgtgaccactgtggctaccgttctgcctagtaacgcgacagaaccggctagccctggcgaaggcaaggaagatgccttcagtaaactgaaagagaaattcatgaatgaactccataagattccactgcctccttgggccctcatagctatcgccatcgtggccgtcttgctggtgctcacttgctgcttctgtatttgcaagaagtgtctcttcaaaaaaaagaacaaaaagaaagggaaggagaaaggagggaagaatgctataaatatgaaggacgttaaagacctgggcaagaccatgaaagatcaggctcttaaggatgatgatgcagaaaccgggctgaccgacggggaagagaaggaagaaccaaaagaggaagaaaaactgggaaaactccagtacagcctagactacgattttcagaacaatcaactgttagtaggaattatacaagcagctgagcttcctgctctcgacatgggcggcacttccgatccctacgtcaaggtgttcctgctgcctgacaagaaaaaaaagtttgaaacaaaggtgcataggaagactcttaaccccgtgtttaacgaacagttcacttttaaggttccatactcagagctgggcgggaagaccctggtgatggcagtctacgattttgacaggttttccaagcacgacatcatcggcgaattcaaggtgcctatgaatacagttgacttcgggcacgttactgaagaatggcgcgacctgcagtccgcggagaaggaggagcaggagaagctgggggacatctgcttttcactaaggtacgtccccacagccggaaagcttacagtcgtcatattggaggcaaaaaatctgaaaaagatggacgtaggcggactgagtgatccttatgtcaagattcacctgatgcaaaacggcaagagactgaagaagaaaaaaacaaccatcaaaaagaatacgctcaacccctattacaatgaatccttcagctttgaagtaccgttcgaacagattcaaaaggtccaggtggtggtgacagtgcttgattacgacaaaatcggtaagaacgatgctatcggcaaggtgtttgttgggtacaattccaccggtgccgagctccgacactggagtgatatgttggcaaatcctagacgtccaatagcccagtggcacactctccaagtggaagaggaagtggacgctatgttagccgtgaaaaagtag

SEQ ID NO: 158111 - DNA, 549 bp, Artificial Sequence
  derived and/or modified sequence
atggtgagcgagagccaccacgaggccctggccgccccccccgtgacaaccgtggccactgtccttccctctaacgctacagaacccgcaagtcccggcgaggggaaggaggatgcctttagtaagttgaaggagaagtttatgaacgagctgcataagattcctctcccaccttgggccctgattgccatcgcgatcgtggcagtgttactggttctgacatgttgtttctgtatatgcaagaaatgcctgttcaagaagaagaataagaagaagggtaaggagaaagggggcaaaaatgcgatcaatatgaaagacgtgaaagatctgggcaaaacgatgaaggatcaagctctcaaagacgacgacgctgaaaccggcctgactgacggggaggagaaggaggagcctaaagaagaggagaagctaggaaaactgcagtactctcttgactacgattttcaaaataaccagctcctggtgggcatcatccaggccgctgagctgccggcgttggacatggggggcacttccgacccgtacgtttag

SEQ ID NO: 158112 - DNA, 1269 bp, Artificial Sequence
  derived and/or modified sequence
atggtgagcgagagccaccacgaggccctggccgccccccccgtgaccacagtcgccaccgtactgccctctaacgcgacagagccagcaagcccgggcgaaggtaaagaagatgccttctcaaagctgaaggagaagtttatgaatgagctccataagattccgcttcctccctgggcgttaatagcaatagcgattgtggccgtcctcttggttctgacatgctgtttttgcatttgtaagaaatgcctatttaagaaaaaaaacaaaaaaaaaggaaaggagaagggtggcaaaaacgccattaacatgaaggacgtgaaggacctcggcaagacgatgaaggaccaagccctgaaagacgatgatgccgagaccgggcttaccgatggcgaggagaaggaagaaccaaaggaggaggaaaagctaggaaaattgcaatattcgctcgactacgacttccagaataaccagctactggttgggatcattcaggctgcagagctgccagctctggatatgggcggcacctccgatccttatgtcaaagtttttctcttacccgacaagaaaaaaaagttcgaaaccaaggtacatagaaagaccctgaatccagtgttcaacgaacagttcacatttaaggttccctactccgaactcggcggaaagactctggtgatggcagtttacgatttcgatcgatttagcaagcacgatattattggtgagttcaaagttcctatgaatacagttgattttggtcacgtcacggaggagtggagagacctacagtcagctgaaaaggaggaacaagagaaattgggcgacatctgcttcagtctgaggtacgtccccaccgccgggaagctaaccgtcgtgattctggaggcaaaaaacttgaaaaagatggacgttgggggcttgagcgatccatatgtgaaaatccatctcatgcaaaacggtaaaaggctgaaaaaaaagaagacgaccattaagaaaaatacactaaacccctactacaacgaaagcttttcttttgaggtgcctttcgaacagattcagaaggtgcaagtggtggtgaccgtgttagactacgataagataggcaaaaatgatgcaatcggcaaggtctttgttggctataacagtactggggccgaactgcgtcactggtcggacatgctggctaatccaagaagaccgattgcccagtggcacacattgcaggtcgaagaggaggttgacgccatgcttgctgtgaagaagtag

SEQ ID NO: 158113 - DNA, 1269 bp, Artificial Sequence
  derived and/or modified sequence
atggtgtccgaaagccatcacgaggccctggctgccccaccagttacaaccgttgctactgtgctcccgtccaatgcaacagaacctgcctcccccggagaaggtaaagaggacgctttttctaagctgaaagaaaagttcatgaatgaattgcataagatacctctcccaccttgggcactgatagcaatcgcgatcgtggccgtcctgctagtcctgacctgctgcttttgtatatgcaagaaatgcttatttaagaagaaaaataagaagaaggggaaagaaaaagggggaaagaacgcaattaatatgaaggatgtcaaggatctaggcaaaacaatgaaggaccaggctctgaaagacgacgacgccgaaacaggacttactgacggggaagaaaaagaagagccaaaggaggaggagaagctaggcaagctgcaatactctctggactacgactttcagaacaaccagctcctcgtaggcatcatccaagccgctgagcttccggctcttgacatgggaggcacttcagatccttacgtgaaggtatttctactgccagataaaaagaagaagttcgaaacgaaagtgcatcgtaaaaccctgaacccggtgtttaacgagcagttcacgtttaaggttccatattcggaactcggaggcaagactctggtgatggccgtgtatgacttcgaccgattctctaaacacgatattataggagagtttaaggttccgatgaacacagtggacttcgggcatgtgactgaggagtggagagacctccagagcgctgaaaaagaggaacaggagaagctgggtgatatttgcttttccctccgctatgtccctaccgcaggcaaactcacggtggtgatcctcgaggccaagaacttgaaaaagatggatgtggggggtctgtccgacccgtacgtgaagatacacttgatgcagaacgggaagcgactgaaaaaaaaaaagacaacaattaagaagaacactctgaacccatattacaacgagagtttcagctttgaagtaccatttgagcaaatccagaaggtgcaagtcgtggtcactgtccttgattatgataaaattggtaaaaatgacgctattggaaaggtgttcgtgggatataattctaccggagccgagctcaggcactggtcagatatgttagcaaacccacgacgtccgattgcccaatggcacacgttacaggtggaagaagaggtcgacgccatgctcgctgtgaagaaatag

SEQ ID NO: 158114 - DNA, 1269 bp, Artificial Sequence
  derived and/or modified sequence
atggtttcagagtcacaccacgaggccctcgccgctccacccgtgacaaccgtagctaccgttcttccgagcaatgcaacagaacctgccagcccaggagaaggcaaagaggatgcctttagtaagcttaaagagaagttcatgaacgaattgcacaaaatccccctcccaccgtgggctttaatcgcaatcgctatagtggctgtgctccttgtcctgacttgttgcttctgcatttgcaagaaatgcctgtttaagaagaagaataaaaagaaaggcaaagagaagggaggcaaaaacgccatcaatatgaaggacgtgaaggacttgggcaagaccatgaaggatcaagctctgaaagatgatgacgccgaaacagggctgaccgatggggaggagaaagaggaacctaaggaagaggagaagttgggaaaactgcagtattccctcgactacgattttcagaacaatcagctcctggtagggatcatccaggcagccgagttgcccgcattggacatgggtggcaccagtgacccttacgttaaagtgttcttactgccagataagaagaagaaattcgagacaaaagtccatcggaagacacttaaccccgttttcaacgagcagttcacttttaaggtgccctattctgaattggggggtaaaacactcgttatggccgtctacgactttgacaggttctctaagcatgacataattggcgagttcaaagtcccaatgaataccgtggacttcgggcacgtgacggaggaatggagagatctccagtccgccgagaaggaggagcaagagaagttaggggacatctgcttttccctccggtacgttccaactgccggtaagctaacagtggtgatactggaggccaaaaatctgaagaaaatggacgtcggaggtctgtctgacccctatgtcaagatccacctgatgcagaacggaaagcgccttaagaagaaaaagactacgatcaaaaagaatacactcaacccttactacaacgaatcctttagcttcgaagtaccattcgagcagattcagaaggtgcaagtagtggtgacggtcctggactatgacaagattggcaagaatgatgcgatcgggaaggtcttcgttggctataactccacaggggctgagctgaggcactggtccgatatgctggcgaacccaagacgtcctattgcacaatggcatactctccaggtcgaagaggaagtggatgccatgctggccgtaaagaagtag

SEQ ID NO: 158115 - DNA, 549 bp, Artificial Sequence
  derived and/or modified sequence
atggtgagcgagagccaccacgaggccttggctgcccctccagtgacaaccgttgccaccgttttgccatccaacgctactgagccagcgtcaccaggggaaggaaaggaagatgctttctccaaattgaaggagaagttcatgaatgagctccacaagattcctctccctccctgggcactaatagcaattgctatcgtggccgtgctccttgtgctcacatgttgtttctgcatttgtaagaaatgtttgtttaaaaaaaagaataagaaaaagggcaaagagaaaggcggaaagaacgctataaatatgaaggatgtaaaagatctggggaaaacgatgaaggatcaagcactgaaggacgacgatgctgagacaggcctaaccgatggtgaggagaaggaggagccaaaagaggaggagaagcttgggaaactgcagtattcccttgattacgacttccaaaacaaccagctgctggtgggtattatccaggctgcagaattacccgcactggatatgggagggactagcgatccatacgtttag

SEQ ID NO: 158116 - DNA, 1269 bp, Artificial Sequence
  derived and/or modified sequence
atggtatcagagtctcaccatgaggcgctggcagcccctccagtgacaactgttgctaccgtattaccaagcaacgctacagaacccgcttcccccggtgagggaaaggaggatgccttttccaagttgaaagagaaatttatgaatgagctacacaagatcccactgccaccctgggctttgatcgctatcgctatcgtggcagtgctgctcgttcttacctgttgtttttgcatttgcaaaaagtgcctgttcaaaaagaagaacaagaagaagggaaaggagaaaggagggaaaaacgctatcaatatgaaggacgttaaggatctcggcaagaccatgaaggatcaagcactaaaagacgacgatgctgagactgggctgaccgacggggaagagaaagaggagcccaaggaagaggagaaacttggcaagcttcagtattcactggactacgattttcaaaataatcagctgctggttggcatcattcaggccgcagaactcccagccctggacatgggaggcacaagcgacccttatgtaaaggtatttctcctgcctgacaagaagaagaaatttgaaaccaaagtgcatcgcaaaactcttaaccctgtgttcaatgaacagttcaccttcaaggtgccctacagcgaactcggaggcaagaccctggtcatggccgtgtacgatttcgaccgtttcagcaagcacgatataattggcgagttcaaggtccctatgaacacagtagattttggtcatgtgaccgaagaatggcgagacctccagtccgccgagaaggaggaacaggaaaagctgggggacatttgtttcagcctgcgctatgtccctaccgcgggtaaactgacagtcgtgattctggaagccaagaatctgaagaagatggacgttggcggtttgtcagacccttacgtgaaaatacacctgatgcagaatggcaaacgcttaaagaaaaagaagactactattaaaaagaataccctcaatccctactataacgaaagcttcagcttcgaagtgccatttgagcagatccagaaggttcaagtggtggtgaccgtgctcgactacgacaaaatcgggaagaatgacgccatcggcaaggtgtttgtaggttataatagcacaggggcagagctccggcactggagcgacatgctcgctaacccgcgaagacccatcgcccaatggcatactcttcaggtggaagaggaagtggacgcaatgctagctgttaaaaagtag

SEQ ID NO: 158117 - DNA, 4808 bp, Artificial Sequence
  derived and/or modified sequence
caatcaggatgctggggctcggagatgatgggcggccgcctcctcactggagggattcctggagaagctgcagtgtggggatgctctagaccgagtactgcccccagtgtctttccacctcctcctgcagcagcggcagcggcagcagcagttagcagcggcaacttgaggctgcaccccgggcaagtccccagggtggtgctcagccgagaggggggcttggcgccccgaaggggtgtgtgtagggtgggggcgaccacgtgggaccagctggtggccctggaaaacctcccacacacccacacccacacaccccttttgtgttgcaggctgcccctccaagagcggaggcagcgagagtacgcgtgtgcctcgcgccggtccacgcggggagagcactggggaccgagacccggcaccacctcccggtccgccctccagggaaaacgggaaaactagcaagagctagcaagaactagcaagagcttgaacaaacgcctggactcagattggaagactgctcatttgtctactgcctcattcctggaaattgcactggaactgtctgattaagaaaaacagaataattctgaaagaaagaaaacaaagaaaaacatactccagaattcctaatagaacacttcacctgaacctaaaatggtgagcgagagtcaccatgaggccctggcagccccgcctgtcaccactgtcgcgactgttctgccaagcaacgccacagagccagccagtcctggagaaggaaaggaagatgcattttctaagctgaaggagaagtttatgaatgagttgcataaaattccattgccaccgtgggccttaattgcaatagccatagtcgcagtccttttagtcctgacctgctgcttttgtatctgtaagaaatgtttgttcaaaaagaaaaacaagaagaagggaaaggaaaaaggagggaagaatgccattaacatgaaagatgtaaaagacttagggaagacgatgaaagatcaggccctcaaggatgatgatgctgaaactggattgacagatggagaagaaaaagaagaacccaaagaagaggagaaactgggaaaacttcagtattcactggattatgatttccaaaataaccagctgctggtagggatcattcaggctgccgaactgcccgccttggacatggggggcacatctgatccttacgtgaaagtgtttctgctacctgataagaagaagaaatttgagacaaaagtccaccgaaaaacccttaatcctgtcttcaatgagcaatttactttcaaggtaccatactcggaattgggtggcaaaaccctagtgatggctgtatatgattttgatcgtttctctaagcatgacatcattggagaatttaaagtccctatgaacacagtggattttggccatgtaactgaggaatggcgtgacctgcaaagtgctgagaaggaagagcaagagaaattgggtgatatctgcttctcccttcgctacgtacctactgctggtaagctgactgttgtcattctggaggcaaagaacctgaagaagatggatgtgggtggcttatccgatccttatgtgaagattcatctgatgcagaatggtaagaggctgaagaagaaaaagacaacaattaaaaagaacacacttaacccctactacaatgagtcattcagctttgaagtaccttttgaacaaatccagaaagtgcaggtggtggtaactgttttggactatgacaagattggcaagaacgatgccatcggcaaagtctttgtgggctacaacagcaccggcgcggagctgcgacactggtcagacatgctggccaaccccaggcgacctattgcccagtggcacaccctgcaggtagaggaggaagttgatgccatgctggccgtcaagaagtaaaggaaagaagaagcctttctgcatttgcccatatagtgctctttagccagtatctgtaaatacctcagtaatatgggtcctttcatttttccagccatgcattcctaacacaattcagtggtacttggaatcctgttttaatttgcacaaatttaaatgtagagagcccctaagtccttcatcataccactgccctccaaatctactcttcttttaagcaatatgatgtgtagatagagcatgaatgaaattatttattgtatcacactgttgtatataccagtatgctaaagatttatttctagtttgtgtatttgtatgttgtaagcgtttcctaatctgtgtatatctagatgtttttaataagatgttctattttaaactatgtaaattgactgagatataggagagctgataatatattatacggtaaatatagtatcgtctgcattccagcaaaaatatcaactcgtaaggcactagtacagttaaactgacatcttaaaggacaacttaaacctgagctttctattgaatcatttgagtaccaagataaacttacaccacatacttggtgggtgaatccaattttgtagaattcctacacaggcaaaatagcatgatctgagcagcagcatccaggctgacctcaaggaagcatagccacaaaacagaatagcacctgtctgtacatatttacaaagctaaaataatggcttcactcttatatttgaggaagcaactgaacaggagtcaatgatttcatattactgcatatagaataacaacaaggtgttccgtgtgtgtgtgtgtgtgtgtgtgtgtgtgtgtgtgcacatttgtttggggatgggggagaagaagctaaggggagaagtcaacatttatgaaatattgcctgactatttaaaaagaaaaaagtagctctccattatcacctttatacaaaatgtacatcctgtgaattctgttccagatttcacacctacaataattccaaaaggtttgcacattagagtttgtaacaaaatattttattatataaaaccaggttagaaggaatgcaggatatttttaacacaacaatctgtgcttattacacaaaattactttgtggtaaacagacagtattgtaatcccatcaaaagatgaaagaaaaacaaaaacaaaaaccaacaacaattagccatagttctgaatgcacttcaattaagccaaaacagacagctagtgatctttttatatgctctttttacttaagttttaatttgtcctttaaaaaaaggtgaaacaaaccaagaacaagttctagaaaactgaagcaacctcttatgtatactagatgcttgatttaggaggagtttttaaacgttttcaatgttattatgtagtaaatgacactattatgaagctactagtcattccataagagtcttaaaggactgctctgtgtaacactgtgactgccgtgtgtgcttagacccgtagtttcctcagtggatagcactcaatttattccgtagtgatattgtaacaatactgccattcccttctactgcactgcccaaggtgtgtgtagcacaaacagttctcattacaaaggaccaattcagaactgaaaagctatgcataggacaaggaagatacatagaatggggtggaacacagcattttgtcaagcactgtgcaatattccatatttttccccactatggtagacaaccatttcgtggaagggcagcctattatcccacactgcatctagccttttgtcccattcacttctgtgatccattttaatttccaggccacaagacagtagtgatgctctgaaatgaaagtttgtcttcacaaatatcaaaacaaaatggaggaaaactaagcattggcctcatgttcagtcttcaggatatcacaccacgtcttttcaaaaactaaagagaattcaaaaagggctgatggtaggctttgaacatggggttggctgtttcccagtaaaactggaattcctgtcgttactgtttccttatcaaagaaggggcaagctcttttgccttttaggccagacatagcaaacgctttataattggcatagacataaaggataaaaggaaaataaccgtctgccgatggtccgtacttcttaaaaaacataggtaatagaaaatatacacaagtcagaatgtgaaattaaataatggtttgaacagaaaattcaaacaagactctttccaatttaaagggccaaaccctaccaaagagagggagttgactggcttttaaaaagtatttaaataccacaaatgacatttaatttcactgtattcagctttaagttgttcacaatgaaaccacactttcaaacaagcaggttcaagctgctgaatagacattatttcttgcattaaaataccactaatgcattctcttgcaacactgccagacatgggattgtcaccatagaattagttggtactatgccatctttcactctttcacaagtcagtgatggaacctgctttatgaccaagattcatcctcaaataagccacatgtacccttctgacaaagctgtgtaaagtattagaatctgatgctctagaaagatcctagttgcctttgtgtatatttactgcctgcttgagtgtttctatgtgtgggttttccctgtatcttgtagaaatgttggggtgttttcctctgccatatggctcgtggcctgcgagccaactatttcagctgtattttaccttcatttttgatgaggtgatttaaattttgtttcactttgtgtagtgaattccacagtagttttctgattgttgttaaaaatgacttaacatattacacagatattcaataaaaatgttttatttcctgtt

SEQ ID NO: 158118 - DNA, 3095 bp, Artificial Sequence
  derived and/or modified sequence
atctcggctccaccgcacccttcgcgggaagtccccaggcttccagcaaagctcagcttatcccgcccccgcttccaacccggaaccccagaagaacagcatgatgagcctccggcagccaggtgggccacctccccgcggctcagtttgaggacacttgtgcggaaccctttcacatccccaccctacccagctttcacaactccgccgggttaaatggccaaagacaaacttctacctctcctgtccccggtcccagcttttcaaaaacccacagctggcgaacccacacacatcgaaactcctaggtcgctgttgcagtctgggcatgctcagtatcagggctgcccctccaagagcggaggcagcgagagtacgcgtgtgcctcgcgccggtccacgcggggagagcactggggaccgagacccggcaccacctcccggtccgccctccagggaaaacgggaaaactagcaagagctagcaagaactagcaagagcttgaacaaacgcctggactcagattggaagactgctcatttgtctactgcctcattcctggaaattgcactggaactgtctgattaagaaaaacagaataattctgaaagaaagaaaacaaagaaaaacatactccagaattcctaatagaacacttcacctgaacctaaaatggtgagcgagagtcaccatgaggccctggcagccccgcctgtcaccactgtcgcgactgttctgccaagcaacgccacagagccagccagtcctggagaaggaaaggaagatgcattttctaagctgaaggagaagtttatgaatgagttgcataaaattccattgccaccgtgggccttaattgcaatagccatagtcgcagtccttttagtcctgacctgctgcttttgtatctgtaagaaatgtttgttcaaaaagaaaaacaagaagaagggaaaggaaaaaggagggaagaatgccattaacatgaaagatgtaaaagacttagggaagacgatgaaagatcaggccctcaaggatgatgatgctgaaactggattgacagatggagaagaaaaagaagaacccaaagaagaggagaaactgggaaaacttcagtattcactggattatgatttccaaaataaccagctgctggtagggatcattcaggctgccgaactgcccgccttggacatggggggcacatctgatccttacgtgaaagtgtttctgctacctgataagaagaagaaatttgagacaaaagtccaccgaaaaacccttaatcctgtcttcaatgagcaatttactttcaaggtaccatactcggaattgggtggcaaaaccctagtgatggctgtatatgattttgatcgtttctctaagcatgacatcattggagaatttaaagtccctatgaacacagtggattttggccatgtaactgaggaatggcgtgacctgcaaagtgctgagaaggaagagcaagagaaattgggtgatatctgcttctcccttcgctacgtacctactgctggtaagctgactgttgtcattctggaggcaaagaacctgaagaagatggatgtgggtggcttatccgatccttatgtgaagattcatctgatgcagaatggtaagaggctgaagaagaaaaagacaacaattaaaaagaacacacttaacccctactacaatgagtcattcagctttgaagtaccttttgaacaaatccagaaagtgcaggtggtggtaactgttttggactatgacaagattggcaagaacgatgccatcggcaaagtctttgtgggctacaacagcaccggcgcggagctgcgacactggtcagacatgctggccaaccccaggcgacctattgcccagtggcacaccctgcaggtagaggaggaagttgatgccatgctggccgtcaagaagtaaaggaaagaagaagcctttctgcatttgcccatatagtgctctttagccagtatctgtaaatacctcagtaatatgggtcctttcatttttccagccatgcattcctaacacaattcagtggtacttggaatcctgttttaatttgcacaaatttaaatgtagagagcccctaagtccttcatcataccactgccctccaaatctactcttcttttaagcaatatgatgtgtagatagagcatgaatgaaattatttattgtatcacactgttgtatataccagtatgctaaagatttatttctagtttgtgtatttgtatgttgtaagcgtttcctaatctgtgtatatctagatgtttttaataagatgttctattttaaactatgtaaattgactgagatataggagagctgataatatattatacggtaaatatagtatcgtctgcattccagcaaaaatatcaactcgtaaggcactagtacagttaaactgacatcttaaaggacaacttaaacctgagctttctattgaatcatttgagtaccaagataaacttacaccacatacttggtgggtgaatccaattttgtagaattcctacacaggcaaaatagcatgatctgagcagcagcatccaggctgacctcaaggaagcatagccacaaaacagaatagcacctgtctgtacatatttacaaagctaaaataatggcttcactcttatatttgaggaagcaactgaacaggagtcaatgatttcatattactgcatatagaataacaacaaggtgttccgtgtgtgtgtgtgtgtgtgtgtgtgtgtgtgtgtgcacatttgtttggggatgggggagaagaagctaaggggagaagtcaacatttatgaaatattgcctgactatttaaaaagaaaaaagtagctctccattatcacctttatacaaaatgtacatcctgtgaattctgttccagatttcacacctacaataattccaaaaggtttgcacattagagtttgtaacaaaatattttattatataaaaccaggttagaaggaatgcaggatatttttaacacaacaatctgtgcttattacacaaaattactttgtggtaaacagacagtattgtaatcccatcaaaagatgaaag

SEQ ID NO: 158119 - DNA, 762 bp, Artificial Sequence
  derived and/or modified sequence
agatgccatgagaactcttaaaaacagagtaacatacttattataagacctattttaaatatttcattctttcctcattttcatgatacctaaattttttgaagactgaaaatgatgagaacttatataaaaagaaaaacagaataattctgaaagaaagaaaacaaagaaaaacatactccagaattcctaatagaacacttcacctgaacctaaaatggtgagcgagagtcaccatgaggccctggcagccccgcctgtcaccactgtcgcgactgttctgccaagcaacgccacagagccagccagtcctggagaaggaaaggaagatgcattttctaagctgaaggagaagtttatgaatgagttgcataaaattccattgccaccgtgggccttaattgcaatagccatagtcgcagtccttttagtcctgacctgctgcttttgtatctgtaagaaatgtttgttcaaaaagaaaaacaagaagaagggaaaggaaaaaggagggaagaatgccattaacatgaaagatgtaaaagacttagggaagacgatgaaagatcaggccctcaaggatgatgatgctgaaactggattgacagatggagaagaaaaagaagaacccaaagaagaggagaaactgggaaaacttcagtattcactggattatgatttccaaaataaccagctgctggtagggatcattcaggctgccgaactgcccgccttggacatggggggcacatctgatccttacgt

SEQ ID NO: 158120 - DNA, 2718 bp, Artificial Sequence
  derived and/or modified sequence
atcttggctcctccctgattctaccaccaagaataaaatagttgtttgtcccctacagtagaacaagtttgcccattcatccttgtgatagatatgcatgcaaaaccaaaatgaaatcaaatccccacagatggctcgtaagtcaaaaacactgtttaattctttcactgcatccctttgggaagcctggcccttgaaaaacagaataattctgaaagaaagaaaacaaagaaaaacatactccagaattcctaatagaacacttcacctgaacctaaaatggtgagcgagagtcaccatgaggccctggcagccccgcctgtcaccactgtcgcgactgttctgccaagcaacgccacagagccagccagtcctggagaaggaaaggaagatgcattttctaagctgaaggagaagtttatgaatgagttgcataaaattccattgccaccgtgggccttaattgcaatagccatagtcgcagtccttttagtcctgacctgctgcttttgtatctgtaagaaatgtttgttcaaaaagaaaaacaagaagaagggaaaggaaaaaggagggaagaatgccattaacatgaaagatgtaaaagacttagggaagacgatgaaagatcaggccctcaaggatgatgatgctgaaactggattgacagatggagaagaaaaagaagaacccaaagaagaggagaaactgggaaaacttcagtattcactggattatgatttccaaaataaccagctgctggtagggatcattcaggctgccgaactgcccgccttggacatggggggcacatctgatccttacgtgaaagtgtttctgctacctgataagaagaagaaatttgagacaaaagtccaccgaaaaacccttaatcctgtcttcaatgagcaatttactttcaaggtaccatactcggaattgggtggcaaaaccctagtgatggctgtatatgattttgatcgtttctctaagcatgacatcattggagaatttaaagtccctatgaacacagtggattttggccatgtaactgaggaatggcgtgacctgcaaagtgctgagaaggaagagcaagagaaattgggtgatatctgcttctcccttcgctacgtacctactgctggtaagctgactgttgtcattctggaggcaaagaacctgaagaagatggatgtgggtggcttatccgatccttatgtgaagattcatctgatgcagaatggtaagaggctgaagaagaaaaagacaacaattaaaaagaacacacttaacccctactacaatgagtcattcagctttgaagtaccttttgaacaaatccagaaagtgcaggtggtggtaactgttttggactatgacaagattggcaagaacgatgccatcggcaaagtctttgtgggctacaacagcaccggcgcggagctgcgacactggtcagacatgctggccaaccccaggcgacctattgcccagtggcacaccctgcaggtagaggaggaagttgatgccatgctggccgtcaagaagtaaaggaaagaagaagcctttctgcatttgcccatatagtgctctttagccagtatctgtaaatacctcagtaatatgggtcctttcatttttccagccatgcattcctaacacaattcagtggtacttggaatcctgttttaatttgcacaaatttaaatgtagagagcccctaagtccttcatcataccactgccctccaaatctactcttcttttaagcaatatgatgtgtagatagagcatgaatgaaattatttattgtatcacactgttgtatataccagtatgctaaagatttatttctagtttgtgtatttgtatgttgtaagcgtttcctaatctgtgtatatctagatgtttttaataagatgttctattttaaactatgtaaattgactgagatataggagagctgataatatattatacggtaaatatagtatcgtctgcattccagcaaaaatatcaactcgtaaggcactagtacagttaaactgacatcttaaaggacaacttaaacctgagctttctattgaatcatttgagtaccaagataaacttacaccacatacttggtgggtgaatccaattttgtagaattcctacacaggcaaaatagcatgatctgagcagcagcatccaggctgacctcaaggaagcatagccacaaaacagaatagcacctgtctgtacatatttacaaagctaaaataatggcttcactcttatatttgaggaagcaactgaacaggagtcaatgatttcatattactgcatatagaataacaacaaggtgttccgtgtgtgtgtgtgtgtgtgtgtgtgtgtgtgtgtgcacatttgtttggggatgggggagaagaagctaaggggagaagtcaacatttatgaaatattgcctgactatttaaaaagaaaaaagtagctctccattatcacctttatacaaaatgtacatcctgtgaattctgttccagatttcacacctacaataattccaaaaggtttgcacattagagtttgtaacaaaatattttattatataaaaccaggttagaaggaatgcaggatatttttaacacaacaatctgtgcttattacacaaaattactttgtggtaaacagacagtattgtaatcccatcaaaagatgaaagaaaaacaaaaacaaa

SEQ ID NO: 158121 - protein, 862 aa, Artificial Sequence
  derived and/or modified sequence
MPAGLTEPAGAAPPAAVSASGTVTMAPAGALPVRVESTPVALGAVTKAPVSVCVEPTASQPLRSPVGTLVTKVAPVSAPPKVSSGPRLPAPQIVAVKAPNTTTIQFPANLQLPPGTVLIKSNSGPLMLVSPQQTVTRAETTSNITSRPAVPANPQTVKICTVPNSSSQLIKKVAVTPVKKLAQIGTTVVTTVPKPSSVQSVAVPTSVVTVTPGKPLNTVTTLKPSSLGASSTPSNEPNLKAENSAAVQINLSPTMLENVKKCKNFLAMLIKLACSGSQSPEMGQNVKKLVEQLLDAKIEAEEFTRKLYVELKSSPQPHLVPFLKKSVVALRQLLPNSQSFIQQCVQQTSSDMVIATCTTTVTTSPVVTTTVSSSQSEKSIIVSGATAPRTVSVQTLNPLAGPVGAKAGVVTLHSVGPTAATGGTTAGTGLLQTSKPLVTSVANTVTTVSLQPEKPVVSGTAVTLSLPAVTFGETSGAAICLPSVKPVVSSAGTTSDKPVIGTPVQIKLAQPGPVLSQPAGIPQAVQVKQLVVQQPSGGNEKQVTTISHSSTLTIQKCGQKTMPVNTIIPTSQFPPASILKQITLPGNKILSLQASPTQKNRIKENVTSCFRDEDDINDVTSMAGVNLNEENACILATNSELVGTLIQSCKDEPFLFIGALQKRILDIGKKHDITELNSDAVNLISQATQERLRGLLEKLTAIAQHRMTTYKASENYILCSDTRSQLKFLEKLDQLEKQRKDLEEREMLLKAAKSRSNKEDPEQLRLKQKAKELQQLELAQIQHRDANLTALAAIGPRKKRPLESGIEGLKDNLLASGTSSLTATKQLHRPRITRICLRDLIFCMEQEREMKYSRALYLALLK

SEQ ID NO: 158122 - protein, 618 aa, Artificial Sequence
  derived and/or modified sequence
MPAGLTEPAGAAPPAAVSASGTVTMAPAGALPVRVESTPVALGAVTKAPVSVCVEPTASQPLRSPVGTLVTKVAPVSAPPKVSSGPRLPAPQIVAVKAPNTTTIQFPANLQLPPGTVLIKSNSGPLMLVSPQQTVTRAETTSNITSRPAVPANPQTVKICTVPNSSSQLIKKVAVTPVKKLAQIGTTVVTTVPKPSSVQSVAVPTSVVTVTPGKPLNTVTTLKPSSLGASSTPSNEPNLKAENSAAVQINLSPTMLENVKKCKNFLAMLIKLACSGSQSPEMGQNVKKLVEQLLDAKIEAEEFTRKLYVELKSSPQPHLVPFLKKSVVALRQLLPNSQSFIQQCVQQTSSDMVIATCTTTVTTSPVVTTTVSSSQSEKSIIVSGATAPRTVSVQTLNPLAGPVGAKAGVVTLHSVGPTAATGGTTAGTGLLQTSKPLVTSVANTVTTVSLQPEKPVVSGTAVTLSLPAVTFGETSGAAICLPSVKPVVSSAGTTSDKPVIGTPVQIKLAQPGPVLSQPAGIPQAVQVKQLVVQQPSGGNEKQVTTISHSSTLTIQKCGQKTMPVNTIIPTSQFPPASILKQITLPGNKILSLQASPTQKNRIKENVTSCFRSTFICVY

SEQ ID NO: 158123 - DNA, 2589 bp, Artificial Sequence
  derived and/or modified sequence
atgcccgccggcctgaccgagcccgccggcgccgccccccccgccgccgtgagcgccagcggcaccgtgaccatggcccccgccggcgccctgcccgtgagagtggagagcacccccgtggccctgggcgccgtgaccaaggcccccgtgagcgtgtgcgtggagcccaccgccagccagcccctgagaagccccgtgggcaccctggtgaccaaggtggcccccgtgagcgccccccccaaggtgagcagcggccccagactgcccgccccccagatcgtggccgtgaaggcccccaacaccaccaccatccagttccccgccaacctgcagctgccccccggcaccgtgctgatcaagagcaacagcggccccctgatgctggtgagcccccagcagaccgtgaccagagccgagaccaccagcaacatcaccagcagacccgccgtgcccgccaacccccagaccgtgaagatctgcaccgtgcccaacagcagcagccagctgatcaagaaggtggccgtgacccccgtgaagaagctggcccagatcggcaccaccgtggtgaccaccgtgcccaagcccagcagcgtgcagagcgtggccgtgcccaccagcgtggtgaccgtgacccccggcaagcccctgaacaccgtgaccaccctgaagcccagcagcctgggcgccagcagcacccccagcaacgagcccaacctgaaggccgagaacagcgccgccgtgcagatcaacctgagccccaccatgctggagaacgtgaagaagtgcaagaacttcctggccatgctgatcaagctggcctgcagcggcagccagagccccgagatgggccagaacgtgaagaagctggtggagcagctgctggacgccaagatcgaggccgaggagttcaccagaaagctgtacgtggagctgaagagcagcccccagccccacctggtgcccttcctgaagaagagcgtggtggccctgagacagctgctgcccaacagccagagcttcatccagcagtgcgtgcagcagaccagcagcgacatggtgatcgccacctgcaccaccaccgtgaccaccagccccgtggtgaccaccaccgtgagcagcagccagagcgagaagagcatcatcgtgagcggcgccaccgcccccagaaccgtgagcgtgcagaccctgaaccccctggccggccccgtgggcgccaaggccggcgtggtgaccctgcacagcgtgggccccaccgccgccaccggcggcaccaccgccggcaccggcctgctgcagaccagcaagcccctggtgaccagcgtggccaacaccgtgaccaccgtgagcctgcagcccgagaagcccgtggtgagcggcaccgccgtgaccctgagcctgcccgccgtgaccttcggcgagaccagcggcgccgccatctgcctgcccagcgtgaagcccgtggtgagcagcgccggcaccaccagcgacaagcccgtgatcggcacccccgtgcagatcaagctggcccagcccggccccgtgctgagccagcccgccggcatcccccaggccgtgcaggtgaagcagctggtggtgcagcagcccagcggcggcaacgagaagcaggtgaccaccatcagccacagcagcaccctgaccatccagaagtgcggccagaagaccatgcccgtgaacaccatcatccccaccagccagttcccccccgccagcatcctgaagcagatcaccctgcccggcaacaagatcctgagcctgcaggccagccccacccagaagaacagaatcaaggagaacgtgaccagctgcttcagagacgaggacgacatcaacgacgtgaccagcatggccggcgtgaacctgaacgaggagaacgcctgcatcctggccaccaacagcgagctggtgggcaccctgatccagagctgcaaggacgagcccttcctgttcatcggcgccctgcagaagagaatcctggacatcggcaagaagcacgacatcaccgagctgaacagcgacgccgtgaacctgatcagccaggccacccaggagagactgagaggcctgctggagaagctgaccgccatcgcccagcacagaatgaccacctacaaggccagcgagaactacatcctgtgcagcgacaccagaagccagctgaagttcctggagaagctggaccagctggagaagcagagaaaggacctggaggagagagagatgctgctgaaggccgccaagagcagaagcaacaaggaggaccccgagcagctgagactgaagcagaaggccaaggagctgcagcagctggagctggcccagatccagcacagagacgccaacctgaccgccctggccgccatcggccccagaaagaagagacccctggagagcggcatcgagggcctgaaggacaacctgctggccagcggcaccagcagcctgaccgccaccaagcagctgcacagacccagaatcaccagaatctgcctgagagacctgatcttctgcatggagcaggagagagagatgaagtacagcagagccctgtacctggccctgctgaagtag

SEQ ID NO: 158124 - DNA, 2589 bp, Artificial Sequence
  derived and/or modified sequence
atgcccgctggactaaccgagcccgccggcgctgcgcctcccgcagccgttagcgcttctgggacagtgaccatggcacccgccggggccctccccgtgagggtcgagtctacacctgtggccttaggagccgtgactaaagcccctgtctcagtctgtgtagaacccacggccagtcagcctctcaggagtccagtggggactttggtaacaaaagtggccccagtcagcgcgccaccaaaggtgagttccggtcctagactccccgctcctcagatcgtggccgttaaggctcctaacacaactactattcaattccccgctaatctgcagctgccgcctgggacggtgctgatcaagtccaacagtggtccactgatgctggttagcccacagcagactgttacacgggcggagaccacgagcaatatcacgtcccggcctgccgtgccagctaatcctcagactgtgaagatctgcacagttcccaatagcagttcgcagctaatcaaaaaggttgccgtgactccagtgaagaagttggcacagattggcacaaccgtggtcaccactgtacccaagccttcctctgtgcaatccgtagccgtgcccacctcagtcgtcaccgttacaccggggaagccactgaacacagtaactaccctgaaacccagctcactgggagcctccagtacacccagtaacgagcccaatctgaaggctgaaaacagcgccgcagttcagatcaatttgtctccaaccatgctggagaacgtgaagaagtgcaagaactttctagcaatgctgatcaaactggcgtgctctgggtctcagtctccagagatgggccagaacgtgaagaaattggttgagcagctgctggacgcaaagattgaagccgaagaatttacacgcaagctctacgtggagctcaagtcttcccctcaaccacacctggtgccgttccttaagaagagcgttgtagcgctccgacagctccttccaaattcccaaagttttattcagcagtgcgtacaacaaacctcttctgatatggttattgctacctgcacaactaccgtgactaccagccctgtcgttaccacaaccgtgtcatcaagccagagcgagaaaagtatcatcgtttctggggctaccgcacccagaacagtctcggtccagacactcaatcccttagcaggtccagtcggagccaaggctggcgtcgtgacactgcactccgtgggtcccaccgccgcaaccggaggcactacagctgggactgggctgctacagacctccaagcctctcgtaacaagcgtagccaatacagtgactaccgtgagcttgcagcctgagaagccagtcgtatcgggaacagcagtgacattaagcctacccgcggtgacattcggcgaaacttcaggagccgccatttgtctgccctctgtgaagcccgtcgttagttccgcaggaaccacctccgataagcccgttataggcacaccggtgcagataaagctggcccaaccaggtccagttttgagccagcctgctgggattcctcaagccgtgcaggtgaagcagttggtggttcagcagccaagtgggggcaacgagaaacaggtcacaacaatctcccacagctccaccctcacaatccaaaagtgtggtcagaagaccatgcccgtgaatacgattattccgacttcccaattcccacctgccagcatactgaagcagattacgctgccaggaaataaaatcctgagtttgcaagccagtccaacacaaaaaaaccgcattaaagaaaatgtcaccagttgtttccgcgacgaggacgacatcaatgatgtgacttccatggccggtgtgaatttaaatgaggagaatgcttgtattctggctaccaattccgagctggtgggaacgctgattcagtcatgcaaagatgagccctttctgtttataggtgcgctccagaagcgcattctagatattggcaagaaacatgacattaccgaactgaattctgacgccgtaaaccttatctcacaggctacccaagaaaggttaaggggactgctggaaaagctgaccgcaatagcccagcacagaatgactacatacaaagcttctgaaaactacattctatgcagcgacacccgcagtcagctgaagtttcttgagaaactggatcagctggaaaagcagaggaaagatttggaggagagagagatgctgcttaaagcggctaagtcacgttcaaacaaggaagatccggaacagctacgcctcaagcagaaggcaaaagaacttcaacagcttgagctggcgcaaattcagcaccgcgacgccaacctcaccgccttagcggctatcgggcctaggaagaagaggcctttagaaagtgggatagagggcttgaaggataacctcctcgcaagtggaaccagctcactcaccgccacgaagcagctacatagacctagaattacccgcatttgcctccgcgacctgatcttctgtatggaacaggagcgtgagatgaagtattctagggcactgtatctcgcgctgctcaaatag

SEQ ID NO: 158125 - DNA, 2589 bp, Artificial Sequence
  derived and/or modified sequence
atgcctgctggcctgacagagcctgctggagctgcccctcctgctgctgtgtctgccagcggcaccgtgaccatggccccagctggggccctgcctgtgcgggtggagagcacccctgtggccctgggcgctgtgaccaaggcccctgtgtctgtgtgtgtggagcccacagccagccagcccctgcggagccctgtgggcaccctggtgaccaaggtggcccctgtgtctgccccacccaaggtgagcagcggcccccggctgcctgccccccagatcgtggccgtgaaggcccccaacaccaccaccatccagtttcctgccaacctgcagctgcccccaggcaccgtgctgatcaagagcaacagcggccccctgatgctggtgagcccccagcagacagtgaccagggctgagaccaccagcaacatcaccagcaggcctgctgtgcctgccaacccccagacagtgaagatctgcaccgtgcccaacagcagcagccagctgatcaagaaggtggccgtgacccctgtgaagaagctggcccagatcggcaccaccgtggtgaccaccgtgcccaagcccagctctgtgcagagcgtggccgtgcccacctctgtggtgacagtgacccctgggaagcccctgaacacagtgaccaccctgaagcccagcagcctgggcgccagcagcacccccagcaatgagcccaacctgaaggccgagaacagcgctgctgtgcagatcaacctgagccccaccatgctggagaatgtgaagaagtgcaagaacttcctggccatgctgatcaagctggcctgcagcggcagccagagccctgagatgggccagaatgtgaagaagctggtggagcagctgctggatgccaagattgaggccgaggagttcaccaggaagctgtatgtggagctgaagagcagcccccagccccacctggtgcccttcctgaagaagtctgtggtggccctgcggcagctgctgcccaacagccagagcttcatccagcagtgtgtgcagcagaccagcagtgacatggtgattgccacctgcaccaccaccgtgaccaccagccctgtggtgaccaccaccgtgagcagcagccagagcgagaagagcatcatcgtgtctggggccacagcccccaggacagtgtctgtgcagaccctgaaccccctggccggccctgtgggcgccaaggccggcgtggtgaccctgcacagcgtgggccccacagctgccactggaggcaccacagctggcaccggcctgctgcagaccagcaagcccctggtgacctctgtggccaacacagtgaccaccgtgtccctgcagcctgagaagcctgtggtgtctggaacagctgtgaccctgagcctgcctgctgtgacctttggagagaccagcggggccgccatctgcctgcccagcgtgaagcctgtggtgagcagcgctggcaccaccagtgacaagcctgtgattggcacccctgtgcagatcaagctggcccagcccggccctgtgctgagccagcctgctggcatcccccaggccgtgcaggtgaagcagctggtggtgcagcagcccagcggcggcaatgagaagcaggtgaccaccatcagccacagcagcaccctgaccatccagaagtgtggccagaagaccatgcctgtgaacaccatcatccccaccagccagttccccccagccagcatcctgaagcagatcaccctgcccggcaacaagatcctgagcctgcaggccagccccacccagaagaaccgcatcaaggaaaatgtgaccagctgcttcagagatgaagatgacatcaatgatgtgacctccatggccggcgtgaacctgaatgaggagaatgcctgcatcctggccaccaacagcgagctggtgggcaccctcatccagagctgcaaggatgagcccttcctgttcatcggggccctgcagaagaggatcctggacatcggcaagaagcatgacatcacagagctgaacagtgatgctgtgaacctgatcagccaggccacccaggagcggctgcggggcctgctggagaagctgacagccatcgcccagcacaggatgaccacctacaaggccagcgagaactacatcctgtgcagcgacaccaggagccagctgaagttcctggagaagctggaccagctggagaagcagaggaaggacctggaggagcgggagatgctgctgaaggccgccaagagccgcagcaacaaggaggaccctgagcagctgcggctgaagcagaaggccaaggagctgcagcagctggagctggcccagatccagcacagagatgccaacctgacagccctggccgccatcggccccaggaagaagaggcccctggagagcggcatcgagggcctgaaggacaacctgctggccagcggcaccagcagcctgacagccaccaagcagctgcaccggccccgcatcacccgcatctgcctgcgggacctgatcttctgcatggagcaggagcgggagatgaagtacagccgggccctgtacctggccctgctgaagtag

SEQ ID NO: 158126 - DNA, 2589 bp, Artificial Sequence
  derived and/or modified sequence
atgcccgccggcctgaccgagcccgccggcgccgccccccccgccgccgtctctgcaagcggaaccgtcaccatggctccagccggggccttaccagttcgcgttgagtcgacccccgtcgccttaggcgctgtgacaaaagctcccgtgtccgtgtgtgtggagcctactgccagccagcctctcagaagtcctgtcggcacactcgtgacaaaagtagcacccgtctccgccccgcccaaagtaagctctgggccgagactgcccgcacctcagatcgtagctgtgaaagctccgaacacaacgacaatacagttccctgccaacctgcagctccccccagggaccgtcctcattaagtcaaactcaggccccctgatgctggtgagtcctcagcagacagtgacacgggcagaaacaacctcaaacatcacttcgcgcccagccgtacccgcgaatccccagacagtgaagatctgcacagtgcctaatagttccagtcagcttatcaagaaggtggctgttacccccgtcaagaaattagctcagattggaaccactgtagtgaccacagtccccaaaccaagctcagtacagagtgtggcagtacctacctccgttgtgacagtgaccccaggtaagccactgaacacagtaactactctcaagcctagctccctcggtgcctcttcaacaccatctaacgaaccgaatttgaaagccgagaactctgccgcagtacagatcaatctgtcaccaaccatgttggaaaatgttaagaaatgcaagaacttcctggctatgctgataaagctggcatgcagcggatcccaatcaccggaaatggggcagaacgtcaagaagctggtagagcagctcctcgacgccaaaattgaggccgaagagtttacgcggaagctgtacgtagagctgaaaagcagtccccagccacaccttgtcccatttcttaaaaagtctgttgtggctctaaggcagctgttgccaaactctcaatcatttattcagcagtgtgtgcagcaaacttccagtgacatggtgatcgcaacttgcacgactactgtcacaacttctccagtcgtcaccactaccgtgtcctcgtcgcagtctgaaaagtccatcatcgtgtccggtgctaccgctccgcggactgtgtccgtacagaccttgaacccacttgccggccctgtaggcgccaaggccggagtggttaccctccacagcgttggtcccactgcagccacaggcggtaccacagccggaacagggctgctgcagacgtctaagcccctggtgacttccgtggcgaatacagttaccaccgtgagtcttcaacccgagaaaccagtcgtgtcaggtacggctgtgacacttagcctcccggccgtgactttcggggagacgagtggggccgcgatatgcttaccctcagtcaagcctgtagtttcctcagcaggcactacttctgataaaccagtgattgggactcctgtgcagattaagctcgctcagcccggccctgtgctgagccagcccgcggggattccacaagctgtgcaggtgaagcagcttgtcgtgcagcaaccctcaggaggaaacgagaagcaggtcaccaccatttcccacagttccactctcaccattcaaaaatgtggtcagaaaacaatgccggtgaatacaatcattcccacctcgcaatttccaccggccagtattctgaaacaaattactctgcccggtaacaaaattctgagcctgcaggcctccccgacgcagaagaatcgcatcaaggaaaatgtgacaagttgctttagggacgaagatgacatcaacgacgtgaccagcatggccggggtgaacctgaacgaagagaatgcctgcattttggccaccaactctgagctggtgggcacacttatccagtcctgtaaggatgagccatttctcttcattggtgccctgcagaagcgcatcctcgatatcggcaagaagcatgatatcaccgagctgaatagcgacgcagtgaacctgatatcacaggcgacccaggagaggctaagagggctgttggagaagctcaccgcaatcgcccagcacagaatgacgacgtacaaagcctcagaaaattacattctgtgttccgacacaagaagtcagctaaagtttttggaaaaactggatcagcttgagaaacagcggaaggacttagaagaacgggaaatgttgctgaaggccgcaaagtcacgatcaaacaaggaagatccagaacagctccggttgaaacaaaaggctaaagaactgcaacagttggaactggctcagatacaacacagagatgcaaacctcacagcattggccgcaattggaccacgtaaaaagagacccctggagtctggtatcgagggactgaaagataacctgctggcatccggcaccagcagccttacagctactaagcagctacaccgtccacgcattaccagaatctgcctcagagatctcattttctgtatggaacaggagcgagaaatgaagtactctcgcgccctgtacctcgccctgctgaaatag

SEQ ID NO: 158127 - DNA, 2589 bp, Artificial Sequence
  derived and/or modified sequence
atgccagcaggactgactgaacccgctggagcagcacccccagccgctgtgagcgccagtggtactgtgacgatggcacccgctggagccctgcccgttagagtggaatcgaccccagtggctttaggcgcagtgactaaggcgccagtatccgtttgtgtggaacctactgcgtcacagccactgaggtctcctgtggggaccctcgtcaccaaagttgccccagtaagtgccccacctaaggtgtcatcaggcccaaggctgccagcccctcaaattgttgccgtgaaggcccctaataccacaacgatacaatttccagccaatctgcagctccctcctggtacagtgctcatcaaatcaaacagtggtccactgatgctagtctctccccagcagaccgtgacacgagcggagaccaccagcaatatcaccagccgcccagctgtgccagccaacccacaaactgtgaagatttgcactgtccccaacagctcgtcacagctgattaaaaaagtggccgtgacgccggtcaagaaattggcacagatcggaacaactgttgtgactaccgtgcccaagccctctagtgtgcagtccgttgcagtaccaacaagcgttgtcacggtgacacctggcaagccccttaacactgttaccaccttaaagccttcttccctgggcgcttcttcgacaccctccaatgagccaaatctgaaggcggaaaacagtgcagctgtgcagattaatctgtcccccactatgttggaaaacgtgaaaaagtgcaaaaattttctggctatgcttattaagctcgcttgcagcggatcacagtcacccgagatgggccagaacgtcaagaagctcgtcgagcagcttctcgatgccaagatcgaagccgaggaatttacgaggaaactctacgtggaactcaagtccagcccccagccccatctggttccattcctgaagaagagtgtcgttgctctgaggcagttactcccaaattctcagtcctttattcagcagtgcgttcagcagacctcttccgatatggtgatcgcgacatgcacgaccaccgtcactacaagcccggtagtgaccactactgtgtcctccagccagagcgaaaagtcaatcattgtctccggtgctacagcaccaaggactgtatcagtgcaaaccctgaatcctctcgctgggcctgtgggtgcgaaggccggagtggtgacccttcattccgttgggcctacagctgcaactgggggaacgaccgctggcacagggctgctccagacctcaaaaccactagttactagcgtcgctaataccgtgacaacagtgtccctccagccagaaaaacccgttgtgtctggcacagccgtcactctgtcactgcccgctgtgactttcggggagacatccggagccgcaatctgcttgccatcagtgaagcctgtcgtgagcagcgccggaacgacctcagacaagcctgtcattggtacacccgtccaaattaagctggcccagcccggacctgtgctctctcaacctgccggaatcccccaggccgtacaagtgaaacagcttgtggtgcagcagccttcaggagggaacgaaaaacaggtgactacaatcagtcactctagcaccctgaccatccagaagtgcggccagaaaacaatgcccgtcaatactataataccaaccagccaattccctccagccagtatcttgaaacagatcacacttcctggcaacaagattctgagtctccaagcgtctccgacccagaaaaatcgcatcaaggagaatgtgacttcctgctttcgcgatgaggacgacataaacgatgtcacatcgatggcgggtgtgaatctgaatgaagagaacgcttgcattctggctacaaatagcgagttggtgggcactctaatccagagctgtaaggatgagccctttttgttcataggagcactgcagaaaagaatactcgatattggcaagaagcacgacatcactgaacttaattcggatgcggttaatctgatctctcaggccacgcaggagcggctaagaggcttactcgaaaaactcaccgctattgctcaacataggatgactacttataaagcctcagagaactacattctgtgttccgacacacggtctcagctgaagttcctggaaaaactggaccagttagagaaacagagaaaagacctggaggaacgggaaatgttgttgaaggcggctaagtcccggtcaaataaggaggatccagagcagctcaggctgaagcaaaaggccaaagaacttcagcaattggaactcgcccaaatacagcacagggatgccaacctcaccgccctcgcagcaataggaccgaggaagaagcgaccacttgagtccggcatcgaaggcttgaaggataatcttttggctagcggtacgagctctctcactgcaaccaagcaactgcaccggcctcggattactagaatatgcctgagggacctgatcttctgcatggaacaggaacgagagatgaagtactcccgagctctgtacctggccctgttgaaatag

SEQ ID NO: 158128 - DNA, 4744 bp, Artificial Sequence
  derived and/or modified sequence
gtggctatataaacatggctggcgtggccgcgcggcggggccgtgccaatcgcgcgtagggggctgtgggcactcggggttcgtagttttgaaatttctggcgggggagcagctgcgcagttaggctcgaggtgtgagcgacgaccttccgggagccgcaagtccaggctcccccgcagcgggacccgagcctgaggcgcagggctgaggcagcgcacgtgtgagcgccgctgaggaagctgcgagaggtcgggcgggtgtcgctccgggggcagcccaggctcgcgcggacgagaggaaggtccgggacgcgcgtgtcctgccgtgcagcgggcgcccgtcactgacttcgctgctgcggcccccgcgcctctccccagcgatgctgtggaacccgaaccgcaccggagtcggctgccgcgcgccaagcctcccctcacctctgctcccggaaccgcagcgccaaagctgccgctgagcccctgggggatgcccgccggcctcaccgaacccgccggcgccgctcccccggctgctgtgagcgcctcggggaccgtgaccatggccccggccggggcgctgccggtgcgggtggagagcactccggtggccctgggcgccgtgactaaggctcctgtcagcgtctgcgtggagcccacggcgtcccagcccctgcggtcccccgtggggaccctggtgaccaaagtggctccggtcagcgcccctcctaaagtcagcagcggccctaggctgcctgctcctcagatagtcgccgtgaaagcccccaacaccacgacaatccagtttcctgctaatttgcagcttcctccaggaaccgttttgattaaaagtaacagtggtccgttgatgttggtatctcctcagcaaactgtaacaagagccgagaccacaagtaacataacctcaaggccagcagtaccagcgaatcctcaaacagtcaaaatctgtacagtgccgaactctagctcacaattaatcaagaaagtggcagtgacacctgttaaaaaattggcacaaataggaactactgtggtaaccactgttccgaagccttcctcagtacaatctgtggctgtgccaaccagtgtcgtcacagttactcctggaaagccattgaatactgtaactaccctgaagccttcaagtttgggagcatcatccactccttcaaatgagcccaatcttaaagcagagaactcagcagctgttcagattaatctttctccgacaatgctagaaaatgtgaagaaatgcaagaacttccttgcaatgttaataaaactagcatgtagtggatcacagtccccagaaatggggcaaaatgtgaagaagctggtggaacaacttttggatgcaaaaatcgaagcagaagaatttactaggaaactgtatgttgaactcaagtcttcacctcagcctcacctggttccttttcttaagaaaagcgtggttgccttacgacaacttctgcctaactcccagagcttcatccagcaatgtgttcagcagacttctagtgacatggtcattgctacctgtactacaacagtaacaacttctcctgtggtgacaactacagtgtcctcaagccagtctgaaaagtcaattattgtttctggagcaacagcacccagaactgtgtcagtgcaaactttgaacccacttgctggtccagtgggagcaaaagctggagttgtgacacttcattctgtgggcccaactgctgcaacaggaggaacaacagctggaactggtttgcttcagacttcaaaaccacttgtgacatctgtggcaaacacagtgaccacggtctcactgcaacctgaaaagccagttgtctctggaacagcagtaacactgtcccttccagcagtaacttttggagaaacttcaggtgcagctatttgtcttccatctgtgaaacctgttgtttcttctgctgggaccacatctgacaagcctgttattgggactccagttcaaatcaaacttgcccagccgggccctgtcctttcacaaccagctgggattccacaggcagttcaagtcaagcaactagtagttcagcagccttcaggaggcaatgaaaaacaagtgaccacaatttcacattcctcaacattgaccattcagaaatgtggacagaagacgatgccagtgaacaccataatacctactagtcagtttcctccagcttccattctaaagcaaattactctgcctggaaataaaattctgtcacttcaagcatctcctactcagaaaaatagaataaaagagaatgtaacatcatgcttccgagatgaggatgacatcaatgatgtgacttctatggcaggggtcaaccttaatgaagaaaatgcctgcatcttagcaacaaactctgaattggttggcacactcattcagtcatgtaaagatgaaccatttctttttattggagctctacaaaagagaattttagacattggtaaaaagcatgacattacagaacttaactctgatgctgtgaacttgatctcccaagcaacacaggaacgactacgaggccttctagaaaaactgactgcaattgctcagcatcgaatgactacttacaaggcaagtgaaaattacatcctgtgtagtgataccaggtcacagctcaaatttcttgaaaagctggatcaattggagaagcagagaaaggatttggaagaaagagaaatgttacttaaggcagccaagagtcgttctaataaagaagatccagaacagctgagattaaagcagaaagccaaagagttacagcaattggaacttgcacagatacagcatagagacgctaatctcacagctcttgcagctattggaccaaggaagaagagaccactagaatctggaattgagggcttaaaagacaaccttcttgcttctgggacatccagcctgacagccaccaaacagttgcatcgtccaagaatcacgagaatctgcctcagggacttgatattttgtatggaacaggaacgggagatgaagtattctcgagctctatacctggcccttctgaagtgaccactccactcttccatccagatccttgctatttactgccaaagaagacacaaagcattgttgcactgtcctgaaatttcaatttctggaaaataatcaccaacatgaaagagcattgtttacagttagaaactttattaactcttacctatccatctcatgggactcttacagactcagattcatctttgtcttctgaaaatcagttatgaaatacactttgcacagaattaggcatctgcctatctgtgcattaaattaaagcaagttaaggccctatttgttactacctgcctcatttgccaaattgtagcaggtgaggtgtccttccctaatacagcatgcattgagatgcaggagaaaggaagaggcataagaaaatacaagaatgactatttcattctatattgaacctgtcccaaagtggtaggttttctgggctggaatcagaagttgcttagctaactatgacagtcaccctctgtacgtgacaggccactgtggtgactttggtcggctgagttccagtgttgtcaaaacaagacaaatggggatagattgtgcctggggttgctaattctctgcttcatatcaccatatgccgtttctggtaccaagtgaggggacatgcttgtcagggaaaccttaaaattgaatctactgatatatcttgttgaaaaaatggaaaaggtgcaaagtattagaaggaacgttagggcgttgctttcaaactgatgaggggaatgtgaaaatggtatcataaaacaggaaatgtgcttcatatgcccaagaggggaagaggtggaatcggaactccaaaacaactggtacatgttttgttgatgggcaaaaaaaatcacagcacaaccagaaaggagaatgtaccagatgttttcaaattagagtatttcaaaaggaaaatgttattttttgttttgtattgttttaaatcccaaggatagtttttatagttccttctgtcataatatattttagttatcctaatttttaagcatgttggcacatttaaaaaatcctaattgatgatgagaaatttttaacaataggactttatgttggattctgtacttaaaaggtactgtcaatatctcactcttggggatatgagctctaaatatgagaagcaagttatatgtgttcacctgaggaagaagctgacggacaaagcaaaccctctttaaaaaaaaaaaaaagaaaattccacgtgtgtggaatacagccggtgaaaaataatcactgtagttagaatcacatacagaaaaaaaatgattgaatcctccaagaaggtatttcaaaaatgggaaatgctatacttataagaattgaaggaaaaaaaaaaaaacacctcacgtatgttattcttcatcctgttcttcccattgggactgttatggccatattctacagtatagtaaattttaaattggccacatttttttttgtttcagcaagttatgtaaaatgctataaattatgtgtatgttaaaggagtactttaagaagagatctttatccaaagttgtttttgtatatttaaatgcttacctttattttttgtaaagtgcagcatactcatttgtgtataatcttactgatcagatgtttaaaattattccaaatacttcattaaaataattattttatt

SEQ ID NO: 158129 - protein, 76 aa, Artificial Sequence
  derived and/or modified sequence
MAEEKKLKLSNTVLPSESMKVVAESMGIAQIQEETCQLLTDEVSYRIKEIAQDALKFMHMGKRQKLTTSDIDYALK

SEQ ID NO: 158130 - protein, 233 aa, Artificial Sequence
  derived and/or modified sequence
MAEEKKLKLSNTVLPSESMKVVAESMGIAQIQEETCQLLTDEVSYRIKEIAQDALKFMHMGKRQKLTTSDIDYALKLKNVEPLYGFHAQEFIPFRFASGGGRELYFYEEKEVDLSDIINTPLPRVPLDVCLKAPKEQQKAEATEPLKSAKPGQEEDGPLKGKGQGATTADGKGKEKKAPPLLEGAPLRLKPRSIHELSVEQQLYYKEITEACVGSCEAKRAEALQSIATDPGL

SEQ ID NO: 158131 - protein, 134 aa, Artificial Sequence
  derived and/or modified sequence
MAEEKKLKLSNTVLPSESMKVVAESMGIAQIQEETCQLLTDEVSYRIKEIAQDALKFMHMGKRQKLTTSDIDYALKLKNVEPLYGFHAQEFIPFRFASGGGRELYFYEEKEVDLSDIINTPLPRVPLDVCLKAH

SEQ ID NO: 158132 - protein, 114 aa, Artificial Sequence
  derived and/or modified sequence
MAEEKKLKLSNTVLPSESMKVVAESMGIAQIQEETCQLLTDEVSYRIKEIAQDALKFMHMGKRQKLTTSDIDYALKLKNVEPLYGFHAQEFIPFRFASGGGRELYFYEEKEVDL

SEQ ID NO: 158133 - DNA, 2034 bp, Artificial Sequence
  derived and/or modified sequence
atggccgaggagaagaagctgaagctgagcaacaccgtgctgcccagcgagagcatgaaggtggtggccgagagcatgggcatcgcccagatccaggaggagacctgccagctgctgaccgacgaggtgagctacagaatcaaggagatcgcccaggacgccctgaagttcatgcacatgggcaagagacagaagctgaccaccagcgacatcgactacgccctgaagctgaagaacgtggagcccctgtacggcttccacgcccaggagttcatccccttcagattcgccagcggcggcggcagagagctgtacttctacgaggagaaggaggtggacctgagcgacatcatcaacacccccctgcccagagtgcccctggacgtgtgcctgaaggcccactggctgagcatcgagggctgccagcccgccatccccgagaaccccccccccgcccccaaggagcagcagaaggccgaggccaccgagcccctgaagagcgccaagcccggccaggaggaggacggccccctgaagggcaagggccagggcgccaccaccgccgacggcaagggcaaggagaagaaggccccccccctgctggagggcgcccccctgagactgaagcccagaagcatccacgagctgagcgtggagcagcagctgtactacaaggagatcaccgaggcctgcgtgggcagctgcgaggccaagagagccgaggccctgcagagcatcgccaccgaccccggcctgtaccagatgctgcccagattcagcaccttcatcagcgagggcgtgagagtgaacgtggtgcagaacaacctggccctgctgatctacctgatgagaatggtgaaggccctgatggacaaccccaccctgtacctggagaagtacgtgcacgagctgatccccgccgtgatgacctgcatcgtgagcagacagctgtgcctgagacccgacgtggacaaccactgggccctgagagacttcgccgccagactggtggcccagatctgcaagcacttcagcaccaccaccaacaacatccagagcagaatcaccaagaccttcaccaagagctgggtggacgagaagaccccctggaccaccagatacggcagcatcgccggcctggccgagctgggccacgacgtgatcaagaccctgatcctgcccagactgcagcaggagggcgagagaatcagaagcgtgctggacggccccgtgctgagcaacatcgacagaatcggcgccgaccacgtgcagagcctgctgctgaagcactgcgcccccgtgctggccaagctgagacccccccccgacaaccaggacgcctacagagccgagttcggcagcctgggccccctgctgtgcagccaggtggtgaaggccagagcccaggccgccctgcaggcccagcaggtgaacagaaccaccctgaccatcacccagcccagacccaccctgaccctgagccaggccccccagcccggccccagaacccccggcctgctgaaggtgcccggcagcatcgccctgcccgtgcagaccctggtgagcgccagagccgccgcccccccccagcccagccccccccccaccaagttcatcgtgatgagcagcagcagcagcgcccccagcacccagcaggtgctgagcctgagcaccagcgcccccggcagcggcagcaccaccaccagccccgtgaccaccaccgtgcccagcgtgcagcccatcgtgaagctggtgagcaccgccaccaccgccccccccagcaccgcccccagcggccccggcagcgtgcagaagtacatcgtggtgagcctgccccccaccggcgagggcaagggcggccccaccagccaccccagccccgtgcccccccccgccagcagccccagccccctgagcggcagcgccctgtgcggcggcaagcaggaggccggcgacagccccccccccgcccccggcacccccaaggccaacggcagccagcccaacagcggcagcccccagcccgccccctag

SEQ ID NO: 158134 - DNA, 231 bp, Artificial Sequence
  derived and/or modified sequence
atggccgaggagaagaagctgaagctgagcaacaccgtgctgcccagcgagagcatgaaggtggtggccgagagcatgggcatcgcccagatccaggaggagacctgccagctgctgaccgacgaggtgagctacagaatcaaggagatcgcccaggacgccctgaagttcatgcacatgggcaagagacagaagctgaccaccagcgacatcgactacgccctgaagtag

SEQ ID NO: 158135 - DNA, 1806 bp, Artificial Sequence
  derived and/or modified sequence
atgcacatgggcaagagacagaagctgaccaccagcgacatcgactacgccctgaagctgaagaacgtggagcccctgtacggcttccacgcccaggagttcatccccttcagattcgccagcggcggcggcagagagctgtacttctacgaggagaaggaggtggacctgagcgacatcatcaacacccccctgcccagagtgcccctggacgtgtgcctgaaggcccccaaggagcagcagaaggccgaggccaccgagcccctgaagagcgccaagcccggccaggaggaggacggccccctgaagggcaagggccagggcgccaccaccgccgacggcaagggcaaggagaagaaggccccccccctgctggagggcgcccccctgagactgaagcccagaagcatccacgagctgagcgtggagcagcagctgtactacaaggagatcaccgaggcctgcgtgggcagctgcgaggccaagagagccgaggccctgcagagcatcgccaccgaccccggcctgtaccagatgctgcccagattcagcaccttcatcagcgagggcgtgagagtgaacgtggtgcagaacaacctggccctgctgatctacctgatgagaatggtgaaggccctgatggacaaccccaccctgtacctggagaagtacgtgcacgagctgatccccgccgtgatgacctgcatcgtgagcagacagctgtgcctgagacccgacgtggacaaccactgggccctgagagacttcgccgccagactggtggcccagatctgcaagcacttcagcaccaccaccaacaacatccagagcagaatcaccaagaccttcaccaagagctgggtggacgagaagaccccctggaccaccagatacggcagcatcgccggcctggccgagctgggccacgacgtgatcaagaccctgatcctgcccagactgcagcaggagggcgagagaatcagaagcgtgctggacggccccgtgctgagcaacatcgacagaatcggcgccgaccacgtgcagagcctgctgctgaagcactgcgcccccgtgctggccaagctgagacccccccccgacaaccaggacgcctacagagccgagttcggcagcctgggccccctgctgtgcagccaggtggtgaaggccagagcccaggccgccctgcaggcccagcaggtgaacagaaccaccctgaccatcacccagcccagacccaccctgaccctgagccaggccccccagcccggccccagaacccccggcctgctgaaggtgcccggcagcatcgccctgcccgtgcagaccctggtgagcgccagagccgccgcccccccccagcccagccccccccccaccaagttcatcgtgatgagcagcagcagcagcgcccccagcacccagcaggtgctgagcctgagcaccagcgcccccggcagcggcagcaccaccaccagccccgtgaccaccaccgtgcccagcgtgcagcccatcgtgaagctggtgagcaccgccaccaccgccccccccagcaccgcccccagcggccccggcagcgtgcagaagtacatcgtggtgagcctgccccccaccggcgagggcaagggcggccccaccagccaccccagccccgtgcccccccccgccagcagccccagccccctgagcggcagcgccctgtgcggcggcaagcaggaggccggcgacagccccccccccgcccccggcacccccaaggccaacggcagccagcccaacagcggcagcccccagcccgccccctag

SEQ ID NO: 158136 - DNA, 702 bp, Artificial Sequence
  derived and/or modified sequence
atggccgaggagaagaagctgaagctgagcaacaccgtgctgcccagcgagagcatgaaggtggtggccgagagcatgggcatcgcccagatccaggaggagacctgccagctgctgaccgacgaggtgagctacagaatcaaggagatcgcccaggacgccctgaagttcatgcacatgggcaagagacagaagctgaccaccagcgacatcgactacgccctgaagctgaagaacgtggagcccctgtacggcttccacgcccaggagttcatccccttcagattcgccagcggcggcggcagagagctgtacttctacgaggagaaggaggtggacctgagcgacatcatcaacacccccctgcccagagtgcccctggacgtgtgcctgaaggcccccaaggagcagcagaaggccgaggccaccgagcccctgaagagcgccaagcccggccaggaggaggacggccccctgaagggcaagggccagggcgccaccaccgccgacggcaagggcaaggagaagaaggccccccccctgctggagggcgcccccctgagactgaagcccagaagcatccacgagctgagcgtggagcagcagctgtactacaaggagatcaccgaggcctgcgtgggcagctgcgaggccaagagagccgaggccctgcagagcatcgccaccgaccccggcctgtag

SEQ ID NO: 158137 - DNA, 405 bp, Artificial Sequence
  derived and/or modified sequence
atggccgaggagaagaagctgaagctgagcaacaccgtgctgcccagcgagagcatgaaggtggtggccgagagcatgggcatcgcccagatccaggaggagacctgccagctgctgaccgacgaggtgagctacagaatcaaggagatcgcccaggacgccctgaagttcatgcacatgggcaagagacagaagctgaccaccagcgacatcgactacgccctgaagctgaagaacgtggagcccctgtacggcttccacgcccaggagttcatccccttcagattcgccagcggcggcggcagagagctgtacttctacgaggagaaggaggtggacctgagcgacatcatcaacacccccctgcccagagtgcccctggacgtgtgcctgaaggcccactag

SEQ ID NO: 158138 - DNA, 345 bp, Artificial Sequence
  derived and/or modified sequence
atggccgaggagaagaagctgaagctgagcaacaccgtgctgcccagcgagagcatgaaggtggtggccgagagcatgggcatcgcccagatccaggaggagacctgccagctgctgaccgacgaggtgagctacagaatcaaggagatcgcccaggacgccctgaagttcatgcacatgggcaagagacagaagctgaccaccagcgacatcgactacgccctgaagctgaagaacgtggagcccctgtacggcttccacgcccaggagttcatccccttcagattcgccagcggcggcggcagagagctgtacttctacgaggagaaggaggtggacctgtag

SEQ ID NO: 158139 - DNA, 768 bp, Artificial Sequence
  derived and/or modified sequence
atggccgaggagaagaagctgaagctgagcaacaccgtgctgcccagcgagagcatgaaggtggtggccgagagcatgggcatcgcccagatccaggaggagacctgccagctgctgaccgacgaggtgagctacagaatcaaggagatcgcccaggacgccctgaagttcatgcacatgggcaagagacagaagctgaccaccagcgacatcgactacgccctgaagctgaagaacgtggagcccctgtacggcttccacgcccaggagttcatccccttcagattcgccagcggcggcggcagagagctgtacttctacgaggagaaggaggtggacctgagcgacatcatcaacacccccctgcccagagtgcccctggacgtgtgcctgaaggcccactggctgagcatcgagggctgccagcccgccatccccgagaaccccccccccgcccccaaggagcagcagaaggccgaggccaccgagcccctgaagagcgccaagcccggccaggaggaggacggccccctgaagggcaagggccagggcgccaccaccgccgacggcaagggcaaggagaagaaggccccccccctgctggagggcgcccccctgagactgaagcccagaagcatccacgagctgagcgtggagcagcagctgtactacaaggagatcaccgaggcctgcgtgggcagctgcgaggccaagagagccgaggccctgcagagcatcgccaccgaccccggcctgtaccagatgtag

SEQ ID NO: 158140 - DNA, 2034 bp, Artificial Sequence
  derived and/or modified sequence
atggcagaggaaaagaagcttaaactgagcaacactgtgctgccatcagaaagcatgaaagttgtcgcggagtccatgggcatagcccagatccaggaagagacttgtcagcttctgactgatgaagttagctacagaattaaggagattgcccaggacgctttaaaatttatgcatatgggaaaacgacagaagcttactacaagcgatatagactacgccctgaaactcaagaacgtggaaccgctgtacggctttcacgcgcaggagtttattccgtttcgattcgcatctgggggtggccgtgagttgtacttctacgaggaaaaggaagtggacctaagtgacatcatcaatactcctcttcctcgggtacctttagatgtgtgtttaaaagcccattggttatccatcgagggatgccagcccgctatcccggagaaccctcctcctgctcctaaagagcagcagaaagctgaagctacagagcctttgaaatccgccaagcctggccaggaagaagatgggccgctaaaaggaaaaggccagggggctacaaccgcagatggaaagggaaaggaaaagaaagcccccccactgttggaaggggccccactaagattaaagcctcgtagcattcatgaattatccgtagaacagcagttatactataaggagatcacagaggcctgcgtcggaagttgcgaggctaagagagcggaagctctgcagtccattgcaactgacccgggcttgtaccagatgctgccccgattcagtacctttatttccgagggtgtacgggttaacgtggtgcagaataatctggctttgttaatttatctgatgaggatggtcaaagccttgatggacaatcctacgctatatttggagaagtatgtccatgagcttatcccagccgttatgacatgtattgttagccggcagctttgcctgaggccggatgtcgataatcattgggccttgagggatttcgctgctcgtctcgtagcccaaatatgcaaacatttcagcacaaccaccaacaatattcagagccggatcaccaagacgttcactaagtcttgggtcgacgaaaagactccatggacaactcgctacggatctattgccggcctcgccgaactgggccacgatgtgatcaaaactctgatactgcctaggttgcaacaggaaggagaacgcatccgcagcgtgctcgatgggccggttctgtcaaacatcgaccggattggggctgaccacgttcagtccctgcttctaaaacattgtgctccggtactcgctaagttgaggccacctccggacaaccaggacgcttatagggccgagttcggctcactcggccccctcctttgctctcaggtggtgaaggcaagagcccaggccgcattgcaagctcagcaggtcaaccggacaacacttacgattacccaaccgagaccaaccttaacactatcccaggccccccagcctgggccccgaactccaggactgctgaaggtgccaggatccattgcgctgccggtacaaacgctcgttagcgccagggcggccgctcccccacagcccagccccccccccacaaaattcatcgtcatgtcttcctccagctcagcacccagcactcagcaagtcctgtctctctccacaagtgctccaggatcagggagtaccactacctcacctgtgaccaccactgtgcccagtgtacagccgattgtcaagctggtctccaccgccacgacagccccaccgagtacagccccgtccggacccggctccgtccagaaatacatcgttgtgtccctgccacccaccggggagggcaaaggcggccctaccagccacccttcacccgtgccccctcctgcctctagcccgtcccctctgtccggatccgctctgtgcgggggcaaacaggaggccggagatagccctcccccagctcctggaacaccaaaagcgaatggctctcagccgaattctgggtctccacagcctgccccttag

SEQ ID NO: 158141 - DNA, 231 bp, Artificial Sequence
  derived and/or modified sequence
atggcggaagaaaagaaacttaagctgtccaataccgtactgccaagcgaaagcatgaaggtggtagctgagtcaatgggaattgcacaaatacaggaggagacttgccagttgctgaccgatgaggtgagttacaggattaaagaaatcgcccaagacgccttgaaattcatgcatatgggcaagcgacaaaagttgacaacatccgatatcgactatgcacttaagtag

SEQ ID NO: 158142 - DNA, 1806 bp, Artificial Sequence
  derived and/or modified sequence
atgcacatgggcaaacgccagaaactgaccacgtctgacattgactatgcgctcaagttgaagaacgtggaaccgctttacggttttcacgcgcaggagttcatcccgtttcggttcgcgtcaggtgggggcagggagctgtacttctatgaagaaaaagaggtggatctatctgacatcattaacacccccttacccagagtgcccctggatgtgtgtttaaaggcccctaaagaacagcaaaaagctgaggctaccgagcccttaaagtcggcaaagccaggacaagaggaagacggcccgctcaagggaaagggccagggggccaccacggcggacggcaagggaaaggagaaaaaagcacctcccctcctggaaggcgctccgctgcgtcttaagccacgttcaattcatgagctctccgtagagcaacaattgtactacaaagaaataaccgaagcttgtgtagggtcttgcgaggccaagcgtgccgaggccctgcagagcatcgctaccgatcctggtttataccaaatgctcccccgcttcagtactttcatctctgaaggagtgcgcgtcaatgtcgtgcagaataacttagcactgctcatctatctgatgaggatggtaaaggccctaatggataatcccacgctctatctggagaaatacgtccacgaactcatcccggccgtgatgacctgtattgttagccgccaactgtgcctgcggccagatgtggacaatcactgggccctccgagatttcgccgctcgcctcgttgcccagatttgtaaacacttttctacgactactaacaacatacagtcgcggatcacaaagacatttacgaagagttgggtggacgagaagacaccatggacgactcgttacggatccatcgctggcctagcggagctggggcacgatgtcatcaagacccttatcttacctcggctgcaacaagaaggagaaagaatccgcagcgtgctggacgggccagtacttagtaatatcgataggattggagctgaccacgtccaatctctattgcttaagcactgcgctcccgtcttggcaaagctgcggccaccacccgataatcaggacgcttacagggccgagtttggctcactggggcctctcttatgctcccaagttgtcaaagctagggctcaggccgctctccaggcacagcaagtcaaccgcactacgctaacaatcactcaaccacgaccaaccctgactctgtctcaggccccacagccaggacccaggacaccaggacttctgaaggtgcccggttctattgctttgcctgtgcaaactttggtcagcgcacgcgcagcagcccccccgcaacctagtcctcctcctaccaagtttatcgtgatgtcctcttctagttccgcaccatccacacagcaggttctatcgttgtccacctccgccccaggaagcgggagcactaccacttcccccgttacaactactgtacctagcgtgcagcctatcgtgaaactggtgtcaaccgcaaccactgctccgccttccaccgcaccatctgggccaggttctgttcagaaatacatcgtggtgtccctcccaccgacgggcgaaggcaagggcggacccacaagccacccttcaccggtacccccacccgcctcaagcccttcccctttgtctgggtctgccctgtgcggcggcaaacaggaggccggagattcccctcctcccgcccccgggaccccaaaagccaatggatctcagccaaattcaggctctccccaacctgccccctag

SEQ ID NO: 158143 - DNA, 702 bp, Artificial Sequence
  derived and/or modified sequence
atggccgaggaaaagaagctaaagctgtccaacacggttcttccatctgaatccatgaaggtggttgctgagtccatgggcatcgcccagattcaggaagaaacctgtcagttgctcactgacgaagtttcctacagaatcaaagagatcgcccaggatgccctcaagtttatgcatatgggaaagcggcagaagctgaccaccagcgatatagactacgctcttaagctgaagaatgtggagcctctatatggtttccatgcccaggaattcatacctttccggttcgcatcgggcggcgggagggaactttacttctatgaggagaaggaagttgatctctccgacattatcaacacccctctcccacgcgtgccactggacgtgtgcctgaaggcccccaaggagcagcaaaaggcagaggcgactgagccgctgaagtctgccaaacctggacaggaagaagatggtccattgaagggaaaaggccaaggcgcgaccacggctgacggcaagggaaaagaaaaaaaggcacccccattgcttgagggagctccgctgcggctgaagccgcgctctatccatgagcttagcgtagagcagcagctgtattataaagagatcaccgaagcgtgtgttggtagctgtgaagctaagagggccgaggcactacagtcaatcgccacagaccccgggttatag

SEQ ID NO: 158144 - DNA, 405 bp, Artificial Sequence
  derived and/or modified sequence
atggccgaagagaaaaagcttaaactgtccaacacagttctgcccagcgaatctatgaaggtggtggccgagtcaatgggcattgcgcagatccaggaggagacatgccaattgctcaccgacgaggtctcatatcgcataaaagaaatcgctcaagacgctctcaaattcatgcatatgggcaagagacagaagctgaccacaagtgatattgactacgctctaaagttgaaaaatgtcgaacccctgtatggatttcatgcccaagagttcatccccttccgcttcgcgtcagggggaggcagggaactgtatttttatgaagaaaaggaagtggatctatccgacattatcaataccccgctgcccagggtcccccttgatgtgtgtctcaaagcacactag

SEQ ID NO: 158145 - DNA, 345 bp, Artificial Sequence
  derived and/or modified sequence
atggcggaagaaaagaagttgaaattatcaaacaccgtccttccatcagagtcaatgaaagtggtggccgagtcaatgggtatcgctcaaattcaggaggagacctgtcagttgcttaccgacgaggtgtcttacagaatcaaggaaattgcacaagacgccctcaagtttatgcacatgggaaaacgccagaagttaactacgtctgatattgactatgccttgaaactgaaaaacgtcgagcccttatacggcttccacgcacaagagtttattcccttcagattcgccagcggaggcggacgggagctgtatttctacgaggaaaaggaggtcgatctgtag

SEQ ID NO: 158146 - DNA, 2034 bp, Artificial Sequence
  derived and/or modified sequence
atggctgaggagaagaagctcaaactgagcaatacagtgctcccctcagaaagcatgaaagttgtggcagagtccatggggatagcgcagattcaagaagagacctgccaattgctgacggacgaggtctcttacagaattaaggaaattgcacaggatgccctcaagtttatgcacatgggaaaacgccagaagctcacgacctccgacattgattacgccctgaaactgaagaacgtggaacctctgtacggctttcatgctcaggagttcattcccttcagattcgcttccggcggcgggcgagagttatacttctacgaagagaaggaggtggacctgtctgacattatcaatacaccactgcccagagtacctctagacgtgtgcctaaaggcccactggttgagtatcgagggatgtcagccggccattccagaaaacccacctccagcccctaaggagcagcagaaagctgaggccaccgaacccctcaagtccgccaaaccaggccaggaagaggatggccctttgaaagggaaaggacagggagccactactgccgacggcaaagggaaggagaaaaaagcccctcctctccttgagggtgccccattaagattaaagcctaggtcaatacatgagttgagtgttgaacagcagctttactacaaagaaataactgaggcctgcgtcgggagctgcgaggctaaacgcgctgaagccctgcagagcattgcgacagacccaggtctgtatcagatgctgcccagattttcaacgtttattagcgaaggggttcgggtgaatgtggttcagaataatttggcgctactcatctatctcatgaggatggtaaaggctctgatggacaatcccacgctttaccttgagaagtacgtccatgaactgattcctgctgtgatgacttgcattgttagccgacagctgtgcctccgcccagatgtcgacaatcattgggcgctgcgcgactttgccgccagactggttgcccaaatatgtaagcatttctccacaacgactaacaatatccagagcagaattaccaaaaccttcacaaaatcttgggtcgacgagaagaccccttggaccacacggtacggcagtatcgcaggtctggcagagttaggccacgacgttatcaaaacactcatcctccctaggttacagcaggagggcgaacggatacgctcggttctggacggacccgtgctgtctaacatcgatagaatcggcgccgatcatgttcagtctcttcttctcaaacactgtgctccggtattggccaagctcaggccccccccagataatcaggacgcttatcgggcagagtttggttcacttggccccttactgtgcagccaggtagtgaaggcacgcgcgcaggctgccctgcaagcccaacaggtgaataggacaaccctaacaattacacagccccgccctactctgactcttagccaggccccccagcctgggcctagaacgcctgggctgctgaaggtgcctggatccattgcattgcctgtgcagaccttggttagtgcccgagccgcagccccgcctcagccctcacctccaccaaccaagtttatagtcatgtcttcatcatcaagcgcgccctctacccagcaggtgctgagcctttcaactagtgccccgggatccggctctaccacgacatctccagtgactactaccgtgccctccgtccagccaatcgttaagctggtatcaactgcaacgaccgccccaccatcaacggccccatcaggtccaggatccgttcagaaatacatcgtggttagtttgccacccaccggtgaaggcaagggtggcccgacttcccatcccagccctgtgcccccccctgcgagctcacccagcccgttatctggctccgccttgtgtggcgggaagcaggaggcaggcgactccccgccaccagcgcccggaactcccaaagccaatggctctcagcctaactcagggtctccccagcccgcaccatag

SEQ ID NO: 158147 - DNA, 2034 bp, Artificial Sequence
  derived and/or modified sequence
atggctgaggaaaagaagctgaaactgagcaacactgtgctgcctagtgaaagtatgaaggtagtggcagagagcatgggaatcgctcagatccaggaggaaacatgtcagctccttactgatgaagtgtcctaccgcatcaaggagatagcccaagacgcacttaagttcatgcatatgggtaagcgacagaaactaacgacgagcgatattgattacgcccttaagcttaaaaatgttgaacccctgtacggattccatgcccaggagtttattccgttcagattcgcttccggcggaggcagggaactgtacttctacgaagaaaaagaggtcgacctctccgacatcataaatacacctctcccccgtgttccgctggacgtctgtctgaaagcccattggttgtccatcgaagggtgtcagcctgccatacccgagaatccccccccagcccccaaggaacagcagaaagctgaggcaactgagcccctgaagagcgcaaaacccgggcaagaggaagatggaccactcaaagggaaaggacagggagccacaacagccgatggtaaagggaaggagaaaaaagctcctcctctgttggagggtgcacctttaagactgaagccacggtctatccacgaactgtccgttgagcagcagttatattataaggaaataaccgaagcatgtgtcggctcgtgcgaggccaagcgggcagaagcactgcagtccattgctaccgacccggggttgtatcaaatgctgccgagattctccacgttcatctctgaaggcgtgcgggtaaacgtggtgcagaataacctggcattgctgatctacctgatgcgaatggttaaggctctaatggacaatcccactctgtatctagagaagtacgtccacgagttaatccccgcggtgatgacttgcatagtgagtcgacaactgtgtctcagacctgatgtcgacaatcattgggctctgagagatttcgcagcaaggttggtggctcaaatttgcaagcatttctcgaccactaccaacaacatacaatctcgcattacaaagacatttactaaatcttgggtggacgaaaaaacaccttggaccacacgttatggaagtatcgcgggcctcgctgaactgggtcatgacgtcataaaaactctcatcttgcctagactgcagcaggaaggcgaaaggatacgcagtgtgcttgatggacccgtgttgtcaaatatcgaccgtattggagctgaccatgtgcagagtctcttattgaagcactgtgctcccgttctggctaagctgcgccccccgccagacaatcaggatgcttatcgagccgagtttggtagcctgggccccctcctctgctctcaggtcgttaaggcgagggcccaggctgctcttcaggcacagcaagtaaacaggacaacactgacaatcacccagccgagacccaccctgactctctctcaggcaccccaaccggggccccggacccctggactcctcaaggtccctgggtccatcgcattgcccgtccagactctggtgtcagcgagagccgctgcccccccccagccctcaccaccccctactaagtttatagtgatgtcttcatcttccagcgccccatctactcaacaggtactgtctctgtccactagcgcacccggcagtgggtccaccactacttccccagttaccaccactgtaccctcagtgcaaccaattgttaagttagtctctacagccactaccgcccctccttctacggcccctagcggccctgggagcgttcaaaaatacatcgttgtgtctttaccacctacaggagagggcaagggcggaccaacctctcatccctcaccagtccctccacctgcttcaagcccttctccactttctgggtcagccctgtgtggtggcaagcaagaggcaggagattctccccctcctgctccgggcacccccaaagccaatgggagccagcccaatagtggttcccctcagccggctccctag

SEQ ID NO: 158148 - DNA, 768 bp, Artificial Sequence
  derived and/or modified sequence
atggccgaggaaaagaaacttaaactcagcaacactgttctcccctcagagagtatgaaagtggtcgcagaatctatggggatagcccagatacaggaagaaacctgccagctgctgacggatgaggtgtcatatcggatcaaagaaatcgctcaggacgcactcaaattcatgcatatggggaaaaggcagaaacttactacttccgatattgattatgccctaaagctgaagaatgtcgagcccctatacggcttccacgcacaggagtttatcccattcagattcgcctctggaggaggtcgcgagctttacttctacgaagagaaggaagtcgacctgagcgacattatcaatacacccttgcccagggtgccactcgatgtgtgcctgaaggcacactggctatctattgaagggtgtcaacctgcaataccagaaaaccctccaccggccccgaaagaacagcagaaagcggaagcgaccgagcccctgaagtccgctaagccaggacaagaggaggatgggccattaaaggggaaagggcagggtgccacaacggcggacggcaagggaaaggaaaaaaaggcaccaccactccttgagggcgcacccctgaggcttaagccgagaagtatccacgaattgtcagtggagcagcaattgtattataaggaaatcaccgaagcatgcgtcggttcatgtgaagctaagagggccgaggcgttgcagagcatagcgaccgatcccggtttgtaccagatgtag

SEQ ID NO: 158149 - DNA, 2034 bp, Artificial Sequence
  derived and/or modified sequence
atggccgaggagaagaagctgaagctgagcaacacagtgctgcccagcgagagcatgaaggtggtggccgagagcatgggcatcgcccagatccaggaggagacctgccagctgctgacagatgaggtgtcctaccgcatcaaggagatcgcccaggatgccctgaagttcatgcacatgggcaagaggcagaagctgaccaccagtgacattgattatgccctgaagctgaagaatgtggagcccctgtatggcttccacgcccaggagttcatccccttccgctttgccagcggcggcggccgggagctgtacttctatgaggagaaggaggtggacctgagtgacatcatcaacacccccctgccccgggtgcccctggatgtgtgcctgaaggcccactggctgagcattgagggctgccagcctgccatcccagaaaatcctcctccagcccccaaggagcagcagaaggccgaggccacagagcccctgaagagcgccaagccaggccaggaggaggatggccccctgaagggcaagggccagggcgccaccacagcagatggcaagggcaaggagaagaaggccccacccctgctggagggcgcccccctgcggctgaagcccaggagcatccacgagctgtctgtggagcagcagctgtactacaaggagatcacagaggcctgtgtgggcagctgtgaggccaagagagctgaggccctgcagagcatcgccacagaccccggcctgtaccagatgctgccccgcttcagcaccttcatcagcgagggcgtgcgggtgaatgtggtgcagaacaacctggccctgctgatctacctgatgaggatggtgaaggccctgatggacaaccccaccctgtacctggagaagtatgtgcatgagctgatcccagctgtgatgacctgcatcgtgtcccggcagctgtgcctgcggccagatgtggacaaccactgggccctgcgggactttgctgcccggctggtggcccagatctgcaagcacttcagcaccaccaccaacaacatccagagccgcatcaccaagaccttcaccaagtcctgggtggatgagaagaccccctggaccaccaggtatggcagcattgctggcctggccgagctgggccatgatgtgatcaagaccctcatcctgccccggctgcagcaggagggggagcgcatccgctctgtgctggatggccctgtgctgagcaacatcgaccgcatcggggctgaccacgtgcagagcctgctgctgaagcactgtgcccctgtgctggccaagctgcggcccccaccagacaaccaggatgcctacagagctgagtttggcagcctgggccccctgctgtgcagccaggtggtgaaggcccgggcccaggccgccctgcaggcccagcaggtgaacagaaccaccctgaccatcacccagccccggcccaccctgaccctgagccaggccccccagcccggccccaggaccccaggcctgctgaaggtgcccggcagcatcgccctgcctgtgcagaccctggtgtctgcccgggccgccgccccaccccagcccagccccccacccaccaagttcatcgtgatgagcagcagcagcagcgcccccagcacccagcaggtgctgagcctgagcaccagcgcccctggcagcggcagcaccaccaccagccctgtgaccaccaccgtgcccagcgtgcagcccatcgtgaagctggtgtccacagccaccacagccccacccagcacagcccccagcggccctggctctgtgcagaagtacatcgtggtgtccctgccccccaccggggagggcaagggcggccccaccagccaccccagccctgtgcccccaccagccagcagccccagccccctgagcggcagcgccctgtgtggcggcaagcaggaggccggggacagccccccaccagcccctggcacccccaaggccaacggcagccagcccaacagcggcagcccccagcctgccccctag

SEQ ID NO: 158150 - DNA, 231 bp, Artificial Sequence
  derived and/or modified sequence
atggccgaggagaagaagctgaagctgagcaacacagtgctgcccagcgagagcatgaaggtggtggccgagagcatgggcatcgcccagatccaggaggagacctgccagctgctgacagatgaggtgtcctaccgcatcaaggagatcgcccaggatgccctgaagttcatgcacatgggcaagaggcagaagctgaccaccagtgacattgattatgccctgaagtag

SEQ ID NO: 158151 - DNA, 1806 bp, Artificial Sequence
  derived and/or modified sequence
atgcacatgggcaagaggcagaagctgaccaccagtgacatcgactatgccctgaagctgaagaatgtggagcccctgtatggcttccacgcccaggagttcatccccttccgctttgccagcggcggcggccgggagctgtacttctatgaggagaaggaggtggacctgagtgacatcatcaacacccccctgccccgggtgcccctggatgtgtgcctgaaggcccccaaggagcagcagaaggccgaggccacagagcccctgaagagcgccaagccaggccaggaggaggatggccccctgaagggcaagggccagggcgccaccacagcagatggcaagggcaaggagaagaaggccccacccctgctggagggcgcccccctgcggctgaagcccaggagcatccacgagctgtctgtggagcagcagctgtactacaaggagatcacagaggcctgtgtgggcagctgtgaggccaagagagctgaggccctgcagagcatcgccacagaccccggcctgtaccagatgctgccccgcttcagcaccttcatcagcgagggcgtgcgggtgaatgtggtgcagaacaacctggccctgctgatctacctgatgaggatggtgaaggccctgatggacaaccccaccctgtacctggagaagtatgtgcatgagctgatcccagctgtgatgacctgcatcgtgtcccggcagctgtgcctgcggccagatgtggacaaccactgggccctgcgggactttgctgcccggctggtggcccagatctgcaagcacttcagcaccaccaccaacaacatccagagccgcatcaccaagaccttcaccaagtcctgggtggatgagaagaccccctggaccaccaggtatggcagcattgctggcctggccgagctgggccatgatgtgatcaagaccctcatcctgccccggctgcagcaggagggggagcgcatccgctctgtgctggatggccctgtgctgagcaacatcgaccgcatcggggctgaccacgtgcagagcctgctgctgaagcactgtgcccctgtgctggccaagctgcggcccccaccagacaaccaggatgcctacagagctgagtttggcagcctgggccccctgctgtgcagccaggtggtgaaggcccgggcccaggccgccctgcaggcccagcaggtgaacagaaccaccctgaccatcacccagccccggcccaccctgaccctgagccaggccccccagcccggccccaggaccccaggcctgctgaaggtgcccggcagcatcgccctgcctgtgcagaccctggtgtctgcccgggccgccgccccaccccagcccagccccccacccaccaagttcatcgtgatgagcagcagcagcagcgcccccagcacccagcaggtgctgagcctgagcaccagcgcccctggcagcggcagcaccaccaccagccctgtgaccaccaccgtgcccagcgtgcagcccatcgtgaagctggtgtccacagccaccacagccccacccagcacagcccccagcggccctggctctgtgcagaagtacatcgtggtgtccctgccccccaccggggagggcaagggcggccccaccagccaccccagccctgtgcccccaccagccagcagccccagccccctgagcggcagcgccctgtgtggcggcaagcaggaggccggggacagccccccaccagcccctggcacccccaaggccaacggcagccagcccaacagcggcagcccccagcctgccccctag

SEQ ID NO: 158152 - DNA, 702 bp, Artificial Sequence
  derived and/or modified sequence
atggccgaggagaagaagctgaagctgagcaacacagtgctgcccagcgagagcatgaaggtggtggccgagagcatgggcatcgcccagatccaggaggagacctgccagctgctgacagatgaggtgtcctaccgcatcaaggagatcgcccaggatgccctgaagttcatgcacatgggcaagaggcagaagctgaccaccagtgacattgattatgccctgaagctgaagaatgtggagcccctgtatggcttccacgcccaggagttcatccccttccgctttgccagcggcggcggccgggagctgtacttctatgaggagaaggaggtggacctgagtgacatcatcaacacccccctgccccgggtgcccctggatgtgtgcctgaaggcccccaaggagcagcagaaggccgaggccacagagcccctgaagagcgccaagccaggccaggaggaggatggccccctgaagggcaagggccagggcgccaccacagcagatggcaagggcaaggagaagaaggccccacccctgctggagggcgcccccctgcggctgaagcccaggagcatccacgagctgtctgtggagcagcagctgtactacaaggagatcacagaggcctgtgtgggcagctgtgaggccaagagagctgaggccctgcagagcatcgccacagatcctggcctgtag

SEQ ID NO: 158153 - DNA, 405 bp, Artificial Sequence
  derived and/or modified sequence
atggccgaggagaagaagctgaagctgagcaacacagtgctgcccagcgagagcatgaaggtggtggccgagagcatgggcatcgcccagatccaggaggagacctgccagctgctgacagatgaggtgtcctaccgcatcaaggagatcgcccaggatgccctgaagttcatgcacatgggcaagaggcagaagctgaccaccagtgacattgattatgccctgaagctgaagaatgtggagcccctgtatggcttccacgcccaggagttcatccccttccgctttgccagcggcggcggccgggagctgtacttctatgaggagaaggaggtggacctgagtgacatcatcaacacccccctgccccgggtgcccctggatgtgtgcctgaaggcccactag

SEQ ID NO: 158154 - DNA, 345 bp, Artificial Sequence
  derived and/or modified sequence
atggccgaggagaagaagctgaagctgagcaacacagtgctgcccagcgagagcatgaaggtggtggccgagagcatgggcatcgcccagatccaggaggagacctgccagctgctgacagatgaggtgtcctaccgcatcaaggagatcgcccaggatgccctgaagttcatgcacatgggcaagaggcagaagctgaccaccagtgacattgattatgccctgaagctgaagaatgtggagcccctgtatggcttccacgcccaggagttcatccccttccgctttgccagcggcggcggccgggagctgtacttctatgaggagaaggaggtggacctgtag

SEQ ID NO: 158155 - DNA, 768 bp, Artificial Sequence
  derived and/or modified sequence
atggccgaggagaagaagctgaagctgagcaacacagtgctgcccagcgagagcatgaaggtggtggccgagagcatgggcatcgcccagatccaggaggagacctgccagctgctgacagatgaggtgtcctaccgcatcaaggagatcgcccaggatgccctgaagttcatgcacatgggcaagaggcagaagctgaccaccagtgacattgattatgccctgaagctgaagaatgtggagcccctgtatggcttccacgcccaggagttcatccccttccgctttgccagcggcggcggccgggagctgtacttctatgaggagaaggaggtggacctgagtgacatcatcaacacccccctgccccgggtgcccctggatgtgtgcctgaaggcccactggctgagcattgagggctgccagcctgccatcccagaaaatcctcctccagcccccaaggagcagcagaaggccgaggccacagagcccctgaagagcgccaagccaggccaggaggaggatggccccctgaagggcaagggccagggcgccaccacagcagatggcaagggcaaggagaagaaggccccacccctgctggagggcgcccccctgcggctgaagcccaggagcatccacgagctgtctgtggagcagcagctgtactacaaggagatcacagaggcctgtgtgggcagctgtgaggccaagagagctgaggccctgcagagcatcgccacagaccccggcctgtaccagatgtag

SEQ ID NO: 158156 - DNA, 2034 bp, Artificial Sequence
  derived and/or modified sequence
atggccgaggagaagaagctgaagctgagcaacaccgtgctgccctcagagtctatgaaagtcgttgctgaaagcatggggattgcacagattcaggaagagacttgtcagctgttgacagatgaggtgtcttatcgcataaaagaaattgcccaggatgccttgaaattcatgcacatggggaaacgacaaaaactgaccacctcagacatagactatgctctaaagttaaaaaacgttgagcccctgtacggattccacgcacaggaattcatccccttccgtttcgccagtgggggtgggcgcgagctatatttctacgaagagaaggaagtcgatttgtctgatatcatcaacacccctcttccccgcgtgcctctggacgtttgcttaaaggcacactggttaagtatcgaaggatgtcagcccgccatccctgaaaatccaccacctgcaccaaaggagcaacagaaggctgaggctactgaacccctgaagtccgccaaacctgggcaggaggaggacggtcctctgaaggggaagggtcagggggccacaacagctgatggtaagggaaaagagaaaaaagcccccccccttctggaaggagccccactaaggctgaagcctagaagcatccatgagttatccgtagagcagcagctctattacaaggaaatcaccgaggcctgcgtaggcagttgcgaggcgaaacgtgcagaggctctccagtcgatcgccaccgatcccggcttgtatcagatgttgcctagattctctacctttataagcgaaggagttcgggttaacgtggtgcagaataatctcgctctgctgatttacttgatgcgtatggtcaaagctctgatggacaatcccacactgtatctggagaagtatgtgcacgagctgattcccgccgtgatgacatgcatcgttagtcgccagttgtgcttgcggccggacgttgataatcactgggctctaagggactttgccgcacgcttggtcgcccaaatctgtaagcacttttctacgaccacgaacaatattcagagtcgaatcaccaagacatttaccaaatcatgggtagatgaaaaaacaccctggaccacacgctacggctcgatcgcgggcttggcagagctggggcatgacgtgatcaagaccttgattctgccgcgtctgcaacaggagggcgaaagaattcgctctgtactcgacggtcccgtactttccaatattgacagaatcggtgctgatcatgttcagagcttgctcttaaagcattgtgcaccagtcctggccaagctccgtcccccacctgataaccaggacgcttacagggcggagtttggaagtcttggccccctgctgtgttcacaggtagtaaaagcaagagctcaggctgccctgcaggcgcagcaggttaacaggacaactctgaccataacccaaccccgaccaactctcaccctgtcgcaagcaccgcagcctggcccgcgcacaccaggattgttgaaggtccccggatcaattgccttacccgtgcagacgttagtttctgccagggctgcggcgccaccccaaccctcccccccccctactaaattcattgttatgagcagtagttcaagtgcaccgtcaacccagcaggttctctccctcagcacctctgcacctggtagcgggtccactaccacctctcccgtgacaacgacagttccctccgtgcaaccgatcgtcaagctggtctcgacggcaacaaccgctcccccaagcacagctcccagcggccccgggagcgtccagaagtacatcgtggtgtctctgccccccacaggggagggcaagggcggaccgacttcccacccctcgccagtccctccccctgccagctctccgtcaccactctccgggagtgctctctgtggtgggaagcaagaggccggggattcgcctcctccggctccagggaccccaaaggccaatggtagccagcccaactcaggtagcccccagcccgcgccttag

SEQ ID NO: 158157 - DNA, 231 bp, Artificial Sequence
  derived and/or modified sequence
atggccgaggagaagaagctgaagctgagcaacaccgtgctgccctcggaatcaatgaaggtcgtagcggaatctatggggattgcccaaatacaagaagagacctgtcagcttttgacagatgaagtgagctacaggatcaaggagatcgcccaggatgccctgaagttcatgcacatgggcaaaaggcagaagctgaccacatctgacattgactatgccctgaagtag

SEQ ID NO: 158158 - DNA, 1806 bp, Artificial Sequence
  derived and/or modified sequence
atgcacatgggcaagcggcagaagctgaccaccagcgacatcgactacgccctgaaacttaaaaacgtcgaacccctttacggttttcatgctcaggagttcatcccgtttcggtttgccagcgggggcgggagggaactctacttctacgaggagaaagaggtagatctttctgatataatcaatacgcctctgcctcgggtgcccctggatgtctgcctgaaggcacctaaagagcaacagaaagctgaggctaccgaaccgctcaaaagcgcgaagccaggccaggaagaggacggtcctttgaagggaaagggtcaaggagctacaaccgcagatggcaagggcaaagagaagaaggcgcctccgctgctggaaggcgcacccctgcggttaaagcctagaagcattcatgaactgagtgtggagcaacagctttattataaagagatcaccgaggcgtgcgtagggagctgcgaggctaaacgcgctgaagcgctccagagcatagccacagaccccggactctatcaaatgttaccgagattctcaaccttcatttctgaaggcgtgcgtgttaatgtggtccagaataatttggccctgctgatttacctgatgcggatggttaaagccctcatggacaacccgaccctctacctggaaaagtatgtgcacgagcttatcccggccgtgatgacatgcatagtgtctagacaattatgtctgaggcctgatgtcgacaaccattgggcactgcgtgactttgcagctcggctcgttgcccaaatctgcaagcacttctccacaacgaccaacaacatccagtcccgaatcacaaaaacattcaccaagagttgggtcgatgagaaaacaccctggacgaccaggtatggcagcatagctggactggctgagctgggccacgacgtaatcaagaccctaatccttcctcgcttacagcaggaaggtgagcgaatccgttcagtgctggatgggcccgtcctaagtaacattgatcgcatcggggccgaccacgttcagtccctgctgctcaaacactgcgcccccgtgttagctaaactgcggcctccccctgacaatcaggacgcctatcgcgctgagtttggctctcttgggcctttgctgtgcagccaggtggttaaggcccgcgcccaagccgctctccaagcacagcaggtgaacaggactactctcacgatcacccagccaagacctacgctgacattgagccaagccccacagccaggaccacgaacccccggactgctgaaagtacctggcagcatcgctttacctgtacaaacacttgtttccgctagagcggcagcccctccccaaccatctccaccccccaccaaattcatagtaatgtctagtagttcttcggctccaagtacccagcaggtgctgtccctttctacgtccgctcctggctccgggagcacaacgaccagtccggtgacaactaccgtgccttcagtgcagcctattgtgaaactggtcagcacagctactaccgctcccccttccactgcacctagtggccccgggtcagtacagaaatacattgtggtctccctgccgcctactggagaggggaaaggcggtcctactagccacccttctcctgtaccgccaccagccagttctccctccccactctctggaagcgctttgtgcggaggaaagcaggaggccggggatagcccgccccccgctcctggtacaccgaaagccaacggaagccagccaaacagcggctctcctcaacccgccccatag

SEQ ID NO: 158159 - DNA, 702 bp, Artificial Sequence
  derived and/or modified sequence
atggccgaggagaagaagctgaagctgagcaacaccgtgctgccctctgaatccatgaaagtggtcgctgagtcaatggggattgcacaaatccaggaagaaacttgccagctcctgacagacgaggtaagttaccgcataaaggaaatcgctcaggatgccctcaagttcatgcatatgggcaagcgacagaaacttacaacatcggacattgattacgctttaaagctcaagaacgtggagccgctgtacggttttcatgcacaggagttcatcccattccgcttcgctagcggcggagggcgtgagctgtatttttacgaagagaaggaagtcgatctgtccgatattattaacactcctctgccgcgagtgccactggatgtctgcttgaaggcccccaaagagcagcaaaaagcggaagcaactgagcccctcaagtccgctaagccaggccaagaagaggatggtccacttaagggcaaaggtcagggagccacaacagccgatggcaagggcaaagagaagaaagcaccgccgctgctcgagggtgctcccttaagattgaagcctagatctatccatgagctcagcgtcgagcaacagctgtattacaaggagattaccgaggcctgtgtggggtcatgcgaagctaaaagggccgaggcgctgcaatccatcgctaccgatcctgggttatag

SEQ ID NO: 158160 - DNA, 405 bp, Artificial Sequence
  derived and/or modified sequence
atggccgaggagaagaagctgaagctgagcaacaccgtgctgccctccgaatccatgaaggtggtggcagaaagtatgggcatcgcccagattcaggaagagacctgccagctgctgaccgatgaggtgtcttatcgcattaaggagattgcccaagacgctcttaaattcatgcacatgggaaaacggcagaaattaactactagcgacatagattacgctctgaagctgaaaaatgtcgagccactgtatggttttcacgcgcaggagttcatacccttccgcttcgcctcaggggggggacgcgaattgtatttttacgaggaaaaagaggtcgacctgtccgacattattaacacccctctcccccgggtgcctctggacgtatgccttaaggcgcattag

SEQ ID NO: 158161 - DNA, 345 bp, Artificial Sequence
  derived and/or modified sequence
atggccgaggagaagaagctgaagctgagcaacaccgtgctgccctccgagagcatgaaggtagtcgccgagtctatgggcatcgcccaaattcaggaggaaacgtgtcagctgttaacagatgaggtgagctataggatcaaagaaatagcccaggacgccctgaagtttatgcatatgggaaaaagacagaaacttaccacttctgatatcgattatgccctgaagctgaagaatgtggaacccctgtacggcttccatgcccaagaattcattccctttcgttttgcgtctggcgggggccgtgagctttatttttatgaagagaaagaagttgatttgtag

SEQ ID NO: 158162 - DNA, 2034 bp, Artificial Sequence
  derived and/or modified sequence
atggccgaggagaagaagctgaagctgagcaacaccgtgctgccctccgaatccatgaaggtggtggccgagagtatgggcatagctcagatccaagaagagacctgccagctgctaactgacgaggtatcataccgaatcaaagaaatcgcccaggatgcattaaagttcatgcatatggggaagcggcagaagctgacaacatctgacatagattacgcactgaagttaaagaacgtcgaaccgctttatgggtttcacgcacaggagtttatccccttcagatttgcctccggaggaggacgtgaactgtatttctatgaggagaaggaggtggatcttagcgacataattaacacgccgctgccccgcgtccccctggatgtgtgcctaaaagcgcattggctctcaatcgaaggctgtcaacctgccatcccagagaatccaccccctgccccaaaagaacaacagaaggcggaggccacagagccactgaagtcagccaaaccaggccaggaagaagacgggccgctgaaaggcaaggggcagggcgcaacgaccgcagatggcaaggggaaagagaagaaagcccccccattgctggagggagcccccttgcggttgaagccgaggtccatccacgagttaagtgtcgagcaacagttgtattataaagaaattaccgaggcttgtgtgggaagttgcgaagcaaagcgggcagaggctttacagagcattgccactgatccaggactgtatcagatgctgccacggttctctacatttatcagcgaaggcgtgcgggtgaacgtcgtccagaataatctggccctattaatataccttatgcgtatggtgaaagctctcatggacaaccctacgttgtacctggagaaatacgtgcacgaactcatcccggctgtcatgacatgcatcgtgagcaggcagctctgcctgcgacctgatgtcgacaaccattgggccctgagagatttcgccgcaagactcgtggcccagatttgcaagcacttttctaccacgacaaacaacatccagtcacgaatcactaaaactttcactaaaagctgggttgacgagaagaccccttggactacacggtacggctctattgcaggtctggctgagctgggccacgacgtgatcaagaccctaatcctgccacgattgcaacaggagggtgagcgcatcagatcggtgttagatgggccagtgctgtcaaacattgatcgaatcggtgctgatcatgtccagtcactgcttcttaagcattgcgcccctgttttggctaagcttcgccccccgccggataaccaggatgcctacagggccgagtttggaagcctaggtcctcttctgtgttcacaggtcgttaaggcacgggcacaggcagccctccaggcccagcaggtaaacaggacaactttgactattactcagcctagacccaccctaacactcagtcaagccccccagcctgggccacggactcctggacttttaaaggtgcccggatctatcgccctcccagtgcagacgctggtttcagcccgtgccgctgcacctccccaaccatcacctccgccgaccaaattcattgtcatgtcttcttcgtcatcagcaccatctacccagcaggtgctgtccctctcaaccagtgctccaggcagtgggagcacaactacctctcccgtaaccaccaccgtccccagtgtgcagccaatcgtgaaattagtgtccactgccacaacagcaccaccaagtactgcaccctcaggccctggcagtgtacagaaatatatcgtggtgtctttaccgccgactggcgagggcaaggggggtcctacctcccacccttcccctgtccctccccctgcctcatccccatcgcctttgtccggcagtgccctatgcggcgggaagcaagaggcgggcgattctccccctcccgcacctggcactcccaaagccaacggttcccaaccaaactccgggtctccacaaccagccccttag

SEQ ID NO: 158163 - DNA, 2034 bp, Artificial Sequence
  derived and/or modified sequence
atggccgaggagaagaagctgaagctgagcaacaccgtgctgcccagcgaaagcatgaaagttgtggcagaatccatgggaatcgcgcagatccaggaggaaacatgtcagctgttgactgacgaagtctcctaccgtattaaagagatcgcccaggacgccctcaagttcatgcatatggggaagcgccagaaacttacgacatcggatatcgactacgcactcaagctgaaaaacgtcgaaccactgtacggctttcacgcacaggaattcatcccattccggtttgcaagtggaggcggccgggagttatatttttatgaggaaaaagaagttgatctgtccgatataattaatactcccctgccacgggttcccctggacgtgtgcttgaaagcccattggcttagcatcgagggctgccaaccagctattcccgagaatcctccacctgctcccaaggagcaacagaaagcggaggcaaccgagcccttgaaaagtgctaaacccggtcaggaagaagatggcccccttaaaggaaaaggtcagggcgccactactgccgatggaaaagggaaggagaaaaaggcaccaccactgttagagggcgcacctctgaggctcaaacctcggtctattcatgagctcagtgtagagcagcagctgtactacaaagaaataacagaggcgtgcgtaggaagctgcgaggcaaagcgagcagaggccctgcagtccattgcaacggatcctggtctctaccagatgcttccgcggtttagtacatttatcagtgaaggcgttcgggtcaacgtcgtgcagaataacctagccctattaatctacctcatgcgtatggtcaaagctctcatggataatcctaccctttatctggagaagtatgtgcatgagcttatcccggcagtcatgacttgcattgttagtcggcagctttgtctgaggccagacgtggacaatcactgggcccttagagatttcgcagcacgtcttgtagcacagatttgtaaacacttttctactactactaacaacatacagtcaaggattaccaaaacctttaccaaaagttgggttgatgaaaagacaccttggacgaccaggtacggttctattgcaggattagcggaacttggtcacgatgtcatcaagacactgattcttcccaggttacagcaggaaggagagcggattaggtctgtgcttgatggccctgtgctgtccaatatcgacagaattggagctgaccacgttcagtctttgctgttaaaacactgtgctcctgtgctggccaaattgcggcctccacccgataaccaggacgcctacagggccgagtttggctccttgggccccctcctttgttcccaggtggttaaggcccgggctcaggccgcccttcaggcgcagcaggtgaaccggacgactcttaccatcacccagccaaggccaactctgacactgtcccaggcacctcaacccggtccacggacaccaggtctgcttaaagtcccagggagtatcgctcttcccgtccagactctcgttagcgcccgcgctgctgcgcctcctcagccgtccccccctcccaccaagttcatagttatgtccagctcctcttccgctcccagcacccagcaggtcctcagtctgtcaacatctgccccgggatcagggtccacaaccacgagtcctgtgacaacaactgtgccttctgtgcagcccatcgtgaagctcgtgagcacagcgactacagcacctccatccactgccccgtctggcccaggatctgtacaaaagtacatcgtggtatcactgccccccactggggagggaaagggagggccaactagccatcccagtccagtgccaccaccagcatcaagccccagcccactttctggcagcgccctctgtgggggaaaacaggaggctggagatagcccaccaccagcgccgggcactcccaaggccaacgggagtcaacctaatagtggctctccccagcctgcaccatag

SEQ ID NO: 158164 - DNA, 768 bp, Artificial Sequence
  derived and/or modified sequence
atggccgaggagaagaagctgaagctgagcaacaccgtgctgccctcggagtccatgaaagtggtggccgagagcatgggtatcgctcagatccaggaggagacctgccagctgctgacggatgaagtgtcttaccggatcaaagagatcgcccaagatgctctgaaatttatgcatatgggcaagcgacagaagttaacaacctcagatatcgattacgcactgaagctcaaaaatgtcgaacccctgtatggcttccatgcccaggaattcataccctttcgttttgcgtcaggaggcggtagagagctgtatttctacgaagagaaggaggtggacctaagtgatattatcaatacaccattgcccagggtgccccttgatgtatgcctcaaggctcactggctgtctattgaaggctgccaacccgccatcccggagaatccaccaccagctcccaaagaacagcagaaggcagaggctaccgagccactgaaaagtgcgaaaccagggcaggaagaggacggccccctgaagggaaaaggacagggagccacaactgcagatgggaaaggcaaggagaaaaaggctccacctctgctagagggagccccactgaggctcaaaccacgcagcatccacgaactatcggttgaacagcagctctactacaaggagataaccgaggcctgtgtcggatcgtgcgaagccaagcgtgcggaagccctgcaaagtattgcaacagatcccggactgtaccagatgtag

SEQ ID NO: 158165 - DNA, 2034 bp, Artificial Sequence
  derived and/or modified sequence
atggccgaggagaagaagcttaagttgtcaaatactgtcctgcccagcgagagcatgaaggtggttgcggaatccatgggcattgcacaaatccaggaagagacgtgccaattgttgacagacgaagtgtcctatcggattaaagaaatagcacaggatgctctgaagttcatgcacatgggtaagagacagaagctcactacttccgacattgattatgccctgaaactgaaaaacgtcgagcccctttacggattccatgcacaagaattcattccatttaggttcgctagtggcggtggacgagagttgtatttttacgaagagaaagaggtggatttgagcgatatcatcaacacccccctgcctagagtgccactggacgtgtgtctgaaggctcactggctgtcaattgaggggtgtcagcctgccattcccgaaaatccaccaccggcacctaaagagcagcagaaggccgaagccactgagcccctgaaatcggccaaacctggccaggaggaagacggccctctgaaaggcaaagggcagggcgctaccaccgcagacgggaaaggcaaggagaagaaggcgcctcctctgcttgaaggagctcctcttaggctcaagcctcgcagtattcatgaactgagcgtcgagcagcagctctattacaaggagattaccgaagcctgtgtgggctcctgtgaagccaagagagcggaagccctgcagagcattgccacagatccgggactataccagatgctaccaagattctctactttcatctctgagggcgttcgggtgaacgttgtccagaacaaccttgcactgctaatctacctcatgcgtatggtgaaagcattgatggacaacccgactctttacctcgaaaaatacgtccacgaactaatccctgctgtgatgacatgcattgtatctcggcagctgtgccttagacccgacgtcgataaccattgggcattgagagacttcgcagccagactggtcgcgcagatctgtaaacacttttccaccactacaaataacatacaaagccggatcactaagacatttactaaatcatgggtcgacgagaagaccccttggacaacaaggtatggttcaattgcgggactggctgagctgggtcatgacgtgatcaagacacttatcctgcctcggctccagcaggaaggagaacgcattcgcagtgttctcgatgggccagtgctctccaatattgatcgcattggagctgatcatgtacagagcctgcttttgaagcactgtgcaccagtgttggccaaactgcggcctccccctgataaccaagatgcctacagagcagaatttgggtctctaggtcctctcctttgttcacaggtcgtcaaggccagggctcaagctgcgctccaagcccaacaggtgaaccggactactttaactatcactcagcctcggcctacactgaccctcagccaggccccacaaccaggtccccgtacgccaggactgctgaaagtaccaggcagcatcgctcttccagtccagaccttggtgtccgccagagctgccgctcccccacagcccagcccaccaccaacaaaattcatcgtgatgtcatcctcaagcagtgccccttccactcaacaagtgctgagtctttctacatccgcccctggatcaggtagcaccactacgtcaccagtgacgactacagtccccagcgtccagcctatcgttaaattagtcagtacagctactactgctcccccatcgacagctcctagtggtccgggaagtgtgcagaagtacattgtagtgtcgcttccacccactggtgagggcaaagggggtcctacgagtcaccccagtcctgtcccgcctcctgctagctccccctctcctctgagcgggagtgctctgtgcggcggaaagcaagaagctggagatagccctcctcccgcacctgggaccccaaaagcaaacggtagccagcctaattccggaagcccgcagccagccccatag

SEQ ID NO: 158166 - DNA, 231 bp, Artificial Sequence
  derived and/or modified sequence
atggccgaggagaagaaactgaagttaagtaacaccgtgcttccaagcgaaagcatgaaagttgtggccgagagcatggggattgcacagatacaggaggaaacttgccaattgttgacagatgaagtaagctacagaatcaaagagattgcccaggacgctttgaaattcatgcacatggggaagcggcagaagctgacgacctccgacatagactatgccctgaagtag

SEQ ID NO: 158167 - DNA, 1806 bp, Artificial Sequence
  derived and/or modified sequence
atgcacatgggaaagagacagaagcttacgacctctgatattgactacgccctgaagttgaagaatgtagagcctttgtacggcttccatgcccaggagtttatcccgtttcggtttgcatcaggtgggggtagggaactgtacttttacgaagagaaggaagttgacctatctgacatcattaacacaccactgcccagggttcccttggacgtgtgtctgaaggcccctaaggagcagcagaaagcagaagccacggagccattaaaaagtgctaagcccggtcaggaagaggatggcccacttaagggaaaagggcagggcgcaacgacagcagacggtaagggaaaagagaaaaaggctcctccactgctggaaggagcacccctgaggcttaagccacggtctattcacgagctttctgtggagcagcaactttactacaaagagatcactgaggcctgtgttggatcctgcgaggccaagcgggctgaggccttgcagtcaatcgccacagacccaggtctttaccaaatgttgccaaggttttctacgttcatcagtgaaggagtacgcgtgaacgtcgtgcaaaataatctggcgttgctgatttatcttatgcgcatggtcaaagcactgatggacaatcccacactttacttagagaagtatgttcacgagctgattccagccgtcatgacctgcattgtgtcacggcagctttgcctcaggcctgatgtggacaatcactgggctttaagagattttgccgcacggctggttgcccagatctgcaagcatttctccaccactaccaacaatattcagtccagaataacaaagactttcacaaaaagttgggtggacgaaaagaccccgtggaccacaagatacggaagtatcgccggtctagcagaactgggacatgatgtgatcaagaccctgatccttcctcgattgcaacaagaaggcgagcgaatcaggagtgtgctggacggaccagtgctgtccaatattgaccggataggtgctgatcacgtgcagagcctcctgctgaaacattgtgcacctgtgcttgctaaactcaggcccccacctgataaccaggatgcgtatcgggctgaattcggttccctaggcccactactctgttcccaggtcgtgaaagctcgcgcacaggcagcgctccaagcccaacaagtcaatcgaaccactctgaccatcacacagcctcgccctactcttaccctaagccaggccccacagcctggccctcgaacccccggtcttctaaaagtcccagggtcaatcgctcttccagtgcagaccctggtatctgcacgtgcagccgctccccctcaaccttctcctccgccaacaaagtttatcgtgatgtcttccagctcttctgccccttcaacccagcaggttctgtctttgagcacctcggcacccggatcagggagtacaaccacatcacccgtgacaaccaccgtgccttccgtccaacctattgttaagttggtaagcactgcgacaactgcccctccttcgacagcccctagcggccctggctctgttcagaagtacattgtggtaagcctgcctcccaccggtgaggggaaggggggacccacttcccacccatcacctgtgccacctccagcgagtagcccctcacctcttagcggttctgctttatgtggaggtaagcaggaggcgggagatagtccacctcctgctccaggcaccccaaaggctaatggcagtcagcccaacagcgggagcccacagcccgcaccctag

SEQ ID NO: 158168 - DNA, 702 bp, Artificial Sequence
  derived and/or modified sequence
atggccgaagagaagaagctaaaactgagtaacaccgtactgccttctgagagtatgaaagttgtcgcagaaagcatgggtattgctcagattcaggaagagacctgccagctgcttaccgacgaggtttcatacaggataaaggagatcgcgcaggacgccctgaaattcatgcatatgggcaagcgccagaagcttactacctccgacatcgattatgcgctcaagctgaagaacgttgagcccctgtatggtttccacgctcaagagttcattcctttcaggttcgccagtgggggtggacgcgagctgtacttctatgaggaaaaagaggttgacttgtccgatatcattaatacacctcttccacgcgtcccactggatgtgtgcctgaaggctcctaaagaacagcagaaggccgaggccactgagccactcaagagcgcaaaaccaggccaggaggaggacggcccactgaagggcaagggacagggtgccaccacagccgacggaaaaggaaaagagaagaaggcaccccctctgctggagggagcaccgctccgactgaagccacggtccattcatgagctttctgttgaacaacaactgtattataaagaaatcaccgaggcgtgtgtgggatcatgtgaggccaagagagcagaggctcttcaaagtatcgccacagatcccggtttatag

SEQ ID NO: 158169 - DNA, 405 bp, Artificial Sequence
  derived and/or modified sequence
atggccgaggaaaaaaaacttaagctatcaaacacagtactgccttctgaaagcatgaaagtcgtggccgaatcaatgggtattgcgcagatccaagaagaaacctgccagcttctgactgatgaggtcagttatagaatcaaggagatagcccaggacgccctgaaatttatgcatatgggaaagcgccagaaactgaccacttcagacattgactacgcgcttaagctgaaaaatgtcgagcctctgtacgggtttcatgctcaggagttcatacctttccgctttgccagcggcggagggagagaattgtatttctatgaagaaaaggaggtagacctctcggatattattaatactccgctgccccgagtacctctggacgtgtgcctaaaggcgcattag

SEQ ID NO: 158170 - DNA, 345 bp, Artificial Sequence
  derived and/or modified sequence
atggcagaagagaagaagctcaaattgtccaataccgtcttgccaagcgagtctatgaaggtcgtagctgaatctatgggaatagcccagattcaagaagaaacttgccagctcctgacggatgaagtgagttacaggattaaagagattgcgcaagacgccttgaaattcatgcatatgggcaaaaggcagaagctaactacatccgacatagactacgcactcaaactcaaaaatgtcgagcccctgtacggtttccacgcgcaggaattcatccccttcagatttgctagcggcggtgggagagagctgtacttctacgaggagaaagaggtggatctctag

SEQ ID NO: 158171 - DNA, 2034 bp, Artificial Sequence
  derived and/or modified sequence
atggccgaagagaagaaactgaagctctcaaacacagtgctcccatcggagagcatgaaggtagtggcggagagcatgggcattgctcagatccaagaggagacctgtcaattgctcactgacgaggttagctacaggattaaggagatcgcccaagacgcactgaagttcatgcacatgggtaaaagacagaaactcactacctccgatattgactatgcattgaagttgaaaaacgtcgagcccttgtacgggtttcatgcgcaagaatttatcccgttccgattcgcttcgggagggggtagagagctttatttttacgaggagaaggaggtggatttgtcggacataatcaataccccattgccgagggtacctctagatgtatgcttaaaagctcattggttgtccatagaaggctgtcagcctgctattccagagaacccccctcccgctcccaaggagcagcagaaggcggaagcaaccgagcccttaaaatcagccaaacccggacaagaagaggatggccctcttaaaggtaaaggtcaaggcgcaaccactgccgacggcaagggcaaagagaaaaaagcacccccactgctcgagggcgcacccttaagactaaaaccaagaagtatacacgagttgagcgtggagcaacagttgtactataaggaaatcactgaggcttgtgtagggtcctgcgaagccaaacgcgctgaggcattgcagagtatagctacggaccccggactctaccagatgctgcccagattttctacctttattagtgaaggggtgagggtgaatgttgttcagaacaaccttgctctgctgatttatttaatgcgcatggtcaaagccttaatggacaatcctaccttatacctggagaagtacgttcacgagttgataccagcagtaatgacatgcattgtttcccgccaactctgtcttagacctgacgtcgacaatcattgggctttgcgagatttcgccgctcggctcgttgcacaaatatgtaagcatttttcgaccacaacaaacaatatccaatcacggatcaccaagactttcactaagtcgtgggtggacgaaaagaccccatggacaacccgatacggctccatcgccggtcttgcagagctcggccacgacgtcatcaagactttaattcttcccagactgcagcaagaaggcgaaaggattagaagtgtacttgacggaccagttctgtctaacatcgataggattggagcagaccatgtccagagtctccttctcaaacactgtgctcccgttctggcaaagttaagacccccacccgataaccaagatgcatacagggctgagttcggatctctcggcccactgctctgcagccaagtggttaaagcacgcgctcaggcagccctgcaggcccagcaggttaataggacaacactgactataacccagccacgaccaaccctgactctgagtcaagccccacaacctggacccaggaccccgggtcttctgaaagtgccgggttccattgcactgcccgtacagactctggttagtgctcgggctgccgcacccccacagccctccccccctcctacgaaattcatcgtgatgtcttcgagcagcagtgcccctagcactcaacaggtgctgagtcttagtacttccgctcctggctccggctctactaccacttcccccgtcaccacaaccgtgccctccgtgcagccaatcgtgaaactggtcagtacggccaccaccgccccaccatccactgcaccgagcggacccggatcagttcagaaatatattgtggtgtctctcccacccacaggcgaagggaagggaggcccaacgagccacccttcaccagtgcctcctcccgcttccagtcccagccccctgagcggatctgctctctgtggaggaaagcaggaagcgggagacagcccacctccggctcccggtactcccaaagcaaatggaagtcagcctaactcgggatcgccccagcccgctccctag

SEQ ID NO: 158172 - DNA, 2034 bp, Artificial Sequence
  derived and/or modified sequence
atggctgaagaaaaaaaacttaaactgtctaacactgtactgccatcagagtccatgaaggtcgttgccgagagcatgggtattgcgcagattcaggaagaaacttgccagttactaacagatgaagtctcatataggatcaaagagatcgcacaggatgctctcaaattcatgcacatgggtaagagacagaagctgacaacgtctgatattgattacgcccttaagttgaaaaacgtagagcccctttacggcttccatgcacaggagtttataccattcaggttcgcatccggaggcggaagagagttgtacttctatgaggaaaaggaggtggatctaagcgatatcattaacaccccccttccacgagtgccactagatgtgtgtttaaaagcacactggctgagcatcgagggttgtcagcctgccatcccagagaatccccctcccgcacccaaggaacaacagaaggccgaggccacggaacccttgaagtctgccaagcctggacaagaagaggacggcccactgaaagggaaagggcaaggagcaacaaccgcagacgggaaaggaaaggaaaaaaaggcaccacctctcctggagggcgcaccactccgcctcaagccaaggagcattcacgagctgtcagtggagcagcagctgtactacaaagaaataacagaggcttgtgtcggatcctgtgaggctaaacgggcagaagctctccaaagtattgcaaccgaccccggactgtaccagatgctaccacgcttctctacattcataagcgagggagtgcgcgtgaatgtggttcaaaacaacttggcattactcatctacctgatgcgcatggtaaaagccctgatggataacccaactctttatttagagaaatacgtgcacgagcttattccggctgtgatgacctgtatcgtgagccgtcagctatgcctgcgcccagacgttgacaatcattgggccctgagagatttcgcagccagactcgtggcccagatctgcaagcacttttccacgacaacgaacaacatccagtcacggattaccaagacttttacaaagtcctgggtggatgaaaagaccccatggaccactcgatacggatcaatcgcgggattagcagagctggggcatgatgtcattaaaaccctgattctcccccgactacagcaagaaggagagaggatccgctctgtccttgacgggcctgttttgagtaatattgacagaatcggtgccgatcacgtgcagtctctgctgcttaaacattgcgcaccggtactcgcaaaactccgccctcccccagataaccaggacgcatatagggccgagttcggctccttgggccctctgctctgctcccaggtggtcaaagctagggcacaggctgctctgcaggctcagcaggtgaaccgaactactttaacaataacccagcctaggcccaccctaacgttatctcaggcgcctcagcctggtcccagaaccccgggacttctgaaggtacccggatctatcgccctgcctgtccagaccttagtgagcgccagagccgctgcccctcctcaaccttcccccccacctactaaattcattgtgatgagtagctccagttcagccccaagtacccaacaagtccttagcttatctactagtgccccaggatccgggagcacaaccactagccctgttaccaccacagtaccaagtgttcagcccattgtgaaactggtgagcaccgctacaaccgccccaccatccacagcccctagcgggcctgggagcgtgcagaaatatatcgtcgtgtctctccctcctacaggtgaaggcaagggcggaccgacatcacatccaagtcctgtgccaccacccgcttcttctcctagccccctgtctggaagcgccctctgtggaggcaagcaagaagcaggtgactcacccccaccagctccaggcacgccaaaggctaacggcagccagccgaacagtggttctccacaaccagccccatag

SEQ ID NO: 158173 - DNA, 768 bp, Artificial Sequence
  derived and/or modified sequence
atggcagaagagaagaagcttaagctgtccaacactgtgttaccaagcgaaagcatgaaagtcgtggcggaaagtatgggtatcgctcaaatacaggaagagacctgccaactcctaaccgatgaggtttcctacaggattaaggagatcgcacaggatgctctgaaatttatgcatatgggtaaacggcaaaaacttacaacttctgatattgattacgcgttgaagctgaagaatgtcgaacctttgtacggcttccatgcacaagagtttataccattcaggttcgcctccggcggtggaagagaactctatttctacgaggagaaagaggtggacctgtccgacattatcaatacccccttgccacgtgtgcccctggatgtgtgtctgaaggctcattggctgagcattgagggatgccaaccagctattcccgagaatccccctcccgcacccaaagagcagcagaaggcagaggccacagaaccactcaaaagtgcgaaacccggacaggaggaggatggccctttaaagggaaaagggcagggcgctacgacagccgatgggaaaggaaaggaaaagaaagccccaccattgctggagggagcacctctccgcctgaaacctcgcagcattcacgagcttagcgtggagcagcaactatattataaagagatcaccgaggcctgtgtggggtcgtgcgaagcaaagagagctgaggccctccaaagtatcgctactgatccaggactctatcagatgtag

SEQ ID NO: 158174 - protein, 349 aa, Artificial Sequence
  derived and/or modified sequence
MSKSKDDAPHELESQFILRLPPEYASTVRRAVQSGHVNLKDRLTIELHPDGRHGIVRVDRVPLASKLVDLPCVMESLKTIDKKTFYKTADICQMLVSTVDGDLYPPVEEPVASTDPKASKKKDKDKEKKFIWNHGITLPLKNVRKRRFRKTAKKKYIESPDVEKEVKRLLSTDAEAVSTRWEIIAEDETKEAENQGLDISSPGMSGHRQGHDSLEHDELREIFNDLSSSSEDEDETQHQDEEDINIIDTEEDLERQLQDKLNESDEQHQENEGTNQLVMGIQKQIDNMKGKLQETQDRAKRQEDLIMKVENLALKNRFQAVLDELKQKEDREKEQLSSLQEELESLLEK

SEQ ID NO: 158175 - DNA, 2310 bp, Artificial Sequence
  derived and/or modified sequence
acttccgtttttgctgggtaggcgacccggacggagggccggcgaggtgcggggtctggtgatgcgagctgcgcctctcggcaagatttcgcgctgcccatcccgggccctttcatcagtaatcggtagtggatcactctgccaagcggcaggaagaattaaggaaacgacaaggagacgctcggctctctcccgcttggctccttgcggcctcctcttcccttcgctccggcccggtgaaactgaacttataatcgtcactggattgtaagtacccgaggcgaagagagctcgctgagccctgattttttgagtgtctttgttccgggagagtttgtgagttgaaagtatctctgctgggctttctgggccgaaaaccgttccgggggagccgccatttgctttcctgttccctagctagctagctagctctctccgcgttgtccggcagcggcacctagaggttgggacttggcattgcatctgatttaatgaacttaagtctgtgaataagcctttgtgttaacgactggtattcggtcacagcatatttagagaaaagacttggagcttaaataaaaactaaggcaaaatagacgcttagctgctgatctacagagaacttcttgtaattaaaagatttcaattcatagcaaactggtgttttaaactattgcagtagctggaactttttagtgtaaccagcatttattggagaagtgaatcacaaggaaataaagatgagtaaaagcaaagatgatgctcctcacgaactggagagccagtttatcttacgtctgcctccagaatatgcctctactgtgagaagggcagtacagtctggtcatgtcaacctcaaggacagactgacaattgagttacatcctgatgggcgtcatggaatcgtcagagtggaccgtgttccattggcctcaaaattagtagacctgccctgtgttatggaaagcttgaaaaccattgataaaaaaactttttacaagacagctgatatctgtcagatgcttgtatccacagttgatggtgatctctatcctcctgtggaggagccagttgctagcactgatcctaaagcaagcaagaaaaaggataaggacaaagagaaaaagtttatctggaaccacggaattactctgcctctaaagaatgtcaggaagagaaggttccggaagacagcaaagaagaaatatattgaatctccagatgttgaaaaagaagtgaaacgattgctgagtacagatgctgaagctgttagtactcggtgggaaataattgccgaagatgaaacaaaggaggcagaaaatcaaggcctggatatctcttctccaggaatgtctggtcacaggcagggccatgactcattagaacatgatgagcttcgggagatattcaatgacctcagcagcagcagtgaggatgaagatgagacccagcatcaagatgaagaagatataaacatcattgacacggaggaagatctggagagacagctacaggacaagctaaatgaatcagatgaacagcaccaggaaaatgaaggaaccaatcagctggttatgggaattcagaagcagattgacaacatgaaaggcaagctccaagagacccaggacagggcaaaacgacaagaggatctcatcatgaaagtggaaaatctggctctcaagaacagatttcaggctgtactggatgagctcaaacaaaaggaagaccgagaaaaggagcaactcagctctttgcaagaggagctagaatcactcctagagaagtaaaaagaactgatatttaatttcagtcttcagactggtcagcattagaaaattcttggctttattgtactgggtattaagaccttgctcttcctagtccttttaatgctgtgtgttctgttaagttctttcatttgtttgtaattttgtttttcagcaaatttatattgttttgctaggtgttcatcctataagaagcaggattgtataggcagaaaaatgattgtaggaaagttgcaggattagcggaatgtatggttcaaccttaattatagcttcattgcaggactttactgtttctccattttctagaagctgctgttgctgctttgtgatgacgtgagatcaataagaagaacctagtctagagacaatgatgctagtttgcatatgttttcctatgcaataattgttttcccagttattcaaagcagctttctatatgtagagatgcaaattattaagttgtttccaatacaataaataaaagcatctgtttttcactttaaaaaaaaaaaaaaaa

SEQ ID NO: 158176 - DNA, 1050 bp, Artificial Sequence
  derived and/or modified sequence
atgagcaagagcaaggacgacgccccccacgagctggagagccagttcatcctgagactgccccccgagtacgccagcaccgtgagaagagccgtgcagagcggccacgtgaacctgaaggacagactgaccatcgagctgcaccccgacggcagacacggcatcgtgagagtggacagagtgcccctggccagcaagctggtggacctgccctgcgtgatggagagcctgaagaccatcgacaagaagaccttctacaagaccgccgacatctgccagatgctggtgagcaccgtggacggcgacctgtacccccccgtggaggagcccgtggccagcaccgaccccaaggccagcaagaagaaggacaaggacaaggagaagaagttcatctggaaccacggcatcaccctgcccctgaagaacgtgagaaagagaagattcagaaagaccgccaagaagaagtacatcgagagccccgacgtggagaaggaggtgaagagactgctgagcaccgacgccgaggccgtgagcaccagatgggagatcatcgccgaggacgagaccaaggaggccgagaaccagggcctggacatcagcagccccggcatgagcggccacagacagggccacgacagcctggagcacgacgagctgagagagatcttcaacgacctgagcagcagcagcgaggacgaggacgagacccagcaccaggacgaggaggacatcaacatcatcgacaccgaggaggacctggagagacagctgcaggacaagctgaacgagagcgacgagcagcaccaggagaacgagggcaccaaccagctggtgatgggcatccagaagcagatcgacaacatgaagggcaagctgcaggagacccaggacagagccaagagacaggaggacctgatcatgaaggtggagaacctggccctgaagaacagattccaggccgtgctggacgagctgaagcagaaggaggacagagagaaggagcagctgagcagcctgcaggaggagctggagagcctgctggagaagtag

SEQ ID NO: 158177 - DNA, 1050 bp, Artificial Sequence
  derived and/or modified sequence
atgtcaaaatccaaggatgatgccccacacgagctggagagccaatttatactgcgattgccgccagaatacgcatctactgtgcgcagagccgtgcagagtggccatgtcaatctcaaggatcggctaaccatcgagttgcatcctgacggcagacatggaatcgtacgcgttgacagggttcccctggcttccaagttagtggatctgccttgcgtgatggagagtctcaagactatagataaaaagactttttataagaccgctgatatatgccagatgttggtgtcaaccgtggatggtgacttgtaccctcccgtggaggagccagtggcgtcaaccgatcctaaggcgtctaagaagaaggataaggataaggagaagaagttcatctggaatcacggcatcaccctgccccttaaaaacgtgcgtaaaaggcggttcaggaagaccgccaaaaagaagtatattgagtcacccgatgtggagaaagaggtgaagcggctactgtccactgacgctgaggcggtgtccactagatgggaaatcattgcagaggatgaaaccaaggaagcagagaaccagggcctcgacataagtagccccggcatgagcgggcacaggcaggggcacgacagcctcgaacatgatgaattgcgcgaaatctttaatgacttaagctccagtagtgaagatgaggacgaaactcaacaccaggatgaggaagacattaatatcattgacactgaggaggatctggaacgccaactgcaagacaagctgaatgagtctgacgaacagcatcaggaaaacgaaggtaccaaccagctggtgatggggatccagaaacaaattgacaacatgaaggggaagctgcaagagacccaggaccgggctaaacggcaggaggaccttatcatgaaggtggagaatttggctctaaaaaatcgtttccaggccgtcctagatgagctgaagcaaaaggaagatcgcgagaaagaacagctttccagcctccaggaagaattagaaagcctactggagaagtag

SEQ ID NO: 158178 - DNA, 1050 bp, Artificial Sequence
  derived and/or modified sequence
atgagcaagagcaaggatgatgcccctcatgagctggagagccagttcatcctgcggctgcccccagaatatgccagcacagtgagaagagctgtgcagagcggccacgtgaacctgaaggaccggctgaccatcgagctgcacccagatggaagacatggaattgtgcgggtggacagagtgcccctggccagcaagctggtggacctgccctgtgtgatggagagcctgaagaccatcgacaagaagaccttctacaagacagctgacatctgccagatgctggtgtccacagtggatggagacctgtacccacctgtggaggagcctgtggccagcacagaccccaaggccagcaagaagaaggacaaggacaaggagaagaagttcatctggaaccacggcatcaccctgcccctgaagaatgtgaggaagaggcgcttcaggaagacagccaagaagaagtacatcgagagcccagatgtggagaaggaggtgaagaggctgctgagcacagatgctgaggccgtgtccacccgctgggagatcatcgccgaggatgagaccaaggaggccgagaaccagggcctggacatcagcagccctggcatgagcggccaccggcagggccatgacagcctggagcatgatgagctgcgggagatcttcaatgacctgagcagcagcagtgaagatgaagatgagacccagcaccaggatgaggaggacatcaacatcatcgacacagaggaggacctggagcggcagctgcaggacaagctgaatgaaagtgatgagcagcaccaggagaatgaaggcaccaaccagctggtgatgggcatccagaagcagattgacaacatgaagggcaagctgcaggagacccaggaccgggccaagaggcaggaggacctgatcatgaaggtggagaacctggccctgaagaaccgcttccaggccgtgctggatgagctgaagcagaaggaggaccgggagaaggagcagctgagcagcctgcaggaggagctggagagcctgctggagaagtag

SEQ ID NO: 158179 - DNA, 1050 bp, Artificial Sequence
  derived and/or modified sequence
atgagcaagagcaaggacgacgccccccacgagctggagagccagttcatcctccgtctgcctcctgagtacgcgtccacagtacgcagggccgtgcagtctggccacgtgaatctgaaggatagactcacaatagaactgcatcccgatggaaggcatggtattgtccgagtcgaccgcgtcccattagctagcaagctggtcgacctcccttgcgtaatggaaagccttaagacaatcgacaaaaagacgttttacaagactgcggacatatgccaaatgctcgtttctacagttgacggcgatttatatccacccgtggaggagcccgtggcgtcgactgaccctaaagcatcaaaaaaaaaagacaaggacaaggagaagaagttcatttggaatcacggcattacgcttcccttgaagaacgttcggaagcgaaggtttaggaaaacagcgaagaaaaaatatattgagtctcctgacgtggagaaagaagtcaaaagactgttgagtaccgatgccgaggcggtttccacccgctgggagataattgcagaggatgagacaaaggaggcggaaaaccaagggttggacatatcctctcccggcatgtccggacaccggcaagggcatgattccctcgaacacgatgagctgagagagattttcaacgatttatccagcagcagcgaagacgaagacgagactcagcaccaggacgaagaagacattaacattatcgatacggaagaagatctggaacgccagctccaagataagcttaacgaaagtgacgaacagcatcaggagaatgagggaaccaaccaacttgttatgggcattcagaaacaaattgacaacatgaagggtaagctacaggagacacaggacagagcgaaacgacaggaagatctgattatgaaagttgagaatttggctctgaaaaatcgcttccaggcagtactggacgagctcaagcagaaggaagatcgagagaaagaacagctgtcatctcttcaggaggaactcgaatccctgctagagaaatag

SEQ ID NO: 158180 - DNA, 1050 bp, Artificial Sequence
  derived and/or modified sequence
atgtcaaaatcaaaggacgatgcaccccacgaactggagtctcagttcatcctccgcctccctccagagtacgcctccacagttcggagagccgtgcagtcaggacatgtcaatttgaaagacagactgaccatcgaacttcaccctgatggccgacacggcatcgtccgagtggatagggttccgttggccagtaagcttgtggatctgccctgtgtgatggagagtctgaaaactatagacaagaaaactttctataaaacagctgacatttgccaaatgttagtttctactgtggacggggacctctatccacccgtggaggagcccgtggcatctacggatcctaaagccagtaagaagaaggacaaggataaagagaaaaagtttatctggaatcatggcattaccctgcctcttaagaatgtgaggaagcgccgattcaggaagaccgccaaaaagaaatacatcgaatcccccgatgttgaaaaggaggtcaaacggctgctctccacagacgcagaggctgtgtccacccggtgggaaatcatcgctgaagatgaaactaaggaagcagagaaccagggtctggacatttcttcccccggaatgtctggtcaccgccaaggacatgactccttggaacacgacgaactgcgcgaaattttcaatgatcttagtagttcttctgaggacgaagatgaaacgcagcaccaggacgaagaagatattaatataatagacactgaggaggacctggaacgccagctgcaggacaagctgaacgaaagcgacgagcagcaccaggagaacgaggggacaaaccagctggtgatggggatccagaaacagatcgataacatgaaagggaaattgcaagagactcaggacagggctaaacgtcaggaagatctgattatgaaagtcgagaacttagccctgaagaaccgattccaggccgtcctggatgagcttaagcagaaggaggatcgggaaaaagagcagctgagtagtctgcaggaggagctcgagagcctattggagaagtag

SEQ ID NO: 158181 - DNA, 2274 bp, Artificial Sequence
  derived and/or modified sequence
gcgacccggacggagggccggcgaggtgcggggtctggtgatgcgagctgcgcctctcggcaagatttcgcgctgcccatcccgggccctttcatcagtaatcggtagtggatcactctgccaagcggcaggaagaattaaggaaacgacaaggagacgctcggctctctcccgcttggctccttgcggcctcctcttcccttcgctccggcccggtgaaactgaacttataatcgtcactggattgtaagtacccgaggcgaagagagctcgctgagccctgattttttgagtgtctttgttccgggagagtttgtgagttgaaagtatctctgctgggctttctgggccgaaaaccgttccgggggagccgccatttgctttcctgttccctagctagctagctagctctctccgcgttgtccggcagcggcacctagaggttgggacttggcattgcatctgatttaatgaacttaagtctgtgaataagcctttgtgttaacgactggtattcggtcacagcatatttagagaaaagacttggagcttaaataaaaactaaggcaaaatagacgcttagctgctgatctacagagaacttcttgtaattaaaagatttcaattcatagcaaactggtgttttaaactattgcagtagctggaactttttagtgtaaccagcatttattggagaagtgaatcacaaggaaataaagatgagtaaaagcaaagatgatgctcctcacgaactggagagccagtttatcttacgtctgcctccagaatatgcctctactgtgagaagggcagtacagtctggtcatgtcaacctcaaggacagactgacaattgagttacatcctgatgggcgtcatggaatcgtcagagtggaccgtgttccattggcctcaaaattagtagacctgccctgtgttatggaaagcttgaaaaccattgataaaaaaactttttacaagacagctgatatctgtcagatgcttgtatccacagttgatggtgatctctatcctcctgtggaggagccagttgctagcactgatcctaaagcaagcaagaaaaaggataaggacaaagagaaaaagtttatctggaaccacggaattactctgcctctaaagaatgtcaggaagagaaggttccggaagacagcaaagaagaaatatattgaatctccagatgttgaaaaagaagtgaaacgattgctgagtacagatgctgaagctgttagtactcggtgggaaataattgccgaagatgaaacaaaggaggcagaaaatcaaggcctggatatctcttctccaggaatgtctggtcacaggcagggccatgactcattagaacatgatgagcttcgggagatattcaatgacctcagcagcagcagtgaggatgaagatgagacccagcatcaagatgaagaagatataaacatcattgacacggaggaagatctggagagacagctacaggacaagctaaatgaatcagatgaacagcaccaggaaaatgaaggaaccaatcagctggttatgggaattcagaagcagattgacaacatgaaaggcaagctccaagagacccaggacagggcaaaacgacaagaggatctcatcatgaaagtggaaaatctggctctcaagaacagatttcaggctgtactggatgagctcaaacaaaaggaagaccgagaaaaggagcaactcagctctttgcaagaggagctagaatcactcctagagaagtaaaaagaactgatatttaatttcagtcttcagactggtcagcattagaaaattcttggctttattgtactgggtattaagaccttgctcttcctagtccttttaatgctgtgtgttctgttaagttctttcatttgtttgtaattttgtttttcagcaaatttatattgttttgctaggtgttcatcctataagaagcaggattgtataggcagaaaaatgattgtaggaaagttgcaggattagcggaatgtatggttcaaccttaattatagcttcattgcaggactttactgtttctccattttctagaagctgctgttgctgctttgtgatgacgtgagatcaataagaagaacctagtctagagacaatgatgctagtttgcatatgttttcctatgcaataattgttttcccagttattcaaagcagctttctatatgtagagatgcaaattattaagttgtttccaatacaataaataaaagcatctgtttttcacttta

SEQ ID NO: 158182 - protein, 1621 aa, Artificial Sequence
  derived and/or modified sequence
MEWVLAEALLSQSRDPRALLGALCQGEASAERVETLRFLLQRLEDEEARGSGGAGALPEAAREVAAGYLVPLLRSLRGRPAGGPDPSLQPRHRRRVLRAAGAALRSCVRLAGRPQLAAALAEEALRDLLAGWRAPGAEAAVEVLAAVGPCLRPREDGPLLERVAGTAVALALGGGGDGDEAGPAEDAAALVAGRLLPVLVQCGGAALRAVWGGLAAPGASLGSGRVEEKLLVLSALAEKLLPEPGGDRARGAREAGPDARRCWRFWRTVQAGLGQADALTRKRARYLLQRAVEVSAELGADCTCGPQEGNGPSLFWWSERKKDELLKFWENYILIMETLEGNQIHVIKPVLPKLNNLFEYAVSEENGCWLFHPSWHMCIYKRMFESENKILSKEGVIHFLELYETKILPFSPEFSEFIIGPLMDALSESSLYSRSPGQPIGSCSPLGLKLQKFLVTYISLLPEEIKSSFLLKFIRKMTSRHWCAVPILFLSKALANVPRHKALGIDGLLALRDVIHCTMITHQILLRGAAQCYLLQTAMNLLDVEKVSLSDVSTFLMSLRQEESLGRGTSLWTELCDWLRVNESYFKPSPTCSSIGLHKTSLNAYVKSIVQEYVKSSAWETGENCFMPDWFEAKLVSLMVLLAVDVEGMKTQYSGKQRTENVLRIFLDPLLDVLMKFSTNAYMPLLKTDRCLQLLLKLLNTCRLKGSSAQDDEVSTVLQNFFMSTTESISEFILRRLTMNELNSVSDLDRCHLYLMVLTELINLHLKVGWKRGNPIWRVISLLKNASIQHLQEMDSGQEPTVGSQIQRVVSMAALAMVCEAIDQKPELQLDSLHAGPLESFLSSLQLNQTLQKPHAEEQSSYAHPLECSSVLEESSSSQGWGKIVAQYIHDQWVCLSFLLKKYHTLIPTTGSEILEPFLPAVQMPIRTLQSALEALTVLSSDQVLPVFHCLKVLVPKLLTSSESLCIESFDMAWKIISSLSNTQLIFWANLKAFVQFVFDNKVLTIAAKIKGQAYFKIKEIMYKIIEMSAIKTGVFNTLISYCCQSWIVSASNVSQGSLSSAKNYSELILEACIFGTVFRRDQRLVQDVQTFIENLGHDCAANIVMENTKREDHYVRICAVKFLCLLDGSNMSHKLFIEDLAIKLLDKDELVSKSKKRYYVNSLQHRVKNRVWQTLLVLFPRLDQNFLNGIIDRIFQAGFTNNQASIKYFIEWIIILILHKFPQFLPKFWDCFSYGEENLKTSICTFLAVLSHLDIITQNIPEKKLILKQALIVVLQWCFNHNFSVRLYALVALKKLWTVCKVLSVEEFDALTPVIESSLHQVESMHGAGNAKKNWQRIQEHFFFATFHPLKDYCLETIFYILPRLSGLIEDEWITIDKFTRFTDVPLAAGFQWYLSQTQLSKLKPGDWSQQDIGTNLVEADNQAEWTDVQKKIIPWNSRVSDLDLELLFQDRAARLGKSISRLIVVASLIDKPTNLGGLCRTCEVFGASVLVVGSLQCISDKQFQHLSVSAEQWLPLVEVKPPQLIDYLQQKKTEGYTIIGVEQTAKSLDLTQYCFPEKSLLLLGNEREGIPANLIQQLDVCVEIPQQGIIRSLNVHVSGALLIWEYTRQQLLSHGDTKP

SEQ ID NO: 158183 - DNA, 5130 bp, Artificial Sequence
  derived and/or modified sequence
atggagtgggtgctcgcggaagcgctgctctcgcagagccgggacccccgggccctgcttggggcgctgtgccaaggggaggcatccgcggagcgcgtggagacgctgcgcttccttctgcagcggctcgaggacgaggaggcgcgcggcagcgggggcgcaggcgcgctcccggaggcggcgcgcgaggtggctgcagggtacctcgtgccactgctgcggagcctgcgcggacgccccgcgggcggcccggaccccagtctgcagcctcgccaccgccggcgcgtgctgagggcggcgggcgcggccctgcgctcgtgcgtccgcctggccgggcgtccgcagctggcggccgcgctggctgaggaggcgctgcgcgatctgctcgccgggtggcgcgcgcctggcgccgaggctgccgtggaagtgctagcagccgtcgggccatgtttgcggccccgcgaggacgggccgctactggagcgcgtggcggggaccgccgtcgccctggcgctgggcgggggcggggacggggatgaggccgggcctgccgaggacgcggcggcgctggtggccgggcgactgctgccagtgctggtccaatgtggcggggcggcgctgcgggccgtgtggggcgggctggccgcgcctggggcgtccctggggtccggccgcgtagaggagaagctgctggtcctgagcgccctggccgagaagctgttgcccgagcccggcggcgaccgcgcccgcggcgcgcgcgaggcgggcccggacgcccggcgctgctggcgcttctggaggacggtgcaggcggggctgggccaggcggacgccctgacgcgcaagcgagcgcgctacctgctgcagagggcggtggaggtgtcggcggagctgggggccgactgcacctgcgggccccaggaaggaaacggcccaagtctgttttggtggtctgagaggaaaaaagatgagcttctaaagttttgggaaaattatattttaattatggagactttagaaggaaatcagatacatgttataaagccagttttaccaaagctaaacaatctgtttgaatatgcggtgtcagaggaaaatggatgttggctctttcacccatcctggcatatgtgtatttataaaagaatgtttgaaagtgaaaacaaaatcctgtccaaagaaggtgttatccattttttggagctgtatgaaacaaagattcttccattttcaccagaattttctgagtttattattggaccattaatggatgcgctttcagagagctctctgtatagcaggtccccaggccagccaataggaagctgttctccattgggactgaaattacagaagtttttagtcacttatatttctcttcttccagaagaaataaagagtagcttcctattgaagtttattcggaagatgacaagtaggcattggtgtgctgttcccattttgtttctatctaaggctttggcaaatgtcccaagacataaggccctgggtatagatgggcttcttgctctcagggatgttattcattgcactatgatcacacatcagattctcctgagaggggcagcccaatgctaccttcttcaaacagctatgaatttgctagatgtggagaaagtgtcactttctgatgtctcaacttttctcatgtctctgagacaagaggaatccttaggacgaggaacttcattgtggacagagctgtgtgactggctacgtgttaatgaaagctattttaagccatcccctacgtgtagctccattggacttcacaagacatctttaaatgcttatgtaaagagcattgttcaagagtatgttaagtcatctgcttgggaaacaggagaaaactgctttatgcctgattggtttgaagccaagcttgtttctctgatggtcttgctggctgtggatgtggaaggaatgaagactcagtatagcggaaagcagagaacagagaatgtattgcggatattcttagaccctcttctggatgtgcttatgaagtttagtaccaatgcctacatgcccttgctgaagactgacagatgcctccagctgctgttgaagctgttgaacacatgcaggttgaaaggttccagtgcccaagatgatgaggtgtctactgttcttcagaactttttcatgtctactacagagagcatttctgaatttattctcagaagacttactatgaatgagctaaatagtgtttcagatctggatcgttgccatttatacctgatggtgttaactgagcttataaatctgcatttgaaggttgggtggaaaaggggtaaccctatctggagagttatttctcttttgaaaaatgcatccattcagcatcttcaagagatggacagtggacaggagccaacagttggaagtcagattcagagagtagtgagcatggctgccttggccatggtgtgtgaggccatagaccagaagcctgagctgcagctggactctctccatgctgggcccctggaaagcttcctttcctctcttcagctcaatcagacgctgcagaagccccacgcagaggagcagagcagttatgctcaccccttggagtgcagcagtgttttggaagaatcgtcatcttcccaaggatggggaaaaatagttgcacaatatattcatgatcaatgggtgtgcctctctttcctgttgaaaaaatatcacacccttataccaaccacagggagtgaaattctggaaccgtttctacctgccgttcagatgccaataaggactttgcagtctgcactagaagccctcacagttctttcttctgatcaagttttaccagtgttccattgcttgaaagtgttggttcccaagcttctgacttcctctgaatcactctgcatagagtcttttgacatggcgtggaaaattatatcttctttaagcaacactcagctgatattctgggctaatttaaaagcttttgttcagtttgtttttgataacaaagttcttaccattgctgccaaaatcaagggccaggcatatttcaaaataaaagagattatgtacaagataattgaaatgtctgctataaagactggagtcttcaatacactgataagttactgctgtcagtcttggatagtgtctgcttcaaatgtgtcccaaggatctttatcaagtgctaaaaattatagcgaacttatccttgaggcttgtatatttggaactgtgtttaggcgtgatcaaagacttgttcaggatgtacagaccttcatagaaaaccttggacatgactgtgcggcaaatattgttatggaaaatactaagagagaagaccattatgtgagaatttgtgctgtcaaattcctgtgtttattagatggctccaatatgtcccacaagttgtttattgaggatcttgcaatcaagctattagataaagatgaattagtgtccaagtccaaaaaacgctactatgtgaattctctacagcacagagtgaaaaaccgagtgtggcagactctgctggtacttttccctagacttgaccagaatttcttgaatggaattattgacaggattttccaggctggtttcaccaacaatcaagcatccataaaatattttatagaatggattattatattgattcttcataaattccctcaatttcttccaaagttctgggattgtttttcttatggtgaagaaaatcttaaaacaagcatttgtacgtttttagcagttttatcacatttagacattattactcaaaatattccagaaaagaaactaattctgaagcaagcccttatagttgtgctgcagtggtgtttcaatcacaattttagtgttcgactgtatgctttagttgctcttaagaaactctggactgtgtgtaaagtgttaagtgttgaagaatttgatgccctgactcctgtgattgaatccagcctccatcaagtggaaagcatgcacggagcagggaatgccaagaagaattggcaacgcattcaggagcatttcttttttgcaacatttcacccactcaaggattattgtctagagaccatattttacatccttccacgcctttcaggccttattgaagatgaatggatcaccattgataaatttaccagattcactgatgttcctttagctgcgggatttcagtggtacctttctcaaactcaacttagtaaactaaaaccaggtgactggtctcagcaagacataggtactaatttggtcgaagcagataaccaagcggagtggaccgacgttcagaagaagattatcccgtggaacagtcgtgtttccgacttagacctggagctcctgtttcaggatcgtgctgccagacttggaaagtcaattagtagactcatcgttgtggcctcgctcatcgacaaaccgaccaatttaggaggactgtgcaggacctgtgaggtatttggggcttcagtgctcgttgttggcagccttcagtgtatcagcgacaaacagtttcagcacctcagtgtctctgcagaacagtggcttcctctagtggaggtaaaaccacctcagctaattgattatctgcagcagaagaaaacagaaggttataccatcattggagtggaacaaactgccaaaagtttagacctaacccaatattgctttcctgagaaatctctgctcttgttgggaaatgaacgtgagggaattccagcaaatctgatccaacagttggacgtttgtgtggaaattcctcaacagggcattatccgctccctgaatgtccatgtgagtggagccctgctgatctgggagtacaccaggcagcagctgctctcgcacggagataccaagccatgatgtgccttccttagtgaactgctgctgctgttcagacttttttaaaaaaaactatttggactaaagaaacagattctgaaatttattgtgataatttgtatttcttttttcttgcaatttaatgccaaaagtttgccatgtgccttaaacatattactatatattttcccctttaataaacactttttgttaaattgtattcttcctttaataaaatattttaagcaattgtggaaataaaacaatggattttttaagagagaa

SEQ ID NO: 158184 - DNA, 4866 bp, Artificial Sequence
  derived and/or modified sequence
atggagtgggtgctggccgaggccctgctgagccagagcagagaccccagagccctgctgggcgccctgtgccagggcgaggccagcgccgagagagtggagaccctgagattcctgctgcagagactggaggacgaggaggccagaggcagcggcggcgccggcgccctgcccgaggccgccagagaggtggccgccggctacctggtgcccctgctgagaagcctgagaggcagacccgccggcggccccgaccccagcctgcagcccagacacagaagaagagtgctgagagccgccggcgccgccctgagaagctgcgtgagactggccggcagaccccagctggccgccgccctggccgaggaggccctgagagacctgctggccggctggagagcccccggcgccgaggccgccgtggaggtgctggccgccgtgggcccctgcctgagacccagagaggacggccccctgctggagagagtggccggcaccgccgtggccctggccctgggcggcggcggcgacggcgacgaggccggccccgccgaggacgccgccgccctggtggccggcagactgctgcccgtgctggtgcagtgcggcggcgccgccctgagagccgtgtggggcggcctggccgcccccggcgccagcctgggcagcggcagagtggaggagaagctgctggtgctgagcgccctggccgagaagctgctgcccgagcccggcggcgacagagccagaggcgccagagaggccggccccgacgccagaagatgctggagattctggagaaccgtgcaggccggcctgggccaggccgacgccctgaccagaaagagagccagatacctgctgcagagagccgtggaggtgagcgccgagctgggcgccgactgcacctgcggcccccaggagggcaacggccccagcctgttctggtggagcgagagaaagaaggacgagctgctgaagttctgggagaactacatcctgatcatggagaccctggagggcaaccagatccacgtgatcaagcccgtgctgcccaagctgaacaacctgttcgagtacgccgtgagcgaggagaacggctgctggctgttccaccccagctggcacatgtgcatctacaagagaatgttcgagagcgagaacaagatcctgagcaaggagggcgtgatccacttcctggagctgtacgagaccaagatcctgcccttcagccccgagttcagcgagttcatcatcggccccctgatggacgccctgagcgagagcagcctgtacagcagaagccccggccagcccatcggcagctgcagccccctgggcctgaagctgcagaagttcctggtgacctacatcagcctgctgcccgaggagatcaagagcagcttcctgctgaagttcatcagaaagatgaccagcagacactggtgcgccgtgcccatcctgttcctgagcaaggccctggccaacgtgcccagacacaaggccctgggcatcgacggcctgctggccctgagagacgtgatccactgcaccatgatcacccaccagatcctgctgagaggcgccgcccagtgctacctgctgcagaccgccatgaacctgctggacgtggagaaggtgagcctgagcgacgtgagcaccttcctgatgagcctgagacaggaggagagcctgggcagaggcaccagcctgtggaccgagctgtgcgactggctgagagtgaacgagagctacttcaagcccagccccacctgcagcagcatcggcctgcacaagaccagcctgaacgcctacgtgaagagcatcgtgcaggagtacgtgaagagcagcgcctgggagaccggcgagaactgcttcatgcccgactggttcgaggccaagctggtgagcctgatggtgctgctggccgtggacgtggagggcatgaagacccagtacagcggcaagcagagaaccgagaacgtgctgagaatcttcctggaccccctgctggacgtgctgatgaagttcagcaccaacgcctacatgcccctgctgaagaccgacagatgcctgcagctgctgctgaagctgctgaacacctgcagactgaagggcagcagcgcccaggacgacgaggtgagcaccgtgctgcagaacttcttcatgagcaccaccgagagcatcagcgagttcatcctgagaagactgaccatgaacgagctgaacagcgtgagcgacctggacagatgccacctgtacctgatggtgctgaccgagctgatcaacctgcacctgaaggtgggctggaagagaggcaaccccatctggagagtgatcagcctgctgaagaacgccagcatccagcacctgcaggagatggacagcggccaggagcccaccgtgggcagccagatccagagagtggtgagcatggccgccctggccatggtgtgcgaggccatcgaccagaagcccgagctgcagctggacagcctgcacgccggccccctggagagcttcctgagcagcctgcagctgaaccagaccctgcagaagccccacgccgaggagcagagcagctacgcccaccccctggagtgcagcagcgtgctggaggagagcagcagcagccagggctggggcaagatcgtggcccagtacatccacgaccagtgggtgtgcctgagcttcctgctgaagaagtaccacaccctgatccccaccaccggcagcgagatcctggagcccttcctgcccgccgtgcagatgcccatcagaaccctgcagagcgccctggaggccctgaccgtgctgagcagcgaccaggtgctgcccgtgttccactgcctgaaggtgctggtgcccaagctgctgaccagcagcgagagcctgtgcatcgagagcttcgacatggcctggaagatcatcagcagcctgagcaacacccagctgatcttctgggccaacctgaaggccttcgtgcagttcgtgttcgacaacaaggtgctgaccatcgccgccaagatcaagggccaggcctacttcaagatcaaggagatcatgtacaagatcatcgagatgagcgccatcaagaccggcgtgttcaacaccctgatcagctactgctgccagagctggatcgtgagcgccagcaacgtgagccagggcagcctgagcagcgccaagaactacagcgagctgatcctggaggcctgcatcttcggcaccgtgttcagaagagaccagagactggtgcaggacgtgcagaccttcatcgagaacctgggccacgactgcgccgccaacatcgtgatggagaacaccaagagagaggaccactacgtgagaatctgcgccgtgaagttcctgtgcctgctggacggcagcaacatgagccacaagctgttcatcgaggacctggccatcaagctgctggacaaggacgagctggtgagcaagagcaagaagagatactacgtgaacagcctgcagcacagagtgaagaacagagtgtggcagaccctgctggtgctgttccccagactggaccagaacttcctgaacggcatcatcgacagaatcttccaggccggcttcaccaacaaccaggccagcatcaagtacttcatcgagtggatcatcatcctgatcctgcacaagttcccccagttcctgcccaagttctgggactgcttcagctacggcgaggagaacctgaagaccagcatctgcaccttcctggccgtgctgagccacctggacatcatcacccagaacatccccgagaagaagctgatcctgaagcaggccctgatcgtggtgctgcagtggtgcttcaaccacaacttcagcgtgagactgtacgccctggtggccctgaagaagctgtggaccgtgtgcaaggtgctgagcgtggaggagttcgacgccctgacccccgtgatcgagagcagcctgcaccaggtggagagcatgcacggcgccggcaacgccaagaagaactggcagagaatccaggagcacttcttcttcgccaccttccaccccctgaaggactactgcctggagaccatcttctacatcctgcccagactgagcggcctgatcgaggacgagtggatcaccatcgacaagttcaccagattcaccgacgtgcccctggccgccggcttccagtggtacctgagccagacccagctgagcaagctgaagcccggcgactggagccagcaggacatcggcaccaacctggtggaggccgacaaccaggccgagtggaccgacgtgcagaagaagatcatcccctggaacagcagagtgagcgacctggacctggagctgctgttccaggacagagccgccagactgggcaagagcatcagcagactgatcgtggtggccagcctgatcgacaagcccaccaacctgggcggcctgtgcagaacctgcgaggtgttcggcgccagcgtgctggtggtgggcagcctgcagtgcatcagcgacaagcagttccagcacctgagcgtgagcgccgagcagtggctgcccctggtggaggtgaagcccccccagctgatcgactacctgcagcagaagaagaccgagggctacaccatcatcggcgtggagcagaccgccaagagcctggacctgacccagtactgcttccccgagaagagcctgctgctgctgggcaacgagagagagggcatccccgccaacctgatccagcagctggacgtgtgcgtggagatcccccagcagggcatcatcagaagcctgaacgtgcacgtgagcggcgccctgctgatctgggagtacaccagacagcagctgctgagccacggcgacaccaagccctag

SEQ ID NO: 158185 - DNA, 4866 bp, Artificial Sequence
  derived and/or modified sequence
atggagtgggtgctggcagaggctttactctcccagtctcgcgatccacgagcactgttgggagcactgtgtcagggcgaagcatcggctgagcgcgtagagaccctgcgctttctgttgcagagacttgaagatgaggaagctagaggaagtgggggggcaggcgccttgccggaagccgctcgggaggtcgctgcggggtacttagtgccattattacgatctctccgggggagacccgccgggggaccagatccatccctgcagcccaggcacagacggagagtgctcagggccgccggtgcagcgctgcgctcctgtgtgcgcctggctggacgtccacagctcgcagctgccttggcagaggaggccctgagagatctgctggccgggtggagggctcctggtgctgaggccgcagtggaagtgctggcagccgtcggtccttgtttgcgcccccgggaggacggccctttactggagcgcgtcgctggcaccgctgtagcccttgcgttagggggaggtggtgacggtgacgaggccggtcccgccgaggatgccgcagccctcgtggccggaagactcttgccagttcttgtgcagtgtggtggcgccgccttacgagcagtttggggcggactagccgctccgggggcttccctcggctccggtcgagtggaggaaaaactgctcgtgttgagtgcactcgccgagaagttactacccgagccaggaggagacagagctcgcggtgccagggaggctggtcctgacgcacggcgctgctggcggttctggagaacagtgcaggcaggtcttggccaagcagatgctctcacacgcaaacgcgccagatacttattgcaacgggccgtggaggtcagcgctgagttgggagccgattgtacatgcggacctcaggaaggaaatggaccgtcgctgttctggtggagcgagaggaaaaaggacgagcttttaaagttctgggagaactatatcctcatcatggagacgttagagggcaaccagatccacgtaatcaaaccagtgctgccaaaacttaataacctgtttgaatacgccgttagcgaagagaacgggtgttggctgtttcatcccagctggcacatgtgcatatacaagaggatgttcgagagcgaaaacaagatcctgtctaaggaaggagtgattcatttcctcgagctgtacgaaacaaaaatattgcccttttctccagagttctctgagtttatcattgggcccctgatggacgcactgagcgagagttctctgtattccaggagtcctggccagccaattggctcttgctctccattgggcctcaagctccagaagtttctggtgacatacataagcctcctgcctgaagagattaagtcgtcatttctgctgaagtttatccggaaaatgacctcccgacactggtgtgcagttcccattctgttcctgagtaaggctttagccaacgtgccccgtcacaaggccctgggtatagacggtcttctcgccttaagagatgttatacactgtaccatgattacacatcaaattttattgcggggagctgcgcagtgctacttgctccagactgccatgaatctgctagatgtagaaaaggtaagtctgtctgatgtcagtacctttttaatgtctttaaggcaggaggaatctctcggacggggcacgtccctttggaccgagctctgtgactggcttcgcgtgaatgaatcatatttcaagcccagccctacctgttcttctattggattgcacaagacctctctgaatgcatatgtgaaatccatcgtccaagaatacgtgaagagctctgcctgggaaactggggagaattgtttcatgccagactggttcgaagcaaagctggtgagtcttatggtcctgctggccgtggatgtcgagggcatgaaaacacagtatagtgggaagcagcggactgaaaatgtactaaggatctttttggatccccttctcgatgtattgatgaagttttcaaccaacgcctacatgcctctgctgaaaactgatcgctgcttgcagttgctacttaagctcttgaacacatgtcgtctcaaggggagttccgctcaagatgatgaagtttccaccgtgttacagaacttcttcatgtcaactacagagtccatctctgagtttatacttagacggctaaccatgaatgagctaaattctgttagcgatctcgaccggtgccatctgtatcttatggtccttactgagcttatcaacctacatctgaaggtgggttggaaacggggtaacccgatctggcgtgtgattagcttgctaaaaaatgcttctatccaacacctgcaggaaatggacagcggccaggagcccaccgttggatcacagatccagagagtcgtgagtatggctgcgctcgccatggtttgtgaagctattgatcagaagccggagctgcagctggattcactgcatgccggaccactggagtcattcctgagttcccttcagctgaaccaaacactgcaaaagccccatgctgaagaacaaagctcttacgctcaccctcttgaatgcagctccgtcctggaggaatccagtagctctcagggatggggaaaaattgtcgctcaatatattcatgatcagtgggtctgtctcagcttcctgcttaagaagtaccataccctgattccaaccacgggatccgaaattttggagccctttttacccgccgtccagatgcccatcagaactttgcaatccgctctcgaggctctgaccgtcctgtccagcgaccaggtcttgcccgttttccactgcttaaaggtgctcgtccctaagctgctgacatcctcagagagcttatgtatagaaagtttcgacatggcatggaagatcattagctctctgtccaatactcagcttatattttgggcgaacctgaaagcattcgtccagtttgttttcgacaacaaagtgctgacaatagccgccaagattaaggggcaggcctacttcaagattaaagagattatgtacaagatcattgaaatgtcggcaatcaaaacaggagtcttcaacacactcataagttattgttgtcaatcttggattgtctccgcgtccaacgtgagccaggggagcctctcttcggcaaaaaattactcagaactgatactggaggcgtgtatctttggcacggtcttccgtcgggatcaaaggcttgttcaggacgtgcagacttttattgagaatctcggacacgactgtgccgccaatatcgttatggaaaacactaagcgggaggatcactacgtccgcatctgtgctgtgaagttcttgtgtttgttggatggttctaatatgtcccacaagctcttcattgaggacctagcaatcaaacttttggataaagatgagctggtgtccaaaagtaagaagcgctattatgtgaattccttgcaacatagagttaaaaacagagtgtggcagaccctccttgtgctctttccgcggctggaccagaattttctgaacggcattattgatcggatctttcaggctggctttacaaacaaccaggcaagtatcaagtactttattgaatggatcatcatcctaattcttcataagttccctcagttcctgccaaaattttgggattgctttagttacggggaggaaaatctgaagacatctatatgtaccttcctggctgtgctttctcatctcgacattatcacccaaaatatccccgagaaaaagcttatactgaagcaggccctcatcgtcgttctgcagtggtgtttcaatcacaattttagcgtgcggctgtacgcgcttgtggccctcaagaagctttggacagtctgtaaagtgctctcggtcgaggagtttgatgcacttacccccgtcattgaaagcagcctgcaccaagttgagtcaatgcacggagcagggaatgcaaaaaaaaactggcagagaatccaggagcactttttctttgccacattccatcctctgaaggactattgtctggagacgatcttctacattttgccacgcctgagtgggctgattgaggacgaatggataacaatcgacaagttcaccagattcaccgacgtgccattggccgccggatttcagtggtaccttagtcaaacccagctgtcaaaactgaaacctggcgactggtcccagcaggatattggaactaatttggtagaagctgacaatcaagccgagtggactgacgtgcagaaaaaaattattccctggaatagtagagtctccgatttggatctggagctgttattccaagatcgcgccgctcggctcggaaaatctattagccgactcatagtggttgcaagccttatagacaaaccaacaaatttaggaggtttgtgcagaacatgcgaagttttcggcgcttcagtcctggtggtggggagcctgcagtgcatttctgacaaacaattccaacacctgtctgtgtccgccgaacagtggctccccctggtagaagtgaaaccacctcagctaattgattacttacagcaaaaaaaaactgagggttatactattattggggtagagcagaccgcgaagagcctcgatctgacccaatactgttttcccgaaaagagcctccttttgctcgggaatgagagagagggaattccagccaatctcattcagcaacttgacgtttgtgtggagatccctcagcaaggcataatccgcagtctgaacgtgcacgtgtcgggcgcactgttaatatgggagtatactagacagcagctcctttcccatggggataccaagccctag

SEQ ID NO: 158186 - DNA, 4866 bp, Artificial Sequence
  derived and/or modified sequence
atggagtgggtgctggccgaggccctgctgagccagagccgggacccccgggccctgctgggcgccctgtgccagggcgaggccagcgctgagcgggtggagaccctgcgcttcctgctgcagaggctggaggatgaggaggcccggggcagcggcggggccggggccctgcctgaggccgcccgggaggtggccgccggctacctggtgcccctgctgcggagcctgcggggccggcctgctgggggccctgaccccagcctgcagcccaggcacagaagaagagtgctgcgggccgccggggccgccctgcggagctgtgtgcggctggccggccggccccagctggccgccgccctggccgaggaggccctgcgggacctgctggccggctggagggcccctggagctgaggccgctgtggaggtgctggccgctgtgggcccctgcctgcggcccagagaagatggccccctgctggagcgggtggccggcacagctgtggccctggccctgggcggcggcggagatggagatgaagctggccctgcagaagatgctgctgccctggtggccggccgcctgctgcctgtgctggtgcagtgtggcggggccgccctgcgggctgtgtggggcggcctggccgcccctggggccagcctgggcagcggccgggtggaggagaagctgctggtgctgagcgccctggccgagaagctgctgcctgagcccggcggggaccgggcccggggggcccgggaggccggcccagatgcccggcgctgctggaggttctggaggacagtgcaggccggcctgggccaggctgatgccctgaccaggaagagggcccgctacctgctgcagagagctgtggaggtgtctgctgagctgggcgctgactgcacctgtggcccccaggagggcaatggccccagcctcttctggtggagcgagaggaagaaggatgagctgctgaagttctgggagaactacatcctgatcatggagaccctggagggcaaccagatccacgtgatcaagcctgtgctgcccaagctgaacaacctgtttgaatatgctgtgtctgaagaaaatggctgctggctgttccaccccagctggcacatgtgcatctacaagaggatgtttgaaagtgagaacaagatcctgagcaaggagggcgtcatccacttcctggagctgtatgagaccaagatcctgcccttcagccctgagttcagcgagttcatcatcggccccctgatggatgccctgtctgagagcagcctgtacagccgcagccctggccagcccatcggcagctgcagccccctgggcctgaagctgcagaagttcctggtgacctacatcagcctgctgcctgaggagatcaagagcagcttcctgctgaagttcatcaggaagatgaccagccgccactggtgtgctgtgcccatcctcttcctgagcaaggccctggccaacgtgcccaggcacaaggccctgggcattgatggcctgctggccctgagagatgtgatccactgcaccatgatcacccaccagatcctgctgcggggagctgcccagtgctacctgctgcagacagccatgaacctgctggatgtggagaaggtgtccctgagtgatgtgtccaccttcctgatgagcctgcggcaggaggagagcctgggccggggcaccagcctgtggacagagctgtgtgactggctgcgggtgaatgaaagctacttcaagcccagccccacctgcagcagcatcggcctgcacaagaccagcctgaatgcctacgtgaagagcatcgtgcaggagtatgtgaagagcagcgcctgggagactggagagaactgcttcatgccagactggtttgaggccaagctggtgtccctgatggtgctgctggccgtggatgtggagggcatgaagacccagtacagcggcaagcagaggacagaaaatgtgctgcgcatcttcctggaccccctgctggatgtgctgatgaagttcagcaccaatgcctacatgcccctgctgaagacagaccgctgcctgcagctgctgctgaagctgctgaacacctgccgcctgaagggcagcagcgcccaggatgatgaggtgtccacagtgctgcagaacttcttcatgagcaccacagagagcatcagcgagttcatcctgcggcggctgaccatgaatgagctgaacagcgtgtctgacctggaccgctgccacctgtacctgatggtgctgacagagctgatcaacctgcacctgaaggtgggctggaagaggggcaaccccatctggagggtcatcagcctgctgaagaatgccagcatccagcacctgcaggagatggacagcggccaggagcccaccgtgggcagccagatccagagggtggtgtccatggccgccctggccatggtgtgtgaggccatcgaccagaagccagagctgcagctggacagcctgcatgctggccccctggagagcttcctgagcagcctgcagctgaaccagaccctgcagaagccccacgccgaggagcagagcagctatgcccaccccctggagtgcagctctgtgctggaggagagcagcagcagccagggctggggcaagatcgtggcccagtacatccatgaccagtgggtgtgcctgtccttcctgctgaagaagtaccacaccctcatccccaccaccggcagcgagatcctggagcccttcctgcctgctgtgcagatgcccatccgcaccctgcagagcgccctggaggccctgactgtgctgagcagtgaccaggtgctgcccgtcttccactgcctgaaggtgctggtgcccaagctgctgaccagcagcgagagcctgtgcatcgagagctttgacatggcctggaagatcatcagcagcctgagcaacacccagctgatcttctgggccaacctgaaggcctttgtgcagtttgtgtttgacaacaaggtgctgaccatcgccgccaagatcaagggccaggcctacttcaagatcaaggagatcatgtacaagatcatcgagatgtctgccatcaagacaggagtcttcaacaccctcatctcctactgctgccagagctggatcgtgtctgccagcaatgtgtcccagggcagcctgagcagcgccaagaactacagcgagctgatcctggaggcctgcatctttggaacagtgttccggcgggaccagaggctggtgcaggatgtgcagaccttcatcgagaacctgggccatgactgtgccgccaacatcgtgatggagaacaccaagcgggaggaccactacgtgcgcatctgtgctgtgaagttcctgtgcctgctggatggcagcaacatgagccacaagctgttcatcgaggacctggccatcaagctgctggacaaggatgagctggtgtccaagagcaagaagcgctactacgtgaacagcctgcagcaccgggtgaagaacagagtgtggcagaccctgctggtgctcttcccccggctggaccagaacttcctgaatggcatcatcgaccgcatcttccaggccggcttcaccaacaaccaggccagcatcaagtacttcatcgagtggatcatcatcctgatcctgcacaagttcccccagttcctgcccaagttctgggactgcttctcctatggagaggagaacctgaagaccagcatctgcaccttcctggccgtgctgagccacctggacatcatcacccagaacatccctgagaagaagctgatcctgaagcaggccctgattgtggtgctgcagtggtgcttcaaccacaacttctctgtgcggctgtatgccctggtggccctgaagaagctgtggacagtgtgcaaggtgctgtctgtggaggagtttgatgccctgacccctgtgattgagagcagcctgcaccaggtggagagcatgcatggagctggaaatgccaagaagaactggcagaggatccaggagcacttcttctttgccaccttccaccccctgaaggactactgcctggagaccatcttctacatcctgccccggctgagcggcctgattgaagatgagtggatcaccatcgacaagttcacccgcttcacagatgtgcccctggccgccggcttccagtggtacctgagccagacccagctgagcaagctgaagccaggggactggagccagcaggacatcggcaccaacctggtggaggccgacaaccaggccgagtggacagatgtgcagaagaagatcatcccctggaacagccgggtgtctgacctggacctggagctgctcttccaggaccgggccgcccggctgggcaagagcatcagccggctgattgtggtggccagcctgattgacaagcccaccaacctgggcggcctgtgcaggacctgtgaggtgtttggagcctctgtgctggtggtgggcagcctgcagtgcatcagtgacaagcagttccagcacctgtctgtgtctgctgagcagtggctgcccctggtggaggtgaagccaccccagctgattgactacctgcagcagaagaagacagagggctacaccatcattggagtggagcagacagccaagagcctggacctgacccagtactgcttccctgagaagagcctgctgctgctgggcaatgaaagagagggcatcccagccaacctgatccagcagctggatgtgtgtgtggagatcccccagcagggcatcatccgcagcctgaatgtgcacgtgtctggggccctgctgatctgggagtacacccggcagcagctgctgagccacggggacaccaagccctag

SEQ ID NO: 158187 - DNA, 4866 bp, Artificial Sequence
  derived and/or modified sequence
atggagtgggtgctggccgaggccctgctgagccagagccgggacccaagggccctgctgggagcactctgtcaaggcgaggcctcagcagagagagtggaaaccctccgcttcctcctgcagcgcctcgaagatgaggaagcacggggtagtggcggagcaggcgctttgcctgaagctgcgcgtgaggtggccgcaggctacctggttcccttgctgaggagtttgcgcggccgcccagcagggggccctgatccatcccttcagcccaggcaccgccgcagggtcttgagggccgctggtgcggctcttaggtcttgtgtccgactggctgggagaccacagctggccgctgccttggccgaggaagccttaagagacctcctcgctggctggcgcgctcctggtgccgaagccgctgtggaggtgctggctgccgtcggtccatgcctgcgaccccgggaggacggaccactactcgaacgggtcgcgggtaccgctgtggccctcgccctgggcggtggaggcgacggagatgaggctgggcccgccgaagatgccgcagctttggtcgcgggacgcctcctgcctgtgttggtccagtgtgggggggctgccttgcgggccgtttggggaggcctggctgccccaggtgcatctcttggaagtggcagggtcgaagagaagctactcgtattgtctgcactggctgagaaactccttcccgaaccaggtggggatagggcccgaggagcaagggaagctggacccgatgcacggcgctgctggagattttggaggacggttcaagcaggtttgggacaagctgatgcgctcacccgaaaaagggctagatatttgctgcaaagagccgtggaggtttccgcagagctgggggctgactgcacgtgtggtccgcaagagggcaatggaccttctctcttttggtggagcgagcgtaaaaaagacgaactcctcaagttctgggagaattacatcctcataatggaaacactcgagggcaaccagatccacgtcattaagccagttctgcccaaactgaataacttgtttgagtacgcggtgtcggaggagaacggctgctggctcttccacccatcgtggcatatgtgtatatacaaaaggatgttcgaaagtgagaacaaaattctcagtaaggagggcgtgatccatttcctagaattgtacgaaacaaaaattttgcctttttcacctgagttctcagagttcatcattggtccgttaatggacgcccttagtgaatcgagcctgtacagccggagccctggacagccaattgggagctgttctccactcggcctgaagctgcagaaatttctagtaacatacatatccctgttgcccgaggagataaagagtagctttttacttaaatttatccggaagatgacatcccgccactggtgcgcagtccccattttgttcctgtcaaaggccctagcgaatgtgcctcgtcacaaggcgctagggatcgacggtctgcttgccctccgcgatgtgatccactgcacaatgatcacccatcagattctgctgaggggagcggctcagtgctatctgctacagacggccatgaatctcctggacgtagaaaaggtgtccctgagtgacgtcagtacgttcctgatgtctctcagacaggaagagagccttgggcgaggtacttcgctgtggacagagctctgtgactggctgcgcgtgaacgagtcctacttcaagccaagcccaacatgcagttcaattgggctccacaagacttcattaaacgcctatgtgaagagtatcgttcaggaatatgttaagagttcagcatgggagacaggggagaattgtttcatgccggactggttcgaagccaaacttgtgtcactcatggtcctgctggccgtagatgttgaaggtatgaagactcagtactccggaaagcagaggacggaaaacgtgttgcgcatctttctggaccccttacttgacgtcctgatgaaattcagtacaaatgcctacatgcccttgctgaagacagacagatgtctccagttattgctgaagctcctgaatacatgccgtctgaaagggagtagtgctcaggatgatgaggtctccacggttctgcaaaactttttcatgtcaacaactgaatctatttctgagttcattctgagacgcctaaccatgaatgaacttaattcagtaagtgacttagacaggtgtcacctgtacttaatggtgctcaccgagctgattaatctacacctgaaggtgggttggaaaaggggcaacccaatctggcgcgtgattagcctcctcaaaaacgcctcaattcagcatctccaggaaatggatagtggacaagagccaactgttggctcccagattcagcgggttgtgtctatggctgccctggctatggtgtgcgaggccatcgatcagaagcctgagctacagttggatagtctccatgcagggcctctcgaatcctttctcagtagcctacagctcaaccagaccctgcagaagcctcatgccgaagagcagtcgtcctacgcccatcctctagagtgctcttccgtgctcgaggagtccagcagctcacaaggctgggggaagatcgtagcccagtacatacacgatcagtgggtgtgtctgtccttcctactgaaaaaatatcatactctaataccaacgacaggaagcgaaattctggagccgttcctcccagcagttcagatgccaattcggacgcttcagagtgcactggaggcattgaccgtgctgtcatcagatcaagtgctgcctgtttttcattgccttaaggtgttggtgcccaaattacttacatcaagcgaatctctgtgcatcgagtctttcgatatggcatggaagattatcagttccctaagcaatacccagttgattttctgggccaaccttaaagccttcgttcagttcgtcttcgacaacaaggttctgaccattgccgccaaaatcaagggacaggcctacttcaaaatcaaagagataatgtataagatcatagaaatgagcgctataaaaaccggcgtatttaatactttaatcagctactgctgtcagagctggatcgtgtccgcgagtaacgtctctcaaggcagtctgtcatcagcaaagaactattccgagttgatactagaagcctgtattttcgggactgttttccggcgcgaccagagacttgtgcaagatgttcagacattcattgaaaatctgggccatgattgcgcagctaacatcgtgatggagaataccaagcgggaagaccactacgtgcgtatctgtgctgttaaatttttgtgcctgctagacggtagtaatatgtctcataaactgttcattgaagaccttgcaatcaaactcctggataaggatgaactggtttcaaagtccaagaaaaggtactatgtgaatagccttcagcacagggtgaaaaacagggtctggcaaacactcctggtcctgttcccacggctcgatcagaactttttgaatggtataatagaccgcatctttcaagcgggctttacaaacaatcaagcaagcatcaagtacttcatcgagtggattattatccttatccttcacaagtttcctcagttcctccctaagttctgggactgcttcagctatggagaagaaaatttgaaaacttccatctgcacttttttagctgtgctgtcccatctggacatcattacccagaatataccggaaaaaaaacttatccttaagcaggctctcatcgtcgtcctccagtggtgtttcaaccacaacttctctgtgcgcctgtatgcactcgtggctcttaagaaactctggacagtgtgcaaggtcctctcagttgaggaattcgacgcgctcaccccagtgatcgagtcttctctgcatcaagtcgagagtatgcatggagccggcaacgcaaagaagaattggcagaggattcaggagcacttcttcttcgctacctttcatcctctaaaggactactgtctggaaaccatcttttatattctgcctcggttgagtggactgattgaagatgagtggataacaatagacaaatttactcggttcaccgatgtgccactggccgctggcttccagtggtacttgtcacagactcagctgagcaaacttaagcccggtgattggagccagcaggatattggaacaaatcttgtagaagccgacaaccaggccgagtggactgatgtgcagaaaaagattatcccctggaactcacgcgtctctgacttggatctggagctgctgttccaagaccgcgccgcacggctaggcaagagcatctctcgtcttatcgtcgtggcttctctgatagacaaacccaccaatttgggcgggctgtgccgcacgtgcgaagtcttcggggcttccgtcttggtggtgggaagtctccagtgcatctctgataaacagttccagcatttatcagttagcgcagagcaatggctacctctagttgaagtgaagccccctcaactgatcgactacctgcaacagaagaaaacggaaggttacacaattatcggagtggaacagactgccaaaagcttggatctgactcagtactgctttccagaaaagagccttttgctgctgggcaacgagcgagagggcataccagccaacctgattcagcagctggatgtctgcgtagaaatcccacagcagggcattattcgctccttgaatgttcatgtgagcggcgccttgcttatatgggaatacacccggcagcagttgctctcccacggggatactaaaccctag

SEQ ID NO: 158188 - DNA, 4866 bp, Artificial Sequence
  derived and/or modified sequence
atggagtgggttcttgccgaagcattgttaagtcagtcaagggaccctagagccctgctgggagccctctgtcagggagaggcgtcagccgagagggttgaaacgctcaggttccttctccagagactggaggacgaagaagctcgcggtagtggaggggctggggcattgccggaagcggctagagaggttgcggctggataccttgtgcctctccttcgatccctgcgcggacgccctgccggagggcctgacccttccctgcagcctcgtcacagacgacgagtactgcgggctgccggagcagccctacggtcttgtgtgcgattagcaggcaggcctcagctggccgcagccttagctgaagaggcactgcgtgacctgctggcagggtggcgggctcctggcgctgaagcagcggtggaagtgctggccgcagtcgggccttgtctgaggccccgagaggacgggcctctgctggagcgcgtagcaggaaccgctgtggctttggcactagggggaggaggtgatggtgacgaggcaggccctgctgaagatgctgctgccctggtagccggtaggctcctccccgtgctcgtccagtgtgggggagctgccctgagagccgtgtggggcggactggccgctcctggcgcatcattgggctcagggagagtggaagaaaagttgctcgttctgagcgcactggcagagaaactcttgccagagccagggggtgacagggccaggggggctcgggaagccggacccgacgcacgtcgctgttggaggttttggcgcaccgtccaggctggcctgggccaggcagatgcgttgaccaggaagcgcgcacggtacctgcttcagcgggctgtcgaggtgagcgccgagcttggggctgactgtacctgcggaccccaggagggaaacggaccctcccttttctggtggagcgagaggaaaaaagatgagctgcttaagttctgggagaactacattcttatcatggagacccttgaggggaatcagattcatgttatcaaacctgtcctgcccaagctcaacaacctttttgaatatgctgtgagcgaagagaacggctgctggctttttcatcccagttggcatatgtgtatctacaaacggatgttcgagtccgagaacaaaattttgagcaaggagggtgttatccactttttggagctgtacgaaacaaagatcctccccttctctcccgaattctcagagtttataatcggccctctcatggacgctctttctgagagcagtctgtatagtcggtccccaggacagcctataggctcttgttcccctttggggctgaagctgcaaaagttcctggtaacatacatctcgctcttgccagaagaaatcaagagctccttcctgttgaagttcatccgcaagatgacttccaggcactggtgtgctgttccaatcctcttcctgtccaaggccctggctaacgtgcccagacacaaggctctgggcatcgacggcttgcttgccctcagggacgtgattcactgtactatgatcacacaccagattttgcttcgcggtgctgcccagtgttacttgctgcagacagcgatgaacctgttagacgtggagaaagtctctttatccgacgtgtctaccttcctgatgagtttgaggcaggaggagtccctcgggcgtggaacgagcctctggaccgaactttgcgattggctgagggtcaatgagagttattttaagccgagcccgacctgctctagcataggtttacacaaaacttccttaaacgcgtacgttaagtcaatcgtccaagaatacgttaagtcatctgcctgggaaactggagagaactgctttatgcccgactggttcgaggcgaaactagtgtccctcatggtgttgctggcagtggacgtggaaggcatgaaaacacagtactctgggaaacagcgcaccgaaaatgttctgcgaatttttcttgacccacttctggatgtccttatgaagttttcaacgaacgcttatatgcccctcctgaaaaccgatcgttgtctgcaacttctactgaaactcctgaacacctgccgattgaaaggcagtagcgcccaggatgatgaagtgtcaaccgtgttacagaatttcttcatgagcaccaccgagagcatctcggaattcattctgcggagactgactatgaatgagctgaactcggtcagcgatctcgatcggtgtcacttgtacttgatggtgctgactgagctgattaacctccatctcaaggtgggatggaaaagaggcaaccccatatggagagttataagtcttcttaagaatgcctcaattcagcatctccaggagatggattcaggacaagagccaaccgtgggctcccaaattcaacgggtcgtttccatggctgctctggcgatggtgtgtgaggccatagaccagaagccagagttgcagctggatagtttgcatgcaggcccattggagagtttcttgagttcactgcagctaaatcagacgttgcagaaacctcacgctgaggagcagtcaagctatgctcatcccctagagtgctcgagcgtgttagaggagtcaagtagttcccagggatggggcaagatcgtcgcacaatatatccacgaccagtgggtctgcttaagtttcttgctgaaaaaataccacacccttataccaacaacaggctcagagattttagagccgtttctgcccgctgtgcagatgccgatcaggaccttacagtccgcactggaggcgttgaccgtgctcagcagcgatcaggtcttaccagtgttccactgcctcaaggtcttggttcctaaattgctcacctcctcagaaagcctgtgcatagagtcattcgatatggcatggaagataatttcttcactgtccaacacacagttgattttctgggctaatttgaaagcttttgttcagttcgtattcgataacaaggttttaaccatcgcagctaaaatcaagggacaggcttatttcaagatcaaagagattatgtacaagatcatcgagatgagcgccatcaaaacaggcgttttcaacaccctgatcagctactgttgccagtcctggattgtcagcgcttcgaacgtatcacagggcagcctgtcttccgctaagaattactccgaactgatattagaggcctgtatctttggcacagtctttcggcgtgaccagcgccttgtacaagatgtccagactttcatagagaacctcggtcatgactgcgcagcaaacattgtcatggaaaatacgaaaagggaagaccactacgttaggatctgtgcagtgaagttcctctgcctgttggatgggagcaatatgtcccacaaactgttcatagaagaccttgctatcaaactactggacaaggatgagctggtctcgaaatccaagaagcgatactacgtcaacagccttcagcaccgggtcaagaacagggtgtggcaaaccctccttgttctgtttcctcgtctagaccaaaactttctcaacggtattatcgacagaatcttccaggccggtttcacgaacaaccaagcatctatcaaatactttattgagtggatcatcatccttatcctacacaaattcccccagtttttacctaagttctgggactgtttctcctatggtgaggagaatctgaagacttccatctgcacttttctcgcagtgctttcccatctggatataattacccagaacattccagagaagaaactgattctcaagcaggcccttatcgttgtcctgcagtggtgcttcaatcataacttcagcgtcagactgtatgcattggtcgccctcaaaaaactctggaccgtttgcaaggtgctgtcagtcgaagaatttgacgccctcaccccagtcattgagtcatcactgcaccaggtcgaatctatgcatggggcaggaaatgccaagaaaaattggcagcgcatccaagagcactttttcttcgcgacattccatccattgaaggactattgtctcgagaccatattctatattctcccccgactcagcggactgatcgaggacgagtggatcacaattgataagtttacccgattcacagatgtgccgctggccgcaggatttcagtggtatctttctcagactcagctttcaaaactgaagcccggtgactggtctcagcaagacatcggcaccaatctcgtcgaggccgataaccaggcggaatggacagacgtccagaaaaagataatcccatggaattcgcgtgtgtctgacctggacctggagctgctgttccaagaccgagcagccagactggggaaatcgatctcccggctgatcgtcgtcgcaagtttgatcgataaacccacaaacctgggcggactatgcaggacatgcgaagtctttggagcgagcgtgcttgttgttggttctctgcagtgcatttcggataaacagttccagcacttgtcagtttctgccgagcaatggctgcccttggtggaggttaaacctccacagctgattgactacttgcagcaaaagaagacagagggatacactatcataggggtggaacagaccgccaaatctctagatctcacccagtattgctttccggaaaaatcactgttgcttcttggcaatgaacgagagggcatacctgccaatcttatccaacaactggatgtttgcgtggaaattccccagcagggcattatcaggagtcttaatgtgcacgtgagcggggcactcttgatttgggagtacactcgccagcagctgttgagccatggtgacaccaaaccctag

SEQ ID NO: 158189 - DNA, 4866 bp, Artificial Sequence
  derived and/or modified sequence
atggagtgggtgttggccgaagcgctgctctcgcagagtcgtgatccaagagccctattgggagctctctgtcaaggcgaagcatctgccgagcgcgttgagactctgcgttttctgctgcagagattagaagatgaagaggccaggggatcaggaggtgccggagccctaccggaggccgcaagagaggttgccgccggctatctggttcctctgttgcgctcactgcgggggaggccagcgggcggccccgaccccagcctccagccacgccatagacggagggtattaagagctgctggcgcagcgctgcggtcctgtgtgcgactggcgggccgcccacagttggccgcagcattagctgaggaagcattgcgcgatctgctggctggttggagagctcctggcgcagaggctgcagttgaggtactggccgcggttggaccgtgtctgcgcccacgtgaggacgggcccctgcttgaaagagtggccggaacagccgtggcactggccctgggaggcggtggtgacggcgacgaggccggcccagccgaagacgctgccgccctggtggccggacgcctactgccagttctcgttcagtgtggcggcgcagcgctgcgagccgtgtggggcggactggctgccccaggcgcttctctgggctccggtagagtagaggaaaagctactggttttgagtgcgttggcagagaaacttctgcccgagcccggcggtgatagggccaggggtgctagggaagctggcccagacgctaggagatgttggagattttggcggactgttcaagccggcctcggccaggctgatgccctaacgagaaagagggcacggtacctgttacagagggcagtcgaggtgagcgctgaactgggagctgattgtacttgcggccctcaagaaggcaacggacccagcctcttttggtggtccgaacggaaaaaggacgaactcctgaaattctgggagaattacatactcatcatggagacactcgagggaaatcagatccacgtgatcaagcccgtgcttccaaagctgaacaaccttttcgaatacgcggtaagtgaagagaacggatgctggctcttccatccaagctggcatatgtgcatatataaacgaatgttcgagagcgagaacaaaattctatctaaggagggagtcattcactttcttgaactatatgaaacaaaaatcttgcccttcagccccgaattttcagaattcattatcgggccgctgatggacgctctttcagaaagctcactatactctagatctcccggacagccaattggctcctgctccccactggggctgaaattgcagaaatttctggtcacttacatcagcctcttgccggaggaaattaagtcttctttcctgctgaaattcattagaaagatgacctccagacattggtgcgcggtacccattctgttcctcagcaaggctctggcaaacgtgccaaggcacaaagctctcgggatcgacgggctccttgcgcttagagatgtgatacactgtaccatgatcacgcaccaaattctgctccgcggggccgctcaatgttacctgttacagaccgcgatgaatctactggacgttgaaaaggttagtctctccgacgtgtctaccttcctgatgagcctcagacaagaggagtcactggggaggggaacttccctgtggaccgaactctgcgattggctgagggtgaatgagtcgtattttaaaccctccccgacctgctcctcaatcggtctccacaaaacatctctcaacgcctacgtgaaatccatcgtccaggagtacgtgaaatcttctgcttgggagacaggcgagaattgcttcatgcccgactggtttgaagctaaattagtgtctctgatggttcttctggcagtcgacgtggaggggatgaagacccagtatagcggaaaacagcgcactgaaaacgtcctcagaatatttctcgacccgctgctggacgtgttaatgaaattttccactaacgcttacatgcctctgttgaagaccgacaggtgcctgcagctcctgcttaagttattgaatacatgtcgattaaaagggagtagcgctcaggacgacgaggtaagcactgtgctgcagaatttcttcatgtccactactgagtccatctctgagtttatcctgcgccgtctgaccatgaacgaattaaatagcgtgagtgacttagatcgctgtcatctttacctgatggtgttgaccgaattgataaacctccacctcaaggtaggctggaaaagaggaaaccctatctggagagtgattagcctgctgaagaacgctagtattcaacatcttcaggagatggattctggccaagagcccacagtgggatcccaaatacaaagggtcgtgtctatggccgcactcgccatggtgtgtgaagccatcgaccagaagcctgagctgcagctggattctctgcacgcggggcccctggaaagttttctctcatctttacagctgaatcagacactgcagaaacctcatgccgaagagcagtccagttatgcgcatccactggaatgtagcagcgtgctggaagaatcatcatcttcacaggggtggggaaaaatcgtggcccagtacattcatgatcagtgggtttgtctgtcttttttgctgaaaaagtaccacaccctgatccccacaacagggagtgaaatcctggagccattccttccggcagtgcagatgccaattcgaacactgcagtcagcgctggaggccctgacagtgctgtcatctgaccaagtgcttcctgttttccactgcctgaaagtgctggtccctaaactgctgacctcaagtgaaagcctttgtatcgagtcttttgacatggcatggaaaattatctcttctctgagcaatactcagcttatcttttgggccaacctcaaggcctttgtacaattcgttttcgacaacaaggtgcttacgattgctgcaaagattaaaggccaagcatatttcaaaatcaaagaaattatgtataagatcattgagatgtccgccatcaaaaccggggtatttaacacgctgatcagttattgctgtcagtcatggatcgtgagcgcctcaaacgtgagccagggtagcttatcgtcagctaaaaattattctgaattgatacttgaggcttgtatcttcgggaccgtctttcgaagggaccagaggctggtacaggacgtccagacgtttatcgaaaacctgggccacgactgcgctgcaaatattgtgatggagaacactaagagagaggatcactatgttcgcatctgcgcagtgaaatttctgtgtctgctcgatggaagtaatatgagccataagctgtttattgaagatctggcaataaagctattggataaagacgagcttgtaagcaaatcaaaaaaaagatactatgtcaattccctgcaacacagggttaaaaatagagtgtggcaaacattactcgtcttgttccctcggctggaccaaaatttcctcaatggaatcattgacagaattttccaagccgggtttacaaacaaccaggcctcaattaaatacttcattgaatggattattattctcatcctgcacaagttccctcagttcctgccgaagttctgggactgtttctcctacggagaagagaacctaaaaacatcaatctgcaccttcctagccgtcttaagtcatctagacataattacacagaatatccctgagaagaaacttatacttaagcaagccctcatcgtcgtgttgcagtggtgctttaatcacaattttagcgttaggctctatgctctggtagcgctgaagaaactgtggacagtctgtaaggtcctgtcagtggaagaattcgatgcgctcactcctgtgatagagtccagcctacatcaagttgaaagcatgcacggagccggcaatgcgaaaaagaattggcaacgtatacaagagcacttcttctttgccacatttcaccccctaaaagactattgcctggagaccattttctacatactgccccgcctgtctggactcattgaggacgaatggattaccattgacaaatttacccgattcactgatgttcctctcgcagccggcttccaatggtatttgtcccagacccaactctctaagctgaaacccggcgactggtctcaacaggatataggaaccaatctggtagaggcggacaaccaagctgaatggaccgacgtgcagaagaaaatcataccatggaatagtcgcgtatccgatctcgatttggagttgctctttcaggatcgggccgcaaggctcggaaaatcaattagcaggctgatcgtggttgcttctctaattgacaagcccacaaatctaggcggcctctgcaggacgtgcgaggtgttcggagctagcgtgctggtggtgggttcgctgcagtgcatatcagacaaacaatttcaacatttgtcagtgtcggcagagcaatggctacccctagtggaagtcaagccaccccagcttattgactatctccagcagaagaaaaccgaggggtacactataatcggggtcgagcagacggccaagtctctagacttaacgcagtactgcttccctgaaaagtcgttactcctcctcgggaatgaaagggagggcatacctgcaaatttgatccagcagctggacgtctgcgtcgaaatacctcagcaagggatcatccgttctttgaatgtgcatgtcagtggtgctctcctcatttgggaatacactagacagcagttactatcgcatggggatacaaagccttag

SEQ ID NO: 158190 - DNA, 4866 bp, Artificial Sequence
  derived and/or modified sequence
atggaatgggtgcttgctgaggccctcctgtcacaaagcagagaccccagagcactgttaggcgcactgtgtcagggggaggccagcgcagagcgggttgaaaccctccggttcctgcttcaaagactcgaggacgaagaggctagaggttctggcggcgcgggggctcttcccgaagccgctcgggaggtcgctgcgggctatttggtccccttattacggagcctccggggacgccccgctggggggcccgatccatctctccagccgaggcatcgacgacgcgtgctgagagcagcaggcgccgcactccgaagttgtgtgcggctggctggcaggcctcagttggctgctgcgcttgccgaggaggctctccgcgatttgcttgccggttggcgcgctccaggtgccgaggccgctgttgaagttctagctgctgtggggccatgtctgcgaccacgcgaagacggtcctctgctggaacgcgtagcagggactgctgtggctctagccctggggggcggaggagatggagacgaggccggacctgctgaagatgctgctgcccttgtagcggggcgcctacttcccgtactagttcagtgcggaggggctgccttgcgtgcagtctggggcgggcttgcagccccaggtgctagcttaggaagtgggcgtgttgaagagaaacttttggttctctctgcgctggctgagaaattgctccccgaacctggtggagacagagcgcgcggcgccagagaagccgggcctgacgcaaggagatgttggaggttttggcggaccgtccaggctggactagggcaagctgatgcccttacacggaagagagctagatatctactacaacgggcagttgaagtgtcagctgagctcggggctgactgcacttgtggccctcaagaaggcaatggcccctctttgttttggtggtcagagaggaaaaaagatgagttgcttaaattttgggaaaactacattcttattatggaaaccctcgaaggcaatcagatacacgtcataaaacccgtgttaccaaaactgaataacttgtttgagtatgcagttagcgaagagaatggctgttggctctttcatccgtcctggcacatgtgtatctacaagcggatgttcgagagcgaaaacaagattttatcaaaagaaggggtgatccattttctggaactgtatgaaacaaagatcctgcctttttctcctgaatttagtgagttcatcatcggccctttaatggacgcccttagtgaaagctccctctacagccggagccctggccaacctataggatcatgctctcccttaggactcaaactccaaaaattccttgtcacctatatatccctcctgcccgaagagatcaagtcctccttcctcctcaagtttattcgcaaaatgaccagtcggcactggtgcgcagtaccaatcttgttcttatccaaggcgctagctaacgtgccccgccacaaagcactaggtatagacggactgctggcactgcgcgatgttatccattgtactatgataactcaccaaattctactcaggggtgctgcacaatgttatctcctccaaaccgcaatgaacctgttggatgttgaaaaagtatccttgtctgatgtctcaactttcctgatgtcacttagacaggaagagagtctcggtcgagggacgtctctgtggaccgagttgtgtgattggctccgcgtgaacgagtcatacttcaaaccctcgcctacttgtagcagcatagggctccataaaacgtccctgaatgcttacgtcaaatcaatcgtacaggaatacgtgaagagcagcgcatgggagacaggggaaaattgtttcatgcccgattggttcgaggctaagctagtaagcctgatggtgttgttggcagttgatgtggaaggaatgaagacacaatattctgggaagcaacgaacagagaatgtccttcggatctttttggacccattactggacgtgctgatgaagtttagtacaaacgcatacatgccgctcttaaaaaccgatagatgcctgcaactgctgcttaaactgttgaacacatgccgactgaaaggttcttctgcacaggatgatgaagtgtccaccgtcctgcaaaacttctttatgtctacaactgaaagcatctccgaatttatattgcggcgcctgaccatgaacgaattgaactctgtatcagacctggatcggtgtcatctctacctaatggtgctaaccgaactgattaatctgcacttgaaagttgggtggaaaagaggaaacccaatctggcgcgtgatttcacttttgaaaaatgcctccattcagcacctgcaggagatggactcaggacaagagcccactgtggggagccagatccaaagggtggtgagcatggccgccctcgcaatggtttgcgaagcaattgatcagaaaccagaactacaactcgattcactccacgccggccctctcgaaagctttttgtcttctctccaactcaaccagaccctccagaagccccacgctgaagaacagagtagctatgcacatccattggaatgctcatctgtgctggaggaaagcagtagcagtcagggatggggaaagattgttgcccaatacatacacgatcagtgggtatgcctgtctttccttctcaaaaagtatcacacgctgattccaaccacgggcagtgaaattcttgagcctttcctcccagcagtacaaatgccaattaggactttgcagagcgcccttgaggcactcactgtactctcttccgaccaggtgctccccgtgttccattgtttaaaagtgttggttccgaaactccttaccagttccgaatccttgtgtatagaatcctttgatatggcatggaaaattattagcagcctcagcaatacacagttgatcttctgggcgaatcttaaagcctttgttcagtttgtattcgacaataaagtactgacaattgccgcaaaaataaagggccaggcttactttaagataaaggagataatgtacaaaataatcgaaatgtctgctattaagacaggcgtctttaatacactgatatcatactgctgtcagagctggatcgtctccgcctctaacgtcagccaaggatcactatcatccgccaaaaattactcagaattaattctcgaagcttgtattttcggaacagtgtttagacgggaccagcggctggtccaagacgtgcaaacatttattgagaacctaggtcatgactgcgcagcaaacatcgtcatggagaataccaagagggaagaccattatgtgaggatctgcgcggtcaaattcctctgtctactcgacgggtcaaatatgtcccacaaattattcatcgaggatcttgccattaaacttttagacaaagatgagctagttagtaaatcaaagaaaaggtactacgttaattccctgcaacaccgcgtgaaaaatagagtttggcaaactcttcttgttcttttcccacggctggaccagaacttcttaaacggaatcatcgatcgaatcttccaagcaggattcacaaataatcaagctagtatcaagtacttcatcgaatggataattatcctcatcctgcacaagtttcctcagtttctgcccaagttttgggattgcttttcatacggggaggaaaatcttaaaactagcatttgtacgttccttgctgtattgtcacaccttgatataatcacacagaacatacccgagaaaaaactaatcttgaaacaggcccttatagtcgtgttacaatggtgcttcaatcacaacttctcagttcgcctgtacgccctcgtcgccttaaagaaactgtggaccgtctgtaaggtcctgtcagtggaagaattcgatgcgctcactcctgtgatagagtccagcctacatcaagttgaaagcatgcacggagccggcaatgcgaaaaagaattggcaacgtatacaagagcacttcttctttgccacatttcaccccctaaaagactattgcctggagaccattttctacatactgccccgcctgtctggactcattgaggacgaatggattaccattgacaaatttacccgattcactgatgttcctctcgcagccggcttccaatggtatttgtcccagacccaactgagtaagctcaagccaggggactggagccagcaggatatcggaacaaaccttgtcgaagcagataaccaggccgagtggactgatgtgcagaagaagattatcccgtggaacagtcgggttagtgatttggatttggaactcctctttcaagaccgtgccgcacgtctcggaaaaagtatatcaaggctgattgtcgtggcaagcctgatagataaacctaccaacttaggaggcctgtgcaggacctgtgaggtcttcggagccagcgtgcttgtagtgggttccttacagtgtatctccgataagcagttccaacatttgtccgtctctgctgagcaatggttacctttggtagaggtgaaacctccgcaattgatcgactacctccagcagaagaagaccgagggatatacaatcatcggcgttgagcagacagcaaaatctttggacttgacacagtactgctttcccgaaaaatctctgctactactaggcaacgaacgcgaaggaattcccgcaaatctaattcaacagctagatgtctgcgtcgaaatcccccagcaaggtatcattcggagccttaacgtgcacgtcagtggcgcactgttaatctgggaatacacgcgtcagcagctcctgtcacacggcgacactaaaccatag

SEQ ID NO: 158191 - protein, 605 aa, Artificial Sequence
  derived and/or modified sequence
MAAGQREARPQVSLTFEDVAVLFTRDEWRKLAPSQRNLYRDVMLENYRNLVSLGLPFTKPKVISLLQQGEDPWEVEKDGSGVSSLGSKSSHKTTKSTQTQDSSFQGLILKRSNRNVPWDLKLEKPYIYEGRLEKKQDKKGSFQIVSATHKKIPTIERSHKNTELSQNFSPKSVLIRQQILPREKTPPKCEIQGNSLKQNSQLLNQPKITADKRYKCSLCEKTFINTSSLRKHEKNHSGEKLFKCKECSKAFSQSSALIQHQITHTGEKPYICKECGKAFTLSTSLYKHLRTHTVEKSYRCKECGKSFSRRSGLFIHQKIHAEENPCKYNPGRKASSCSTSLSGCQRIHSRKKSYLCNECGNTFKSSSSLRYHQRIHTGEKPFKCSECGRAFSQSASLIQHERIHTGEKPYRCNECGKGFTSISRLNRHRIIHTGEKFYNCNECGKALSSHSTLIIHERIHTGEKPCKCKVCGKAFRQSSALIQHQRMHTGERPYKCNECGKTFRCNSSLSNHQRIHTGEKPYRCEECGISFGQSSALIQHRRIHTGEKPFKCNTCGKTFRQSSSRIAHQRIHTGEKPYECNTCGKLFNHRSSLTNHYKIHIEEDP

SEQ ID NO: 158192 - protein, 135 aa, Artificial Sequence
  derived and/or modified sequence
MAAGQREARPQVSLTFEDVAVLFTRDEWRKLAPSQRNLYRDVMLENYRNLVSLGLPFTKPKVISLLQQGEDPWEVEKDGSGVSSLGSKSSHKTTKSTQTQDSSFQGLILKRSNRNVPWDLKLEKPYIYEGRLEKK

SEQ ID NO: 158193 - DNA, 2555 bp, Artificial Sequence
  derived and/or modified sequence
ccggcgcgccgcggggtgagcggcgccgggcctgaggtcgcccagacgccgtcggggcggagccgggtcgcgaggctgcatcccggccggcggttccggagcctcgcggctggggaggcgcggcccgggacgctcgagcttagggagatctgccttctggagactgcgccgtcctcccgggagagccagaaagaggacatggctgctgggcagcgggaagcgaggccccaggtgtcactgacgtttgaggatgtggctgtgctgtttacccgagatgagtggagaaagctggccccttctcagagaaacttgtaccgggatgtgatgctggagaactataggaacctggtctcactggggctcccatttaccaaaccaaaagtgatctccctgttgcagcaaggagaagatccctgggaggtggagaaagacggttctggcgtctcctctctaggatcgaagagcagtcataaaaccacaaagtcaacgcaaacacaagactcttcatttcagggactgatactgaaaagatccaacaggaatgtaccttgggatttgaaattagaaaagccttacatatatgaaggcagattagagaaaaagcaggataaaaagggaagttttcagatagtttcagccacccacaaaaaaatccccactatagaaagaagccataaaaatactgaattgagccaaaacttcagcccaaagtcagtgcttattaggcaacagatacttcccagagaaaaaacaccaccaaaatgtgaaatacaaggaaacagcctcaaacagaattcacaattacttaatcaaccaaaaattacagcagataaacgctataaatgtagtctgtgtgaaaaaaccttcattaacacttcatcccttcgtaaacatgagaaaaaccatagtggagagaaactatttaagtgtaaagaatgttcaaaagcctttagccaaagttcagctcttattcaacatcaaataacgcatactggagagaaaccctacatatgtaaagaatgtgggaaagcctttactctcagtacatccctttataaacatctaagaacccatactgtggagaaatcctacagatgtaaagaatgtggtaaatccttcagccgaaggtcaggcctttttatacatcaaaaaattcatgctgaagaaaacccttgtaagtataatccgggtaggaaggcatctagttgcagcacatccctttctggatgtcaaagaattcattctagaaagaagtcctacttatgtaatgaatgtggcaacacctttaagtctagctcatcccttcgttatcatcagagaattcacactggagagaagccttttaaatgtagtgaatgtgggagagccttcagccagagtgcctctcttattcaacatgaaagaattcacaccggagaaaagccctatagatgcaatgaatgtgggaaaggctttacttctatttcacgacttaatagacaccgaatcattcatactggagagaagttttataattgtaatgaatgtggtaaagccttaagctcccactcaacacttattattcacgagcgaattcatactggagaaaaaccatgtaaatgtaaagtatgtggaaaagccttcagacagagttcagctctcattcaacatcagagaatgcatactggagaaagaccctataaatgtaacgagtgtgggaaaacattcaggtgtaactcatcacttagtaatcaccagagaattcatactggagagaaaccatatcgatgtgaggaatgtgggatatcttttggccaaagttcagctcttattcagcatcgaaggattcatacaggagaaaaaccctttaaatgtaatacatgtggaaaaacttttagacaaagctcatcacgtattgcacatcagagaattcatactggagagaaaccctatgaatgtaatacatgtgggaaacttttcaaccataggtcatcccttactaatcattataaaattcatatcgaagaggacccctagaaagtagatttgtatgtgtgaaagccttaaaccaaagctcatcgaagaatacatccttgagagagatgtaataaatgtaatggatgtgaaaaaaactgtaataatttagccctcattaggtatttaattccatggataaacctcagctatataatagatatgaggaaagtgtttgtgcctgtcagacacttaaaaaaataacctgagatgaagaatttacaattgaagacattgactttagccatttgtgaaatgggtttgctttttcccttttcctacagacgtatatgctagatgtcacgtgatcatcagaaacagatatccgagtgggtggggaggtgtgctttagatttctcattagaagaccaccaaactggtaatatttttatagcattttaatagcttgatcaaattgtacctttttagagaaaaggaccaaaataaaagaaaaatgaattatgaactacctctcagtctctggggtttgtccttttcctaccctgatgtcaaacttatgcatggatttcattaaaaaagaa

SEQ ID NO: 158194 - DNA, 1818 bp, Artificial Sequence
  derived and/or modified sequence
atggccgccggccagagagaggccagaccccaggtgagcctgaccttcgaggacgtggccgtgctgttcaccagagacgagtggagaaagctggcccccagccagagaaacctgtacagagacgtgatgctggagaactacagaaacctggtgagcctgggcctgcccttcaccaagcccaaggtgatcagcctgctgcagcagggcgaggacccctgggaggtggagaaggacggcagcggcgtgagcagcctgggcagcaagagcagccacaagaccaccaagagcacccagacccaggacagcagcttccagggcctgatcctgaagagaagcaacagaaacgtgccctgggacctgaagctggagaagccctacatctacgagggcagactggagaagaagcaggacaagaagggcagcttccagatcgtgagcgccacccacaagaagatccccaccatcgagagaagccacaagaacaccgagctgagccagaacttcagccccaagagcgtgctgatcagacagcagatcctgcccagagagaagaccccccccaagtgcgagatccagggcaacagcctgaagcagaacagccagctgctgaaccagcccaagatcaccgccgacaagagatacaagtgcagcctgtgcgagaagaccttcatcaacaccagcagcctgagaaagcacgagaagaaccacagcggcgagaagctgttcaagtgcaaggagtgcagcaaggccttcagccagagcagcgccctgatccagcaccagatcacccacaccggcgagaagccctacatctgcaaggagtgcggcaaggccttcaccctgagcaccagcctgtacaagcacctgagaacccacaccgtggagaagagctacagatgcaaggagtgcggcaagagcttcagcagaagaagcggcctgttcatccaccagaagatccacgccgaggagaacccctgcaagtacaaccccggcagaaaggccagcagctgcagcaccagcctgagcggctgccagagaatccacagcagaaagaagagctacctgtgcaacgagtgcggcaacaccttcaagagcagcagcagcctgagataccaccagagaatccacaccggcgagaagcccttcaagtgcagcgagtgcggcagagccttcagccagagcgccagcctgatccagcacgagagaatccacaccggcgagaagccctacagatgcaacgagtgcggcaagggcttcaccagcatcagcagactgaacagacacagaatcatccacaccggcgagaagttctacaactgcaacgagtgcggcaaggccctgagcagccacagcaccctgatcatccacgagagaatccacaccggcgagaagccctgcaagtgcaaggtgtgcggcaaggccttcagacagagcagcgccctgatccagcaccagagaatgcacaccggcgagagaccctacaagtgcaacgagtgcggcaagaccttcagatgcaacagcagcctgagcaaccaccagagaatccacaccggcgagaagccctacagatgcgaggagtgcggcatcagcttcggccagagcagcgccctgatccagcacagaagaatccacaccggcgagaagcccttcaagtgcaacacctgcggcaagaccttcagacagagcagcagcagaatcgcccaccagagaatccacaccggcgagaagccctacgagtgcaacacctgcggcaagctgttcaaccacagaagcagcctgaccaaccactacaagatccacatcgaggaggacccctag

SEQ ID NO: 158195 - DNA, 408 bp, Artificial Sequence
  derived and/or modified sequence
atggccgccggccagagagaggccagaccccaggtgagcctgaccttcgaggacgtggccgtgctgttcaccagagacgagtggagaaagctggcccccagccagagaaacctgtacagagacgtgatgctggagaactacagaaacctggtgagcctgggcctgcccttcaccaagcccaaggtgatcagcctgctgcagcagggcgaggacccctgggaggtggagaaggacggcagcggcgtgagcagcctgggcagcaagagcagccacaagaccaccaagagcacccagacccaggacagcagcttccagggcctgatcctgaagagaagcaacagaaacgtgccctgggacctgaagctggagaagccctacatctacgagggcagactggagaagaagtag

SEQ ID NO: 158196 - DNA, 1818 bp, Artificial Sequence
  derived and/or modified sequence
atggctgccggccagcgggaagcccgcccacaggtgagcctcacatttgaggacgtggcagtgctgttcacacgagacgagtggcgaaaactggccccgagtcaacgcaacttgtatcgcgacgttatgctagaaaattaccgaaacctagtgtctcttgggcttccatttaccaaacccaaggttattagcttactgcagcagggagaggacccttgggaggtggagaaggacggctctggtgtgagttctctgggttctaagtcgtctcataaaaccacgaagtctacacagacacaggacagcagtttccaaggactaattcttaagaggtctaatagaaacgtgccctgggatctaaaattggagaagccttatatttatgagggccggttagagaaaaagcaagataagaaaggatcctttcaaatcgttagtgcgactcacaagaagatcccaaccattgaaaggtcgcacaaaaataccgagctgagtcagaattttagcccaaaatctgttctcatacgtcaacagattctcccccgtgaaaagacgcccccaaagtgtgaaattcagggaaatagtctgaagcagaacagtcaactattgaaccaaccaaagatcactgctgacaaacgttacaagtgtagcctgtgcgaaaaaacctttattaatactagctcactccggaaacacgagaaaaatcattcgggagagaagctcttcaaatgtaaagaatgcagtaaggcctttagtcagtccagcgcattgatccaacatcagatcactcacacaggcgaaaagccctacatatgtaaagaatgcgggaaggcctttaccctctcaactagtctgtacaagcatcttaggacccacacggtcgaaaagagttatcgctgcaaagagtgcggcaaatctttttcaagaaggagcggcctgttcattcaccagaagattcacgccgaagaaaacccttgcaagtataacccggggcgaaaggcaagctcgtgcagtacttctttaagcggctgccagagaatacattccagaaagaagtcttacctctgcaacgagtgtgggaacaccttcaaatcctccagtagcctgagatatcatcagcggatacacaccggggagaagccatttaaatgttcagagtgtggacgcgcattcagtcagagcgcttctctaattcagcatgagcgaatccatactggggagaagccctacagatgtaacgagtgtggaaagggtttcactagcatatccagactaaaccgtcataggataatccacactggcgaaaaattctacaactgcaacgagtgtgggaaggccctatcatcccattccaccctgatcatccatgagcggatacataccggcgagaagccgtgcaagtgcaaagtgtgcggtaaggcattccgacagtcatctgcactgattcaacaccaacgcatgcataccggcgagcgtccttacaagtgcaacgagtgcggaaaaacatttcgatgtaactccagcctgagcaaccatcagcgcattcacacaggcgagaaaccttacagatgcgaagaatgtggcatttctttcggtcagtcatctgcattaattcagcaccggaggattcataccggtgagaagccctttaaatgcaatacctgcgggaagacgttccggcaatcatcttctcgaatagctcatcagcggatccatacaggtgaaaaaccatacgaatgcaatacgtgtggcaaactgttcaatcacaggtcaagtctgactaatcactacaaaattcatatcgaagaagacccctag

SEQ ID NO: 158197 - DNA, 408 bp, Artificial Sequence
  derived and/or modified sequence
atggctgcgggccagcgggaagcgcgaccgcaggtgtcactgaccttcgaagatgtggcagtgttattcacccgagatgagtggaggaagctggcccccagccagcggaatctctacagggatgtcatgctggagaattacaggaatctggtctccctgggactgcccttcacaaagcctaaagtcatttcactactgcagcaaggggaagatccttgggaggtcgaaaaagacggatctggagtatcttcccttgggagtaaatcttcacacaaaactacgaaatctacccagacacaggactcaagtttccagggcttaatcctgaaaaggtcgaacaggaacgtgccctgggatttgaagctggaaaagccctacatctacgaagggcgcctggaaaagaagtag

SEQ ID NO: 158198 - DNA, 1818 bp, Artificial Sequence
  derived and/or modified sequence
atggctgctggccagcgggaggcccggccccaggtgtccctgacctttgaagatgtggccgtgctcttcaccagagatgagtggaggaagctggcccccagccagaggaacctgtacagagatgtgatgctggagaactacagaaacctggtgtccctgggcctgcccttcaccaagcccaaggtgatcagcctgctgcagcagggcgaggacccctgggaggtggagaaggatggcagcggcgtgagcagcctgggcagcaagagcagccacaagaccaccaagagcacccagacccaggacagcagcttccagggcctcatcctgaagaggagcaacagaaatgtgccctgggacctgaagctggagaagccctacatctatgagggccgcctggagaagaagcaggacaagaagggcagcttccagatcgtgtctgccacccacaagaagatccccaccatcgagaggagccacaagaacacagagctgagccagaacttcagccccaagtctgtgctgatccggcagcagatcctgccccgggagaagaccccacccaagtgtgagatccagggcaacagcctgaagcagaacagccagctgctgaaccagcccaagatcacagctgacaagcgctacaagtgcagcctgtgtgagaagaccttcatcaacaccagcagcctgaggaagcatgagaagaaccacagcggggagaagctgttcaagtgcaaggagtgcagcaaggccttcagccagagcagcgccctgatccagcaccagatcacccacactggagagaagccctacatctgcaaggaatgtgggaaggccttcaccctgagcaccagcctgtacaagcacctgcggacccacacagtggagaagagctaccgctgcaaggaatgtgggaagagcttcagcagaagaagtggcctcttcatccaccagaagatccatgctgaggagaacccctgcaagtacaaccctggcaggaaggccagcagctgcagcaccagcctgagcggctgccagaggatccacagcaggaagaagagctacctgtgcaatgaatgtggcaacaccttcaagagcagcagcagcctgcgctaccaccagaggatccacactggagagaagcccttcaagtgcagtgaatgtggccgggccttcagccagagcgccagcctcatccagcacgagcgcatccacactggagagaagccctaccgctgcaatgaatgtgggaagggcttcaccagcatcagccggctgaacagacaccgcatcatccacactggagagaagttctacaactgcaatgaatgtgggaaggccctgagcagccacagcaccctcatcatccacgagcgcatccacactggagagaagccctgcaagtgcaaggtgtgtgggaaggccttccggcagagcagcgccctgatccagcaccagaggatgcacactggagagcggccctacaagtgcaatgaatgtgggaagaccttccgctgcaacagcagcctgagcaaccaccagaggatccacactggagagaagccctaccgctgtgaggagtgtggcatcagctttggccagagcagcgccctgatccagcaccggcgcatccacactggagagaagcccttcaagtgcaacacctgtgggaagaccttccggcagagcagcagccgcatcgcccaccagaggatccacactggagagaagccctatgagtgcaacacctgtgggaagctgttcaaccacaggagcagcctgaccaaccactacaagatccacatcgaggaggacccctag

SEQ ID NO: 158199 - DNA, 408 bp, Artificial Sequence
  derived and/or modified sequence
atggctgctggccagcgggaggcccggccccaggtgtccctgacctttgaagatgtggccgtgctcttcaccagagatgagtggaggaagctggcccccagccagaggaacctgtacagagatgtgatgctggagaactacagaaacctggtgtccctgggcctgcccttcaccaagcccaaggtgatcagcctgctgcagcagggcgaggacccctgggaggtggagaaggatggcagcggcgtgagcagcctgggcagcaagagcagccacaagaccaccaagagcacccagacccaggacagcagcttccagggcctcatcctgaagaggagcaacagaaatgtgccctgggacctgaagctggagaagccctacatctatgagggccgcctggagaagaagtag

SEQ ID NO: 158200 - DNA, 1818 bp, Artificial Sequence
  derived and/or modified sequence
atggccgccggccagcgggaggcccggccccaggtgagcctgacctttgaggacgtggcagtgctgtttaccagagacgagtggcggaagctggcaccctcccagcggaacctatatcgagatgtgatgctggagaattataggaacctggtgagtttgggactgcccttcactaagcctaaagtcatctctctcctacaacagggtgaggacccatgggaggtagagaaggacggctcaggcgtctcttcactggggagtaaatcctcccacaaaactactaaaagcactcagacccaggacagcagcttccaaggtctcatcctgaaaagatcgaaccgcaatgtgccttgggacctgaagttggaaaagccttatatctatgaagggaggctcgaaaagaagcaggacaagaaaggttcatttcagatcgtgtccgccactcataagaagattcccacgatcgagcggagccataagaataccgaacttagccagaatttctcaccaaagagtgtgttgatcagacaacagatcctgcctagagagaagacaccgccaaagtgtgaaatacaggggaattcactcaaacagaactcccaactgctgaaccagccaaaaattacagccgataaaagatacaaatgttctctgtgtgaaaagacatttattaacacaagctccctgcgcaagcacgaaaagaaccatagcggagaaaagctgtttaaatgtaaggaatgtagcaaagccttctcgcaaagttcagcactgatccagcatcagatcacccacacaggggagaagccgtacatctgcaaggaatgtggaaaagcttttacccttagtacaagcctctataagcatctgcggacgcacactgtggagaaatcgtatagatgcaaagagtgtggcaagtctttctcgcgacggtctggcctgttcatccatcagaagatccacgcagaggagaatccttgcaaatacaaccccgggcgcaaagcctcgtcttgcagcacatcactgagtggctgccaacgtatccatagtcgaaagaagtcttatctctgcaacgagtgtggtaacacgtttaagtcctctagcagtctgagataccatcagcgcattcacacaggagagaagcctttcaagtgttccgaatgcggccgcgctttctctcaaagtgcttctctcattcaacatgagcggattcacacgggagagaagccgtaccggtgtaacgaatgtggaaagggttttacctccatcagtaggctgaacaggcacagaattattcacaccggtgaaaaattttacaactgcaacgagtgtgggaaggctctgtcttcacattcgactttgataattcatgaaaggattcataccggtgagaagccttgtaaatgcaaagtatgcggaaaggcctttagacagagctcagccttgatccaacatcagaggatgcacaccggggagcgcccatacaagtgtaatgaatgcggaaagactttcagatgtaactcgtctctcagtaatcaccagagaatacatactggcgagaagccctatagatgcgaggagtgcgggatttcttttggacagtcgtccgccttgatccagcacaggcgcatacataccggtgagaaacctttcaagtgtaatacttgtgggaaaaccttcaggcagtcctcttctcggatagcccatcagcgaattcatacaggcgaaaagccttatgaatgcaacacatgtggcaagctgtttaaccatcgatcctctcttactaaccattataagatccacatcgaagaggacccttag

SEQ ID NO: 158201 - DNA, 408 bp, Artificial Sequence
  derived and/or modified sequence
atggccgccggccagcgggaggcccggccccaggtgagcctgaccttcgaggacgtggcggttttgtttaccagggacgagtggcgcaaacttgctcctagccagagaaacttgtaccgcgacgtgatgctcgaaaactataggaatctggtctcactgggtctgcccttcaccaagcccaaagtaatcagtctgttacagcagggagaggatccctgggaggtggagaaagacggatctggcgtttcctctctgggttcaaagagttcacataaaactacgaaatcgactcagactcaggattctagttttcaggggttgattctgaagcgatccaaccggaacgtcccctgggatctaaagctcgaaaagccctatatctatgagggacgcctggagaaaaaatag

SEQ ID NO: 158202 - DNA, 1818 bp, Artificial Sequence
  derived and/or modified sequence
atggccgcaggtcagcgtgaggctcgcccacaggtgagcctcacctttgaggacgttgcggttctgttcacccgggatgagtggaggaaactggctccttcacaacgtaacctttatcgggatgtgatgctggagaactataggaacctggtgtcactgggcttgcccttcaccaagcccaaggtgatcagcttactgcagcagggcgaggacccttgggaggtcgaaaaggacggcagcggcgtgtcctctctggggtcaaaatcttcacacaagactaccaagtctacccagacgcaagattcatcttttcaggggctgatactgaagagaagtaaccgcaacgtgccctgggatctgaagctagaaaagccttatatttacgaggggaggctcgagaagaagcaggacaaaaaagggtcttttcagattgtgtccgccactcataagaagatacccactatcgaacgctctcacaagaacactgaattgtcccaaaacttcagccctaagagcgtgctcatccggcagcagatccttcccagagaaaaaactcccccaaagtgcgagattcaaggcaactcgttgaagcaaaattctcaactgctcaatcagccgaaaatcacagcagataaacggtataaatgttctttatgcgagaaaacatttattaatacttcaagtctcaggaagcacgagaaaaatcattcaggcgaaaaactgttcaagtgtaaagaatgctcaaaggccttctctcagagcagcgccctcatacagcatcagattacccatactggagagaaaccgtacatttgcaaggaatgcgggaaagcctttacattgtccacttctctgtataagcatctgcgcacgcacaccgttgagaaaagttaccggtgtaaagagtgcggtaaatcttttagccggaggtccggcctgtttatacatcaaaaaattcacgctgaagaaaacccatgcaagtacaatcctgggcgtaaggccagttcttgcagtacaagcctatctggctgccagagaatccactctcgaaaaaagtcttacctatgcaatgagtgcggcaatacatttaagtccagttctagcctcaggtaccaccaacgaatccatactggcgaaaagccattcaaatgcagcgagtgtgggagggcattttctcagtccgccagcctgatccagcatgaaaggattcatacaggtgagaagccttataggtgtaatgaatgtgggaaaggatttacctccataagtaggcttaaccgacatagaataattcatacgggtgagaagttctataactgtaatgagtgtgggaaggctctgagctcacactctacacttatcattcatgaaagaattcataccggagagaagccatgcaagtgtaaggtctgcgggaaggcattccgccagtccagcgccctgatacagcatcagaggatgcataccggtgaacgcccatacaaatgcaatgaatgtggtaagacattccgctgcaacagttccctgtcaaatcatcaacggatccataccggagaaaaaccttacaggtgtgaggaatgcggtatctcattcggccagtctagcgcactgatccagcaccggcgtatacataccggcgagaaacctttcaaatgcaatacctgcggtaagacgttccggcagagtagttccagaattgcgcatcagcgcattcatacaggtgagaaaccctatgagtgtaatacctgtggcaaactctttaaccaccgcagcagcttaacaaaccactacaagatccacattgaggaagacccctag

SEQ ID NO: 158203 - DNA, 408 bp, Artificial Sequence
  derived and/or modified sequence
atggcggcaggccagagggaggccagaccacaggtctccttaaccttcgaagatgttgccgtgctcttcaccagagatgagtggcgcaaactggctccaagtcagagaaatctttacagggatgtcatgctggagaattaccgaaaccttgtgagcctcggcctcccttttactaagcccaaggtgatcagcttgttacagcagggtgaagatccctgggaggtagaaaaggatgggtctggtgtttccagtctgggttctaagtccagccacaaaaccacaaagtccacacagacacaggactcaagctttcagggcctgattctgaagcgctctaaccggaacgtgccttgggatttgaagctcgagaagccatacatatatgagggccgactcgaaaaaaaatag

SEQ ID NO: 158204 - DNA, 2484 bp, Artificial Sequence
  derived and/or modified sequence
ccggcgcgccgcggggtgagcggcgccgggcctgaggtcgcccagacgccgtcggggcggagccgggtcgcgaggctgcatcccggccggcggttccggagcctcgcggctggggaggcgcggcccgggacgctcgagcttagggagatctgccttctggagactgcgccgtcctcccgggagagccagaaagaggacatggctgctgggcagcgggaagcgaggccccaggtgtcactgacgtttgaggatgtggctgtgctgtttacccgagatgagtggagaaagctggccccttctcagagaaacttgtaccgggatgtgatgctggagaactataggaacctggtctcactggggctcccatttaccaaaccaaaagtgatctccctgttgcagcaaggagaagatccctgggaggtggagaaagacggttctggcgtctcctctctaggatcgaagagcagtcataaaaccacaaagtcaacgcaaacacaagactcttcatttcagggactgatactgaaaagatccaacaggaatgtaccttgggatttgaaattagaaaagccttacatatatgaaggcagattagagaaaaagcaggataaaaagggaagttttcagatagtttcagccacccacaaaaaaatccccactatagaaagaagccataaaaatactgaattgagccaaaacttcagcccaaagtcagtgcttattaggcaacagatacttcccagagaaaaaacaccaccaaaatgtgaaatacaaggaaacagcctcaaacagaattcacaattacttaatcaaccaaaaattacagcagataaacgctataaatgtagtctgtgtgaaaaaaccttcattaacacttcatcccttcgtaaacatgagaaaaaccatagtggagagaaactatttaagtgtaaagaatgttcaaaagcctttagccaaagttcagctcttattcaacatcaaataacgcatactggagagaaaccctacatatgtaaagaatgtgggaaagcctttactctcagtacatccctttataaacatctaagaacccatactgtggagaaatcctacagatgtaaagaatgtggtaaatccttcagccgaaggtcaggcctttttatacatcaaaaaattcatgctgaagaaaacccttgtaagtataatccgggtaggaaggcatctagttgcagcacatccctttctggatgtcaaagaattcattctagaaagaagtcctacttatgtaatgaatgtggcaacacctttaagtctagctcatcccttcgttatcatcagagaattcacactggagagaagccttttaaatgtagtgaatgtgggagagccttcagccagagtgcctctcttattcaacatgaaagaattcacaccggagaaaagccctatagatgcaatgaatgtgggaaaggctttacttctatttcacgacttaatagacaccgaatcattcatactggagagaagttttataattgtaatgaatgtggtaaagccttaagctcccactcaacacttattattcacgagcgaattcatactggagaaaaaccatgtaaatgtaaagtatgtggaaaagccttcagacagagttcagctctcattcaacatcagagaatgcatactggagaaagaccctataaatgtaacgagtgtgggaaaacattcaggtgtaactcatcacttagtaatcaccagagaattcatactggagagaaaccatatcgatgtgaggaatgtgggatatcttttggccaaagttcagctcttattcagcatcgaaggattcatacaggagaaaaaccctttaaatgtaatacatgtggaaaaacttttagacaaagctcatcacgtattgcacatcagagaattcatactggagagaaaccctatgaatgtaatacatgtgggaaacttttcaaccataggtcatcccttactaatcattataaaattcatatcgaagaggacccctagaaagtagatttgtatgtgtgaaagccttaaaccaaagctcatcgaagaatacatccttgagagagatgtaataaatgtaatggatgtgaaaaaaactgtaataatttagccctcattaggtatttaattccatggataaacctcagctatataatagatatgaggaaagtgtttgtgcctgtcagacacttaaaaaaataacctgagatgaagaatttacaattgaagacattgactttagccatttgtgaaatgggtttgctttttcccttttcctacagacgtatatgctagatgtcacgtgatcatcagaaacagatatccgagtgggtggggaggtgtgctttagatttctcattagaagaccaccaaactggtaatatttttatagcattttaatagcttgatcaaattgtacctttttagagaaaaggaccaaaataaaagaaaaatgaattatgaactacc

SEQ ID NO: 158205 - DNA, 766 bp, Artificial Sequence
  derived and/or modified sequence
gtgcagtgggtgctggcagtgccagctggcgccgaggaactcagcggcgtggggcgagccctggccctggtgggctcagcgggtcgctgctgccactgcggctccagcgtcccctccgtaagccccaagcctgtggggcctgggcctggccgggcggcccagcgctgctctggtccgcgggctcctggctcctcccgaatccctgtgagggcgcgcggggtccttctcagcgggagtcggggttttagagctgcggattccagggctggaaagcagaaggggttcttcctggctccctttttcttctcagatctgccttctggagactgcgccgtcctcccgggagagccagaaagaggacatggctgctgggcagcgggaagcgaggccccaggtgtcactgacgtttgaggatgtggctgtgctgtttacccgagatgagtggagaaagctggccccttctcagagaaacttgtaccgggatgtgatgctggagaactataggaacctggtctcactggggctcccatttaccaaaccaaaagtgatctccctgttgcagcaaggagaagatccctgggaggtggagaaagacggttctggcgtctcctctctaggatcgaagagcagtcataaaaccacaaagtcaacgcaaacacaagactcttcatttcagggactgatactgaaaagatccaacaggaatgtaccttgggatttgaaattagaaaagccttacatatatgaaggcagattagagaaaaag

SEQ ID NO: 158206 - protein, 1960 aa, Artificial Sequence [sequence omitted]

SEQ ID NO: 158207 - DNA, 5883 bp, Artificial Sequence
  derived and/or modified sequence
atgcagagcttcagagagcagagcagctaccacggcaaccagcagagctacccccaggaggtgcacggcagcagcagactggaggagttcagccccagacaggcccagatgttccagaacttcggcggcaccggcggcagcagcggcagcagcggcagcggcagcggcggcggcagaagaggcgccgccgccgccgccgccgccatggccagcgagaccagcggccaccagggctaccagggcttcagaaaggaggccggcgacttctactacatggccggcaacaaggaccccgtgaccaccggcaccccccagcccccccagagaagacccagcggccccgtgcagagctacggccccccccagggcagcagcttcggcaaccagtacggcagcgagggccacgtgggccagttccaggcccagcacagcggcctgggcggcgtgagccactaccagcaggactacaccggccccttcagccccggcagcgcccagtaccagcagcaggccagcagccagcagcagcagcagcaggtgcagcagctgagacagcagctgtaccagagccaccagcccctgccccaggccaccggccagcccgccagcagcagcagccacctgcagcccatgcagagacccagcaccctgcccagcagcgccgccggctaccagctgagagtgggccagttcggccagcactaccagagcagcgccagcagcagcagcagcagcagcttccccagcccccagagattcagccagagcggccagagctacgacggcagctacaacgtgaacgccggcagccagtacgagggccacaacgtgggcagcaacgcccaggcctacggcacccagagcaactacagctaccagccccagagcatgaagaacttcgagcaggccaagatcccccagggcacccagcagggccagcagcagcagcagccccagcagcagcagcaccccagccagcacgtgatgcagtacaccaacgccgccaccaagctgcccctgcagagccaggtgggccagtacaaccagcccgaggtgcccgtgagaagccccatgcagttccaccagaacttcagccccatcagcaaccccagccccgccgccagcgtggtgcagagccccagctgcagcagcacccccagccccctgatgcagaccggcgagaacctgcagtgcggccagggcagcgtgcccatgggcagcagaaacagaatcctgcagctgatgccccagctgagccccacccccagcatgatgcccagccccaacagccacgccgccggcttcaagggcttcggcctggagggcgtgcccgagaagagactgaccgaccccggcctgagcagcctgagcgccctgagcacccaggtggccaacctgcccaacaccgtgcagcacatgctgctgagcgacgccctgaccccccagaagaagaccagcaagagacccagcagcagcaagaaggccgacagctgcaccaacagcgagggcagcagccagcccgaggagcagctgaagagccccatggccgagagcctggacggcggctgcagcagcagcagcgaggaccagggcgagagagtgagacagctgagcggccagagcaccagcagcgacaccacctacaagggcggcgccagcgagaaggccggcagcagccccgcccagggcgcccagaacgagccccccagactgaacgccagccccgccgccagagaggaggccaccagccccggcgccaaggacatgcccctgagcagcgacggcaaccccaaggtgaacgagaagaccgtgggcgtgatcgtgagcagagaggccatgaccggcagagtggagaagcccggcggccaggacaagggcagccaggaggacgaccccgccgccacccagagaccccccagcaacggcggcgccaaggagaccagccacgccagcctgccccagcccgagccccccggcggcggcggcagcaagggcaacaagaacggcgacaacaacagcaaccacaacggcgagggcaacggccagagcggccacagcgccgccggccccggcttcaccagcagaaccgagcccagcaagagccccggcagcctgagatacagctacaaggacagcttcggcagcgccgtgcccagaaacgtgagcggcttcccccagtaccccaccggccaggagaagggcgacttcaccggccacggcgagagaaagggcagaaacgagaagttccccagcctgctgcaggaggtgctgcagggctaccaccaccaccccgacagaagatacagcagaagcacccaggagcaccagggcatggccggcagcctggagggcaccaccagacccaacgtgctggtgagccagaccaacgagctggccagcagaggcctgctgaacaagagcatcggcagcctgctggagaacccccactggggcccctgggagagaaagagcagcagcaccgcccccgagatgaagcagatcaacctgaccgactaccccatccccagaaagttcgagatcgagccccagagcagcgcccacgagcccggcggcagcctgagcgagagaagaagcgtgatctgcgacatcagccccctgagacagatcgtgagagaccccggcgcccacagcctgggccacatgagcgccgacaccagaatcggcagaaacgacagactgaaccccaccctgagccagagcgtgatcctgcccggcggcctggtgagcatggagaccaagctgaagagccagagcggccagatcaaggaggaggacttcgagcagagcaagagccaggccagcttcaacaacaagaagagcggcgaccactgccacccccccagcatcaagcacgagagctacagaggcaacgccagccccggcgccgccacccacgacagcctgagcgactacggcccccaggacagcagacccacccccatgagaagagtgcccggcagagtgggcggcagagagggcatgagaggcagaagccccagccagtaccacgacttcgccgagaagctgaagatgagccccggcagaagcagaggccccggcggcgacccccaccacatgaacccccacatgaccttcagcgagagagccaacagaagcagcctgcacacccccttcagccccaacagcgagaccctggccagcgcctaccacgccaacaccagagcccacgcctacggcgaccccaacgccggcctgaacagccagctgcactacaagagacagatgtaccagcagcagcccgaggagtacaaggactggagcagcggcagcgcccagggcgtgatcgccgccgcccagcacagacaggagggccccagaaagagccccagacagcagcagttcctggacagagtgagaagccccctgaagaacgacaaggacggcatgatgtacggcccccccgtgggcacctaccacgaccccagcgcccaggaggccggcagatgcctgatgagcagcgacggcctgcccaacaagggcatggagctgaagcacggcagccagaagctgcaggagagctgctgggacctgagcagacagaccagccccgccaagagcagcggcccccccggcatgagcagccagaagagatacggccccccccacgagaccgacggccacggcctggccgaggccacccagagcagcaagcccggcagcgtgatgctgagactgcccggccaggaggaccacagcagccagaaccccctgatcatgagaagaagagtgagaagcttcatcagccccatccccagcaagagacagagccaggacgtgaagaacagcagcaccgaggacaagggcagactgctgcacagcagcaaggagggcgccgacaaggccttcaacagctacgcccacctgagccacagccaggacatcaagagcatccccaagagagacagcagcaaggacctgcccagccccgacagcagaaactgccccgccgtgaccctgaccagccccgccaagaccaagatcctgccccccagaaagggcagaggcctgaagctggaggccatcgtgcagaagatcaccagccccaacatcagaagaagcgccagcagcaacagcgccgaggccggcggcgacaccgtgaccctggacgacatcctgagcctgaagagcggcccccccgagggcggcagcgtggccgtgcaggacgccgacatcgagaagagaaagggcgaggtggccagcgacctggtgagccccgccaaccaggagctgcacgtggagaagcccctgcccagaagcagcgaggagtggagaggcagcgtggacgacaaggtgaagaccgagacccacgccgagaccgtgaccgccggcaaggagccccccggcgccatgaccagcaccaccagccagaagcccggcagcaaccagggcagacccgacggcagcctgggcggcaccgcccccctgatcttccccgacagcaagaacgtgccccccgtgggcatcctggcccccgaggccaaccccaaggccgaggagaaggagaacgacaccgtgaccatcagccccaagcaggagggcttcccccccaagggctacttccccagcggcaagaagaagggcagacccatcggcagcgtgaacaagcagaagaagcagcagcagcccccccccccccccccccagcccccccagatccccgagggcagcgccgacggcgagcccaagcccaagaagcagagacagagaagagagagaagaaagcccggcgcccagcccagaaagagaaagaccaagcaggccgtgcccatcgtggagccccaggagcccgagatcaagctgaagtacgccacccagcccctggacaagaccgacgccaagaacaagagcttctacccctacatccacgtggtgaacaagtgcgagctgggcgccgtgtgcaccatcatcaacgccgaggaggaggagcagaccaagctggtgagaggcagaaagggccagagaagcctgacccccccccccagcagcaccgagagcaaggccctgcccgccagcagcttcatgctgcagggccccgtggtgaccgagagcagcgtgatgggccacctggtgtgctgcctgtgcggcaagtgggccagctacagaaacatgggcgacctgttcggccccttctacccccaggactacgccgccaccctgcccaagaaccccccccccaagagagccaccgagatgcagagcaaggtgaaggtgagacacaagagcgccagcaacggcagcaagaccgacaccgaggaggaggaggagcagcagcagcagcagaaggagcagagaagcctggccgcccaccccagattcaagagaagacacagaagcgaggactgcggcggcggccccagaagcctgagcagaggcctgccctgcaagaaggccgccaccgagggcagcagcgagaagaccgtgctggacagcaagcccagcgtgcccaccaccagcgagggcggccccgagctggagctgcagatccccgagctgcccctggacagcaacgagttctgggtgcacgagggctgcatcctgtgggccaacggcatctacctggtgtgcggcagactgtacggcctgcaggaggccctggagatcgccagagagatgaagtgcagccactgccaggaggccggcgccaccctgggctgctacaacaagggctgcagcttcagataccactacccctgcgccatcgacgccgactgcctgctgcacgaggagaacttcagcgtgagatgccccaagcacaagccccccctgccctgccccctgccccccctgcagaacaagaccgccaagggcagcctgagcaccgagcagagcgagagaggctag

SEQ ID NO: 158208 - DNA, 5883 bp, Artificial Sequence
  derived and/or modified sequence
atgcagagctttcgggagcaaagctcgtatcacggcaaccagcaaagctacccacaggaggtccacggcagctcaaggcttgaggagttctccccccgccaggctcagatgttccagaacttcggcgggaccggtggctcctctggctcttctgggtctggatccggaggcgggcggcgtggggctgctgcagcagccgctgctatggccagcgaaaccagcgggcatcagggttaccagggattccgcaaggaggccggtgacttttactacatggcagggaacaaggatccagtgactacaggaacgccccagcctccgcagcgcaggccttccggacctgttcaaagctacggtccaccacaaggttccagctttggtaatcagtatgggagcgaagggcatgtgggccagtttcaagcacagcattcaggactcggaggcgtgtcccactaccagcaggattacaccgggccctttagtccaggttctgctcaataccagcaacaggccagctcccaacagcagcaacaacaggttcagcaactcagacagcagctgtatcagtcgcaccagccgctcccacaagctacggggcagccggcctcgagctcttctcacctgcagcctatgcaacggccaagcacacttcctagttccgctgccggatatcagctgcgggtggggcagttcggccagcattaccagtcctcagcaagcagctcatcttcctcttctttccctagcccacagcgatttagccagtcgggccagagctatgacgggtcttacaacgttaatgccggcagtcagtatgaagggcacaacgtggggagtaatgctcaggcttacgggactcagtctaactactcttatcagccccaaagcatgaagaatttcgagcaagcgaaaatccctcagggcacacagcagggacaacagcaacagcagccacagcaacaacagcacccaagccagcacgtcatgcagtatacgaatgccgctacaaagttgccccttcaatctcaggtgggacagtacaaccagcctgaggtgcctgttagaagtcctatgcaattccatcagaacttttcaccgatatccaatccctccccagctgcgagcgtggtccagagtccgtcctgctccagtacacctagccctttaatgcagacaggggagaatcttcaatgcggtcaaggctctgtgcctatggggtccagaaacaggatacttcagctgatgccccagctgagccctactccttccatgatgccctcaccaaattcccacgcggctgggttcaagggattcggtctggaaggagtcccagaaaaacgcctgaccgaccctggcctctctagtctctccgcactctctacacaggtggccaacttgcccaacaccgtgcagcacatgctgctcagcgacgcattgacaccccagaaaaagaccagcaagcggccctctagtagtaaaaaggccgattcctgcactaactccgagggatcaagccagcctgaagagcaactcaaatcccctatggcagagtctctcgacgggggttgttcgtcctctagcgaggaccaaggcgagcgagtgaggcaactttcaggacagtctacaagctcagacactacctacaagggcggcgctagtgaaaaagcggggagctccccggctcagggtgcccaaaacgagccacctaggctgaatgcaagtcctgctgcgcgggaggaggccacctctcccggtgctaaagatatgcccctgagttctgacgggaaccctaaagtaaatgaaaaaactgttggtgtcatcgtctccagagaggccatgactggcagggtggagaaaccaggtggtcaggataaagggagccaggaggacgaccctgctgctacccagcgtccgcctagtaatggaggggctaaagagaccagccatgcatcactccctcagccggaacctcccgggggcggtggctctaaggggaacaaaaacggcgacaataattccaaccataatggagaggggaacggccagtctggtcattctgcggctggacccgggttcacatccagaactgagccctctaaatcccccggctccctgcgctactcatacaaggacagcttcgggagcgccgttcccaggaacgtgtctgggtttccgcagtaccccactggacaggagaaaggcgatttcaccggacatggagaaaggaaagggcggaacgagaagtttcctagcctactgcaagaagttctgcagggatatcaccaccatcccgaccgccgctactcccgcagtacacaggagcatcaaggcatggctggctcgctggaaggaacgacccgacctaatgttctagtgtctcagacaaacgagctggcatccagaggtctattaaataaaagtattgggtccctgttggaaaatccacactggggcccctgggaacgcaaatccagcagcaccgctccggaaatgaagcaaattaacctcactgattatccgatcccccgtaagttcgagatcgaaccccagtcatctgctcacgaacccggaggtagtttgtccgaacggaggtcagtgatttgtgatatcagccctctgcggcaaattgtccgtgacccaggagctcattctctggggcacatgagcgccgatacccggatcggcaggaacgatcgcttaaatcctactctgtcacagagtgtaatcctcccaggcggtctggtgtctatggaaaccaagcttaagtcacaatctgggcagatcaaggaagaggattttgaacagtccaagagccaggcttcgtttaataataaaaaaagcggggaccattgccatcccccctctatcaagcatgaaagctacagaggtaatgctagtcccggggcagctacacatgacagcctgagtgattatggcccccaagattcgcgtccaactcctatgcggagggtgccgggaagagtgggtggtcgggaaggtatgaggggccgcagccctagccaataccatgacttcgcagagaaactcaaaatgagccctggacggtctcgcggaccaggaggggatccccaccatatgaatccccatatgacatttagtgaacgcgccaataggagctccttgcatactcccttcagcccgaatagcgagacactggctagtgcctaccatgccaacaccagagctcacgcttatggagaccctaacgccggcctcaattcacagctgcactacaagcgacagatgtaccagcagcagccagaggagtataaggattggagtagtgggagcgcgcaaggcgtgatcgccgccgctcagcatagacaagagggcccccgaaagagccctcggcagcagcagttcctcgatagagtccgcagcccattgaagaatgacaaagacggtatgatgtatggaccacccgttggcacgtaccatgaccccagcgcgcaagaggcaggccgctgtctcatgagttcagatgggctgccgaataaagggatggaacttaaacacggatcccagaagcttcaggaatcttgttgggatctgtcaaggcagactagccctgccaagtcatcgggcccacctggaatgtcttcacagaaacgctacgggcctcctcatgagacagacggccatggcttggcagaggcaactcagtctagcaaacctggctctgtcatgctccgcctgccgggacaggaggaccactcctctcagaatccattaattatgaggaggcgggtcaggtcatttatttcccccattccaagtaagcggcagtctcaggatgtgaaaaacagtagcaccgaagataaaggtcgactgctgcattcctccaaggagggagccgacaaggctttcaactcctatgctcatctttctcatagccaagatattaaatccatcccgaagagagactcaagtaaagatctcccttcacccgatagtcggaactgccccgcggtcacacttacttcgcccgccaaaaccaaaattcttccccctaggaaaggtcgtggcctcaaattggaagctatagtacagaagatcaccagccccaacatcagacgcagcgcttcttctaactctgccgaggcagggggggatacagttaccctcgacgatatcttaagtctcaaatccgggcctcccgagggggggagcgtagctgttcaggatgctgacatcgagaaacggaagggcgaagttgcatctgatttggtctcacctgccaaccaagagctgcacgtggagaagcccctaccaagaagttccgaagagtggagagggtctgtggatgacaaagtgaagacagagacacacgccgagactgtcacagccggcaaagaaccccccggggccatgactagtactacctcccagaagccaggatccaatcagggacgacctgatggttctctaggtggaacagccccacttatttttccagactccaagaatgtccctcctgtgggaatcctggcccctgaggctaaccctaaggccgaggagaaagaaaatgatacagttaccatttcaccaaaacaggaagggttcccccctaagggatacttccctagcggcaagaagaaaggtaggcctatcgggtcagtgaataagcagaaaaagcagcagcagcccccgcctcccccgcctcaacccccacagatcccagaaggctccgcggacggcgagccaaaaccgaagaagcagagacagcggcgggaacgcaggaaaccaggagcacagccgaggaaaagaaagactaagcaggccgtgcctatagtggaacctcaagagccagagattaagcttaaatatgcaacccagcctctggacaagaccgatgctaagaataagagtttttacccttatatccacgtcgtcaacaaatgcgagttgggtgccgtctgcactatcattaatgctgaagaagaggagcaaaccaagctagttagggggcgcaagggacagaggagtttaacccctcctccaagttcaaccgaatccaaggctctgcccgcttcctcatttatgctgcaaggccctgttgtaacagaatcctctgtgatgggtcaccttgtgtgctgtctctgtggaaaatgggcaagctaccgaaatatgggagacctctttggacctttttaccctcaagattacgcggccacccttcctaagaatccaccaccaaagcgagcaactgaaatgcagagcaaggtcaaggtgcgccataaatctgccagcaatggatccaaaaccgacaccgaggaggaggaagaacagcaacaacaacaaaaggaacagcgtagcctcgctgcccaccctcgattcaaaagaagacaccggagcgaagactgtgggggggggccacggtccctcagccgtggcctcccatgcaagaaggccgcaacagaaggctcatctgagaaaacggtgcttgactctaagcccagcgtacccaccaccagtgagggcgggccggaactggagctgcagatcccggagcttccgttagacagcaatgagttctgggttcacgaaggatgcattctgtgggccaacggaatctacttagtttgtggccggctgtatgggcttcaagaggccctggagatcgcgcgagagatgaagtgcagccactgtcaggaagccggagccaccctggggtgctacaacaaaggatgttcctttcgctaccactacccttgcgccatcgatgcggactgcctcctgcatgaggagaatttttcagtgagatgcccaaaacataagccccctctgccatgtcctctcccaccccttcaaaataaaaccgctaaggggtctctctctactgaacagagtgagcgaggatag

SEQ ID NO: 158209 - DNA, 5883 bp, Artificial Sequence
  derived and/or modified sequence
atgcagagcttccgggagcagagcagctaccacggcaaccagcagagctacccccaggaggtgcacggcagcagccggctggaggagttcagcccccggcaggcccagatgttccagaactttggaggcaccggcggcagcagcggcagcagcggcagcggcagcggcggcggcagaagaggagctgctgctgctgctgctgccatggccagcgagaccagcggccaccagggctaccagggcttcaggaaggaggccggggacttctactacatggccggcaacaaggaccctgtgaccaccggcaccccccagcccccccagaggcggcccagcggccctgtgcagagctatggccccccccagggcagcagctttggaaaccagtatggcagcgagggccacgtgggccagttccaggcccagcacagcggcctgggcggcgtgagccactaccagcaggactacacaggccccttcagccctggcagcgcccagtaccagcagcaggccagcagccagcagcagcagcagcaggtgcagcagctgcggcagcagctgtaccagagccaccagcccctgccccaggccaccggccagcctgccagcagcagcagccacctgcagcccatgcagaggcccagcaccctgcccagcagcgctgctggctaccagctgcgggtgggccagtttggccagcactaccagagcagcgccagcagcagcagcagcagcagcttccccagcccccagcgcttcagccagagcggccagagctatgatggcagctacaacgtgaatgccggcagccagtatgagggccacaacgtgggcagcaatgcccaggcctacggcacccagagcaactacagctaccagccccagagcatgaagaactttgagcaggccaagatcccccagggcacccagcagggccagcagcagcagcagccccagcagcagcagcaccccagccagcacgtgatgcagtacaccaatgctgccaccaagctgcccctgcagagccaggtgggccagtacaaccagcctgaggtgcctgtgcgcagccccatgcagttccaccagaacttcagccccatcagcaaccccagccctgctgcctctgtggtgcagagccccagctgcagcagcacccccagccccctgatgcagacaggagagaacctgcagtgtggccagggctctgtgcccatgggcagcaggaaccgcatcctgcagctgatgccccagctgagccccacccccagcatgatgcccagccccaacagccacgccgccggcttcaagggcttcggcctggagggcgtgcctgagaagaggctgacagatcctggcctgagcagcctgagcgccctgagcacccaggtggccaacctgcccaacacagtgcagcacatgctgctgagtgatgccctgaccccccagaagaagaccagcaagaggcccagcagcagcaagaaggctgacagctgcaccaacagcgagggcagcagccagcctgaggagcagctgaagagccccatggccgagagcctggatggcggctgcagcagcagcagcgaggaccagggcgagcgggtgcggcagctgagcggccagagcaccagcagtgacaccacctacaagggcggggccagcgagaaggccggcagcagccctgcccagggcgcccagaatgagcccccccggctgaatgccagccctgctgcccgggaggaggccaccagccctggggccaaggacatgcccctgagcagtgatggcaaccccaaggtgaatgagaagacagtgggcgtgattgtgtcccgggaggccatgacaggccgggtggagaagccaggcggccaggacaagggcagccaggaggatgatcctgctgccacccagaggcctcccagcaatggaggagccaaggagaccagccacgccagcctgccccagcctgagcccccaggcggcggcggcagcaagggcaacaagaatggagacaacaacagcaaccacaacggggagggcaatggccagagcggccacagcgctgctggccctggcttcaccagcaggacagagcccagcaagagccctggcagcctgcgctacagctacaaggacagctttggatctgctgtgcccagaaatgtgtctggcttcccccagtaccccaccggccaggagaagggggacttcaccggccatggagagaggaaaggaagaaatgagaagttccccagcctgctgcaggaggtgctgcagggctaccaccaccacccagaccggcgctacagccgcagcacccaggagcaccagggcatggccggcagcctggagggcaccacccggcccaacgtgctggtgtcccagaccaatgagctggccagccggggcctgctgaacaagagcatcggcagcctgctggagaacccccactggggcccctgggagaggaagagcagcagcacagcccctgagatgaagcagatcaacctgacagactaccccatccccaggaagtttgaaattgagccccagagcagcgcccacgagcccggcggcagcctgtctgaaagaagaagtgtcatctgtgacatcagccccctgcggcagatcgtgcgggaccccggggcccacagcctgggccacatgtctgctgacacccgcatcggcagaaatgaccggctgaaccccaccctgagccagagcgtcatcctgcccggcggcctggtgtccatggagaccaagctgaagagccagagcggccagatcaaggaggaggactttgagcagagcaagagccaggccagcttcaacaacaagaagagcggggaccactgccaccccccatccatcaagcatgagagctacagaggaaatgccagccctggagctgccacccatgacagcctgagtgactatggcccccaggacagccggcccacccccatgagaagagtgcccggccgggtgggcggccgggagggcatgaggggccgcagccccagccagtaccatgactttgctgagaagctgaagatgagccctggccgcagccggggccctggaggagacccccaccacatgaacccccacatgaccttcagcgagcgggccaacagaagcagcctgcacacccccttcagccccaacagcgagaccctggccagcgcctaccacgccaacacccgggcccacgcctacggggaccccaatgccggcctgaacagccagctgcactacaagaggcagatgtaccagcagcagcctgaggagtacaaggactggagcagcggcagcgcccagggcgtgattgctgctgcccagcaccggcaggagggccccaggaagagcccccggcagcagcagttcctggacagagtgcgcagccccctgaagaatgacaaggatggcatgatgtatggcccccctgtgggcacctaccatgaccccagcgcccaggaggccggccgctgcctgatgagcagtgatggcctgcccaacaagggcatggagctgaagcacggcagccagaagctgcaggagagctgctgggacctgagccggcagaccagccctgccaagagcagcggccccccaggcatgagcagccagaagagatatggcccccctcatgaaacagatggccacggcctggccgaggccacccagagcagcaagccaggctctgtgatgctgcggctgcccggccaggaggaccacagcagccagaaccccctcatcatgagaagaagagtgcgctccttcatcagccccatccccagcaagaggcagagccaggatgtgaagaacagcagcacagaagataaaggccgcctgctgcacagcagcaaggagggcgctgacaaggccttcaacagctatgcccacctgagccacagccaggacatcaagagcatccccaagagggacagcagcaaggacctgcccagcccagacagcaggaactgcccagctgtgaccctgaccagccctgccaagaccaagatcctgccccccaggaagggccggggcctgaagctggaggccatcgtgcagaagatcaccagccccaacatcagaagaagtgccagcagcaacagcgctgaggccggcggggacacagtgaccctggatgacatcctgagcctgaagagcggccccccagagggcggctctgtggccgtgcaggatgctgacatcgagaagaggaaaggagaggtggccagtgacctggtgtccccagccaaccaggagctgcacgtggagaagcccctgcccaggagcagcgaggagtggaggggctctgtggatgacaaggtgaagacagagacccatgctgagaccgtgacagctgggaaggagcccccaggggccatgaccagcaccaccagccagaagccaggcagcaaccagggccgcccagatggcagcctgggcggcacagcccccctcatcttcccagacagcaagaatgtgccccctgtgggcatcctggcccctgaggccaaccccaaggccgaggagaaggaaaatgacacagtgaccatcagccccaagcaggagggcttcccccccaagggctacttccccagcggcaagaagaagggccggcccatcggctctgtgaacaagcagaagaagcagcagcagcccccacctcctccaccccagcccccccagatccctgagggcagcgcagatggagagcccaagcccaagaagcagaggcagaggcgggagaggaggaagccaggggcccagcccaggaagaggaagaccaagcaggccgtgcccatcgtggagccccaggagcctgagatcaagctgaagtatgccacccagcccctggacaagacagatgccaagaacaagagcttctacccctacatccacgtggtgaacaagtgtgagctgggcgctgtgtgcaccatcatcaatgctgaggaggaggagcagaccaagctggtgcggggcaggaagggccagaggagcctgaccccaccacccagcagcacagagagcaaggccctgcctgccagcagcttcatgctgcagggccctgtggtgacagagagctctgtgatgggccacctggtgtgctgcctgtgtgggaagtgggccagctacagaaacatgggagacctgtttggccccttctacccccaggactatgctgccaccctgcccaagaaccccccacccaagagggccacagagatgcagagcaaggtgaaggtgcgccacaagagcgccagcaatggcagcaagacagacacagaggaggaggaggagcagcagcagcagcagaaggagcagaggagcctggccgcccacccccgcttcaagaggaggcacagaagtgaggactgtggcggcggccccaggagcctgagccggggcctgccctgcaagaaggccgccacagagggcagcagcgagaagacagtgctggacagcaagcccagcgtgcccaccaccagcgagggcggccctgagctggagctgcagatccctgagctgcccctggacagcaatgagttctgggtgcatgagggctgcatcctgtgggccaacggcatctacctggtgtgtggccgcctgtatggcctgcaggaggccctggagatcgcccgggagatgaagtgcagccactgccaggaggccggggccaccctgggctgctacaacaagggctgcagcttccgctaccactacccctgtgccattgatgctgactgcctgctgcacgaggagaacttctctgtgcgctgccccaagcacaagccacccctgccctgccccctgccccccctgcagaacaagacagccaagggcagcctgagcacagagcagagcgagcggggctag

SEQ ID NO: 158210 - DNA, 5883 bp, Artificial Sequence
  derived and/or modified sequence
atgcagagcttccgggagcagagcagctaccacggcaaccagcagtcttacccccaggaggtccacggttcgtctcgtctagaggagttctctccccggcaggcccagatgtttcagaatttcgggggcaccggcgggagctctgggagcagtggtagcggatccggcggggggcggagaggggccgcggctgccgccgcggctatggcctccgaaacctccggacaccagggttaccaaggatttcgaaaggaggccggcgacttttattatatggcagggaacaaggatcccgtgaccacaggcaccccacaaccaccacagagaagaccaagtggcccagtgcagtcctatgggcctccccagggatcttcattcggaaaccagtatgggagtgagggccatgttggacagttccaagcccagcattccggtttaggaggggtatcacactatcagcaggattacacaggccctttttctcccggttctgcgcagtatcagcagcaggcgtcttctcaacaacagcagcagcaggtccagcagttgaggcaacagctttatcaatctcaccagccattgccacaggctactgggcagccagcaagctcctcctctcatttacagccaatgcaacgccccagcaccttaccctcttctgctgccggataccagcttcgtgtgggacagttcgggcagcattaccaatcttccgcaagttcaagcagcagctctagctttccgagtccccagcgatttagccagagcggccagtcttatgatggatcctataacgtgaatgcgggttctcagtatgagggccacaacgtagggagtaacgcacaagcctacgggacccagtcaaactattcttaccaacctcagagcatgaagaacttcgagcaagccaagataccgcagggtactcagcagggtcagcagcagcagcaaccgcagcagcaacaacacccatctcagcacgttatgcaatacaccaacgccgccacaaagctacccctgcagagccaggtgggccagtacaaccagcccgaagttcctgttcggtcccccatgcagttccaccaaaacttttccccaatctccaacccctctcccgcggctagcgtggtccagagtccctcttgctccagcactcccagccctctcatgcagacaggagagaatctccagtgcgggcagggatcagtgcccatggggagtagaaatcgcatactgcagcttatgcctcaattgagtcctacaccttcgatgatgccttcacccaactcacacgcggctgggttcaaaggctttgggctggaaggggtgcctgaaaagagactcacggatccggggctgtctagtttatccgctttgagtacccaagtcgctaatcttcccaacacagtacagcacatgttgctgtcagatgcccttactccacagaagaagacatcaaaaaggccctcctcttccaagaaggctgatagctgtacaaatagcgagggctcatcccagcccgaggaacagttgaagagcccaatggccgagtccctggacggtggctgttccagcagctcagaggatcagggtgagagggtgcgccagctcagtggccaatccacttcttccgatacaacgtacaaggggggtgcttccgagaaagcaggttctagcccagcccagggtgcccagaacgagccgcctagactgaatgcctcgcccgcggccagagaggaagccaccagcccaggagccaaagacatgccgttgagcagtgatggaaatcccaaagttaatgagaagacagtgggagtgattgtatcacgtgaagccatgactggtcgtgtagagaagcctggaggacaggataagggcagtcaggaggacgaccccgccgcaacacaacgccccccctcgaacggaggagcaaaagagactagtcatgcctctttgccccagcctgagcctccaggtggtggaggctctaagggaaataaaaacggtgataataattctaatcataacggagaagggaatggccaatcagggcattcagccgctggccccggctttaccagtagaactgagccgtcaaaatcgcccggctcgctacggtactcttacaaggatagttttggcagcgcagttcctcggaatgtttccggcttccctcaatacccgactggccaggaaaaaggggactttaccggacacggcgagcgaaaaggacgcaacgagaagttcccctcactcctccaggaggtgctgcaggggtatcaccaccatcctgacagaagatactcaagatctacacaggaacaccaagggatggccggtagtttggaggggactaccaggcccaacgtgttggtgagtcagaccaatgagctcgcttcacgcggcctcctgaacaaatccataggctctcttctcgaaaatccccattgggggccttgggagcggaaatcgtccagcaccgcgcctgaaatgaagcagattaacctgacagactatcccatccctcgtaagtttgaaatcgaacctcagagcagcgctcacgagccaggcggatcactctctgaacgcaggtctgtgatctgcgatattagccccctgagacaaattgttcgagacccgggagcccactctctgggccacatgtccgcagacaccaggataggacgtaatgatcgcctgaatcctacactgtcacagagtgtcatcctcccagggggcctggtgtccatggaaacaaagcttaaatctcagtctgggcagattaaagaggaggattttgagcaaagtaagtcccaggcgtcatttaataataaaaagtctggagaccactgccatccgccatccatcaagcatgaaagctataggggcaacgccagtcccggagcggctacccatgactcactgtccgattatgggccccaggacagccgccctactccaatgcgacgggtacctggccgggtcgggggcagggaaggtatgaggggaagaagcccatcacagtaccatgacttcgcagagaagctgaagatgtctcccggccgctcccgcggtcctggtggcgatccacatcatatgaacccgcacatgacattctcagaaagggccaaccgaagcagtctacatacccccttctctcccaatagcgaaacactagcatctgcataccatgcaaacaccagagctcacgcttacggtgaccccaacgccgggcttaacagccagctccactataagcggcagatgtatcagcaacagcctgaagaatacaaagactggtcctcaggtagcgctcagggagttattgctgccgcccaacacaggcaggaaggacctcgaaaatcaccccgccagcagcagttcctcgaccgtgtgcggtcccccctcaagaacgataaagatggaatgatgtacgggccccccgttggaacataccatgatcccagcgcgcaggaggccgggcgatgtcttatgagctctgatgggctgccaaataaggggatggagctgaaacatggtagtcaaaaattgcaggagagctgctgggacctgtcacggcagactagccctgccaaatccagtggcccccctggaatgtcctcccagaagaggtatgggccgccacatgaaacagatggccatggcctggcagaagcgacccagtcaagcaaaccaggcagtgtgatgttacggctaccagggcaggaagatcatagttcacagaatcccctgataatgaggagaagggtcaggtccttcatatcacctatcccttcaaaacgacaatcgcaagatgtaaaaaactcctccacagaggataaaggtagactgctgcattcatccaaggagggagctgacaaggcctttaactcttacgctcatctgagccattcgcaggacatcaaatcaattcctaaacgagattcaagcaaagatttaccctctccagactcgcgcaattgcccagcagttacccttacatcaccagcaaagaccaaaattctcccacccagaaaaggcagagggcttaagctggaagcgattgtccaaaaaatcacctcacccaatattcggagatccgcatcttctaactctgctgaagcaggtggagataccgtgacattggatgacattctgtcattgaaaagcggtccaccagagggcgggtctgtggccgtgcaggatgccgacatcgagaaacgcaagggtgaggttgcgtccgacctcgtgtctccagctaatcaggaactgcacgtggagaagccactccccagatcatcagaagagtggaggggcagtgtcgacgacaaggtgaaaacagaaacccatgccgagacggtgaccgcagggaaggagccacctggcgccatgaccagtactacatctcagaagcctgggagcaatcaaggaaggcccgatggctccctgggagggactgcacccctgattttccccgatagtaagaacgttccgcctgtggggatcctggcacctgaagccaacccgaaggcggaagaaaaggagaatgacaccgtgactatatctcccaagcaagaaggcttccctcctaaaggatactttccctctgggaagaaaaaaggccgaccaatcggaagcgttaataaacagaagaagcagcagcagccaccaccacctccaccacagccaccccagatcccagaaggctccgctgacggcgagccaaaacccaagaaacagaggcagagaagagagcgccgtaaacccggcgcacaacctcggaaaagaaagacgaagcaagccgtgccgattgtcgaaccccaggagcctgagatcaagctgaaatacgccactcaaccattggataaaaccgacgccaaaaataagtcattttacccgtacatacacgtggtaaacaagtgtgagttaggggcggtttgtaccattataaacgccgaagaagaggaacagacaaagctggtacgcggacggaaggggcaaaggagtcttacacctccgccctcttcgactgagagcaaagcccttcccgctagctcatttatgctgcaaggtcctgtagtcactgagagtagcgtcatgggccaccttgtctgctgtctgtgtgggaaatgggcaagttacaggaacatgggcgatctgttcggccccttttatccacaggattacgcagctacgctcccaaaaaatccgccaccaaaaagagccactgaaatgcagtctaaagtcaaggttcggcacaagtctgcaagcaatggtagtaagaccgacacggaagaggaggaagagcagcaacagcagcaaaaggagcaacggtcactggcagcccacccgcgtttcaaacgccgacacaggagtgaggactgcggagggggccctcgaagcctgtcacggggccttccctgtaaaaaggccgcaactgaaggatcgagtgaaaagactgtgttggattccaaacccagtgtcccgacaacgagcgaaggcgggcccgaactagagctgcagattccagagctgcctttggacagcaatgagttctgggtgcacgaggggtgtattctctgggctaatggcatctacctggtatgcggacgcttatacggtctccaggaagctctggaaatcgccagggagatgaaatgctcacactgccaggaagccggtgccaccctgggttgctacaataaggggtgctcgttccggtaccactacccttgtgcaattgacgccgattgcttattgcacgaagagaattttagtgtgagatgccctaagcacaagcctccactgccctgcccacttccacccttgcaaaataagaccgccaaaggatcgcttagtactgagcagtctgagaggggctag

SEQ ID NO: 158211 - DNA, 5882 bp, Artificial Sequence
  derived and/or modified sequence
atgcagtctttccgagagcagtccagctatcacggtaaccagcagagctatcctcaggaggttcatgggagcagcaggctagaggaattctcacccaggcaggcccagatgttccaaaattttggcggaactggcggatctagcggctcatcaggatccggctctgggggaggcaggcgcggtgccgcagccgcagctgcggcaatggcatcggaaacatcaggacaccagggttatcagggcttccgaaaggaggcaggcgacttttactacatggccggaaacaaggatccagtgactaccgggaccccccagccaccccagcgaagaccaagtggacctgtgcagtcatatgggccaccccagggcagtagctttgggaatcagtacggttctgagggccacgtgggccaattccaggcccagcacagcggtttaggaggcgtctctcactaccagcaggattacactgggccattctctccagggtcggcccagtaccagcagcaggctagctctcaacagcagcagcagcaggtgcagcagcttaggcagcaactgtaccaatcacatcaaccactccctcaagcgaccgggcaacctgctagcagcagtagtcacctgcagcccatgcaacgccctagcaccctcccgagttctgcggcaggttatcagcttcgcgtagggcagttcgggcaacactaccagtctagcgcaagtagtagtagtagttcttccttcccatccccacagagattttcccagagtggccagtcgtatgacggcagctataatgtgaatgcaggctcgcagtacgaaggtcacaatgtcgggagtaacgcgcaggcttacggaacgcagagcaattattcttaccagccacagagcatgaaaaactttgagcaagccaaaattccacaaggcacccagcagggccagcaacaacaacagccccaacaacaacagcacccatcacagcacgtgatgcaatacaccaacgcagccaccaagctgcccctacaatctcaggttggacagtacaatcagcctgaagtgcccgttcgtagtcccatgcagtttcaccaaaactttagtccaatctctaatccttcccccgctgctagtgtggtgcaaagtccatcttgcagctccacgccttctcctctgatgcagaccggagagaacttacaatgtggacagggctccgtaccaatgggttcacgtaaccggatcctccagctcatgccgcaactgagcccaaccccgagcatgatgccatcacctaacagccatgccgctggatttaagggatttggcctcgagggagtgccagaaaagcggctgaccgaccccggtctctcttctctctccgccctctccacacaggtggctaacctcccaaacacagtgcagcacatgctgctgagtgatgctctcacacctcagaagaagacaagcaagagacctagtagctccaagaaggccgactcctgtacaaacagcgagggctcctctcagcctgaagagcagctgaaaagtccgatggccgagtctctggacggaggctgctcatcttctagcgaggaccagggcgaacgggtcagacagttgtcaggtcagtctacgagctcggacaccacttacaaaggcggagcctccgaaaaagccggtagcagccctgcacagggagcacagaacgaacctccgcgactgaacgcttctcctgccgctagagaggaggccacttcacccggtgccaaggacatgcctctcagctctgacgggaatcccaaggtgaacgaaaaaaccgtgggagtcatagtgagccgtgaagcaatgactggccgtgtagagaagccgggaggccaagataaggggtcgcaggaggacgatccagccgctactcagcggccaccctccaacggaggcgcaaaagaaacgagtcacgcttctctgccccagcctgagccccctggcggtgggggttctaaagggaataagaacggcgacaacaactccaatcataacggcgaaggaaatggccaatcaggacacagcgcagccggtcccggtttcacatcgcgaactgaaccctctaagtccccagggagcttacgatatagctacaaagattctttcggttcagccgtccccaggaacgtaagtggtttcccccagtatcccactgggcaggagaaaggggatttcaccgggcatggggagcggaaggggagaaatgaaaaattcccctccctgctccaagaggtactgcagggataccaccaccatcccgaccggagatactcaagatcaactcaagagcaccaggggatggcaggttcgctggagggcacgactagaccaaacgtcctagtatctcagacaaatgagttggcatctaggggtctgctgaacaaatcgatagggtctttgttggagaaccctcactggggaccatgggagaggaaatcgagttccactgcacctgaaatgaagcaaataaatctcacagattacccgataccgaggaaatttgagatcgaaccacagagttctgcccatgagccaggcggtagcctgagtgagcgccgttccgtgatatgtgatatatctccactccggcagatagtccgggaccccggtgcccactcccttggacatatgtctgctgacacccggattgggaggaatgaccgcctaaatcctactctgtcccagtcagtcatcctgccgggtgggctcgtgagtatggagaccaaactcaagagtcagagtggacaaattaaggaagaggactttgaacaaagtaagagccaggcatcgttcaataacaagaagtctggggatcactgccatccaccaagcatcaagcacgaaagctatcggggaaacgctagcccgggagctgccacccacgactcactgtcagactatgggccacaggactctaggcccactcccatgagaagggtacccggacgcgtgggcggtagggaggggatgcgcggtcgcagtccctctcaatatcatgacttcgctgaaaaactcaagatgtctccgggtcgaagtcgtggcccagggggtgatcctcatcatatgaatccccatatgacatttagcgagcgggctaatagaagctctctacatacaccctttagtccaaactcggaaacccttgcctcagcctatcacgccaatacccgggctcacgcctatggcgaccccaacgccggacttaattcacagttgcactacaaacgccagatgtaccagcagcagccagaggagtacaaggactggtcctccgggagtgcacagggagtaattgccgctgcccagcataggcaggaaggccctcgcaagtctcctcggcagcaacagttcctagacagggtgagaagccccttgaaaaatgacaaagacgggatgatgtacggacctccggtgggaacataccacgacccatctgctcaggaggctgggagatgcctaatgtcaagtgacgggctccctaacaagggtatggaattaaaacacggcagccaaaagttgcaggagtcctgctgggatctcagtcgacaaacatcaccagcaaagagttcaggacctcctggcatgtcctcacagaaaaggtacggacctccacatgaaacagatgggcatggactggccgaggcaactcagtcaagcaagcctggatcagtcatgctgaggctgccagggcaggaggaccactcttcgcaaaatccattgattatgagacgacgggtacggtcgttcatttcaccaattccttcaaaacgacagtcacaggatgtaaaaaatagctctacagaggataagggtcgtctattgcactcatcaaaggaaggcgctgataaagcttttaactcttacgctcatctgtcacactcacaggacatcaagtctatcccaaagcgcgacagctccaaagacctgccttcgcccgactctcgcaactgtcccgcagttacattaacctctcccgctaagacaaagattcttccccctcgaaaaggtcggggtttgaaactggaagccatcgtgcagaagatcacctcgccaaatatacggaggagtgcatcttcaaattccgcagaagccggaggagacactgttacattggatgatatcctgagcttgaaatctgggcctccagaaggaggctctgtagccgtgcaagacgccgacatcgaaaagcgcaagggagaagtcgcctctgacctcgtcagccccgctaatcaggagctccacgtggaaaagccccttcccaggtcttccgaggagtggcggggttcagtcgacgataaagtgaaaaccgaaactcacgccgaaacagtaaccgcgggaaaagagcctcccggtgccatgacttctacgacgagtcagaagcccggatccaaccagggccgtcccgatggcagcctgggcggaaccgccccactcatcttccccgattcaaaaaacgtgccccctgtgggcattctggctcccgaggccaacccgaaggccgaagagaaggagaacgacacagtcactatatcacctaaacaggagggattccctcctaaaggctatttcccctccgggaaaaagaagggtcggcctatcgggagcgtcaataagcagaagaagcagcaacagccccctccccctccacctcagccgcctcagatcccggaaggttctgcagatggcgagcctaaaccaaagaaacaacgccagcggcgagagcgccgaaaacccggtgcccaaccacggaaaaggaaaaccaagcaggccgtacctatcgtggaacctcaggagcccgaaatcaagctgaagtacgccacacagcccctggataagactgacgcaaagaataaatctttttacccttatattcacgtcgtgaacaagtgtgagttaggtgccgtttgcaccattatcaacgcagaggaagaggagcagacaaagttggtgcggggtcgcaagggccagagatccctgaccccccctccatcttcaacagagtccaaggctctgcctgcgtcaagctttatgctgcagggtccagttgtgaccgagagtagtgtcatggggcacctggtgtgctgcttgtgcgggaaatgggcaagttatcgtaatatgggagacctcttcggccctttctacccgcaggactatgccgctacactgcccaagaaccctcccccaaaacgcgcaaccgagatgcaatcgaaagtgaaggtgaggcacaaatcggcgtccaacggatccaagactgacactgaagaggaagaggagcaacagcaacaacagaaggaacagcgttctctagcggctcatcctagattcaagagacggcaccgctctgaagactgtggaggcggacccaggtccctatcccggggtctcccctgtaagaaggctgctacagagggctctagtgaaaaaaccgtcctggacagcaagccttctgtccctacaacctcagaggggggacccgagttggaactgcagattccagagctgcctctcgacagcaacgagttttgggtgcacgagggctgtatcttgtgggcaaatggcatctatctggtttgcggtcgcctgtatggccttcaggaggctctcgaaatcgctcgagagatgaagtgtagccactgtcaggaagctggcgctactcttggatgctataataaggggtgtagtttcagataccactatccgtgcgcaattgacgccgattgcctgctgcatgaggaaaatttttctgttagatgtcctaagcataaacccccacttccttgcccccttcctccactgcagaataaaacagctaaagggtccctgtccactgaacagagcgaaagaggcta

SEQ ID NO: 158212 - DNA, 7410 bp, Artificial Sequence
  derived and/or modified sequence
tctgggcctctgattcatctttattccctccatcatctagacttgattttatttgtaccaaggagatgcgtgtctaatgtttttctttcttctatttctaggagggctgttggcctgctgctgtgctgctgaacagtatgcagtcctttcgggagcaaagcagttaccacggaaaccagcaaagctacccacaggaggtacacggctcatcccggctagaagagttcagccctcgtcaggcccagatgttccagaattttggaggtacaggtggcagtagtggcagcagtggcagtggcagtggtggtggacgacgaggagcagcagctgctgcggcagcgatggctagcgagacctctggccatcaaggttaccagggtttcaggaaagaggctggagatttttactacatggcaggcaacaaagaccccgtgactacaggaaccccacagcctcctcagcgaaggccttctgggcctgtgcagagctatggacccccccaggggagcagctttggcaatcagtatgggagtgagggtcatgtgggccagtttcaagcacagcactctggccttggcggtgtgtcacattatcagcaggattacactgggcctttctctccagggagtgctcagtaccaacagcaggcttccagccagcagcagcagcagcaagtccagcagttgagacaacagctttaccagtcccatcagcccctgccacaggccactggccaaccagcatccagctcatcccatctacagccaatgcagcggccctcaactctgccatcctctgctgctggttaccagttaagagtgggtcagtttggccaacactatcagtcttctgcttcctcctcctcctcctcctccttcccttcaccacagcgttttagccagtctggacagagctatgatggcagttacaatgtgaatgctggatctcagtatgaaggacacaatgtgggttctaatgcacaggcttatggaacacaatccaattacagctatcagcctcaatctatgaagaattttgaacaggcaaagattccacaagggacccaacaggggcagcagcagcagcaaccgcagcaacaacaacacccttctcagcatgtgatgcagtatactaacgctgccaccaagctgcccctgcaaagccaagtggggcagtacaaccagcctgaggttcctgtgaggtcccccatgcagtttcaccagaacttcagccccatttctaacccttctccagctgcctctgtggttcagtctccaagctgtagttctaccccatctcctctcatgcagactggggagaatctccagtgtgggcaaggcagtgtgcctatgggttccagaaacagaattttacagttaatgcctcaactcagtccaaccccatcaatgatgcccagtcctaattctcatgctgcaggcttcaaagggtttggactagaaggggtaccagaaaagcgactgacagatcctgggttgagtagtttgagtgctctgagtactcaagtggccaatcttcctaacactgtccagcacatgttactttctgatgccctgactcctcagaagaagacctccaagaggccctcatcttccaagaaagcagatagctgcacaaattctgaaggctcctcacaacctgaagaacagctgaagtcccctatggcagagtcattagatggaggctgctccagcagttcagaggatcaaggcgagagagtgcggcaactaagtggccagagcaccagctctgacaccacctacaagggtggagcctctgagaaagctggctcctcaccggcacaaggtgctcagaatgaaccccccagactcaatgctagtcctgccgcaagagaagaggccacctcaccaggcgctaaggacatgccattgtcatccgacgggaacccaaaggttaatgagaagactgttggggtgattgtctcccgggaagccatgacaggtcgggtagaaaagcctggtggacaagataaaggctcccaagaggatgatcctgcagccactcaaaggccacctagcaatggtggggcaaaggaaaccagtcatgcatcacttccccagccagagcctccaggaggaggagggagcaaaggaaacaagaatggcgataacaactccaaccataatggagaaggaaatggccagagtggccactctgcagcgggccctggttttacgagcagaactgagcctagcaaatctcctggaagtctgcgctatagttacaaagatagtttcgggtcagccgtgccacgaaatgtcagtggctttcctcagtatcctacagggcaagaaaagggagatttcactggccatggggaacgaaagggtagaaatgaaaaattcccaagcctcctgcaggaagtgcttcagggttaccaccaccaccctgacaggagatattctaggagtactcaagagcatcaggggatggctggtagcctagaaggaaccacaaggcccaatgtcttggttagtcaaaccaatgaattagctagcaggggccttctgaacaaaagcattgggtctctattagaaaatccccactggggcccctgggaaaggaaatcaagcagcacagctcctgaaatgaaacagatcaatttgactgactatccaattcccagaaagtttgaaatagagcctcagtcatcagcacatgagcctgggggttccctctctgaaagaagatcagtgatctgtgatatttctccactaagacagattgtcagggacccaggggctcactcactgggacacatgagtgccgacaccagaattgggaggaatgaccgtctcaatccaactttaagtcagtcggtcattcttcctggtggtttggtgtccatggaaaccaagctgaaatcccagagcgggcagataaaagaggaagactttgaacagtctaaatctcaagctagtttcaacaacaagaaatctggagaccactgccatcctcctagcatcaagcatgagtcttaccgcggcaatgccagccctggagcagcaacccatgattccctttcagactatggcccgcaagacagcagacccacgccaatgcggcgggtccctggcagagttggtggtcgggagggcatgaggggtcggtccccttctcaatatcatgactttgcagaaaaattgaaaatgtctcctgggcggagcagaggcccagggggagaccctcatcacatgaatccacacatgaccttttcagagagggctaaccggagttctttacacactcccttttctcccaactcagaaaccctggcctctgcttatcatgcaaatactcgggctcatgcttatggggaccctaacgcaggtttgaattctcagctgcattataagagacagatgtaccaacagcaaccagaggagtataaagactggagcagcggttctgctcagggagtaattgctgcagcacagcacaggcaggaggggccacggaagagtccaaggcagcagcagtttcttgacagagtacggagccctctgaaaaatgacaaagatggtatgatgtatggcccaccagtggggacttaccatgaccccagtgcccaggaggctgggcgctgcctaatgtctagtgatggtctgcctaacaagggcatggaattaaagcatggctcccagaagttacaagaatcctgttgggatctttctcggcaaacttctccagccaaaagcagcggtcctccaggaatgtccagtcaaaaaaggtatgggccgccccatgagactgatggacatggactagctgaggctacacagtcatccaaacctggtagtgttatgctgagacttccaggccaggaggatcattcttctcaaaaccccttaatcatgaggaggcgtgttcgttcttttatctctcccattcccagtaagagacagtcacaagatgtaaagaacagtagcactgaagataaaggtcgcctccttcactcatcaaaagaaggcgctgataaagcattcaattcctatgcccatctttctcacagtcaggatatcaagtctatccctaagagagattcctccaaggaccttccaagtccagatagtagaaactgccctgctgttaccctcacaagccctgctaagaccaaaatactgcccccacggaaaggacggggattgaaattggaagctatagttcagaagattacatccccaaatattaggaggagcgcatcttcgaacagtgcggaggctgggggagacacggttacgcttgatgatatactgtctttgaagagtggtcctcctgaaggtgggagtgttgctgttcaggatgctgacatagagaagagaaaaggtgaggtggcttcggacctagtcagtccagcaaaccaggagttgcacgtagagaaacctcttccaaggtcttcagaagagtggcgtggcagcgtggatgacaaagtgaagacagagacacatgcagaaacagttactgccggaaaggaaccccctggtgccatgacatccacaacctcacagaagcctggtagtaaccaagggagaccagatggttccctgggtggaacagcacctttaatctttccagactcaaagaatgtacctccagtgggcatattggcccctgaggcaaaccccaaggctgaagagaaggagaacgatacagtgacgatttcaccgaagcaagagggtttccctccaaagggatatttcccatcaggaaagaagaaggggagacccattggtagtgtgaataagcaaaagaaacagcagcagccaccgcctccaccccctcagcccccacagataccagaaggttctgcagatggagagccaaagccaaaaaaacagaggcaaaggagggagagaaggaagcctggggcccagccgaggaagcgaaaaaccaaacaagcagttcccattgtggaaccccaagaacctgagatcaaactaaaatatgccacccagccactggataaaactgatgccaagaacaagtctttttacccttacatccatgtagtaaataagtgtgaacttggagccgtttgtacaatcatcaatgctgaggaagaagaacagaccaaattagtgaggggcaggaagggtcagaggtcactgacccctccacctagcagcactgaaagcaaggcgctcccggcctcgtcctttatgctgcagggacctgttgtgacagagtcttcggttatggggcacctggtttgctgtctgtgtggcaagtgggccagttaccggaacatgggtgacctctttggacctttttatccccaagattatgcagccactctcccgaagaatccacctcctaagagggccacagaaatgcagagcaaagttaaggtacggcacaaaagtgcttctaatggctccaagacggacactgaggaggaggaagagcagcagcagcagcagaaggagcagagaagcctggccgcacaccccaggtttaagcggcgccaccgctcggaagactgtggtggaggccctcggtccctgtccagggggctcccttgtaaaaaagcagccactgagggcagcagtgaaaagactgttttggactcgaagccctccgtgcccaccacttcagaaggtggccctgagctggagttacaaatccctgaactacctcttgacagcaatgaattttgggtccatgagggttgtattctctgggccaatggaatctacctggtttgtggcaggctctatggcctgcaggaagcgctggaaatagccagagagatgaaatgttcccactgccaggaggcaggcgccaccttgggctgctacaacaaaggctgctccttccgataccattacccgtgtgccattgatgcagattgtttgctacatgaggagaacttctcggtgaggtgccctaagcacaagcctccccttccgtgccctctcccccccttgcagaacaagaccgcgaaaggcagcctcagcacagagcagtcggagcgggggtgaggggggcagtgtgctcgtgggaatggaaaggacagcaagcacaggtgagactgtggagatgagaaggtggtggacactcgtgatggaatggaaatcgtcctaccgtgcagccacaccctgccctgccccgccccgccccgcccgcgtgcctgcccatgccagcacttccttaagttctcacatcacactcaaaccagtgacaccacaggaaagaaagacccaagacgttggaatggctgtttccatggacacaatctccatagtgacaatgtggggggaggggggaggggtgggatgatggggaaagggtggggggaattaaaagggagggataaatatatatatataaatctatttttagtctggaaagactttgtttaaatgaaaggtgcgctatcccttttgattctgttttaaaattatctcgttaaagatctccaaatttgttccgatgacaagtgaaatttaaatgtgagattgaactgaacaaaccctcatctcatgaaggacggggtgtgtgtgtggcgttgatctttagcctgtctcacaccagttcagaaaacactagacccaggattgaaaaagcaaaccacagcagaaccatccttttgtcattaatttgtctcaaagtgggaaggttttgggggagggggaaatacagggatggtccatgttttcaagagtaggggaatgatgtttaaacacaaaaataaattttttttcatttccagaaacactatttatttatggttttttttttttaattttttctttttgggggtgaaattggcagatgcctgaggtcatagctgtgtcctgggtcactgtggctggtgaggacctcaaggaccccatcaagtgtacacagcagcagcaaaatcaagggatgaccctcctctggggccccctgtcctcagcacattccaggcagctgtgccctgacccacagggacccgtggggatgggaggaggtccaggcctgtgttgccagagctggcagtgtgagctgtaggcagggacggggagggactgtcgctgtgatcagagtgggttaagctgaccaggaacacccatttaacccctttttctttttgctttcatttttataaaggaaaagaggacctgtcagataggcagccccatgctacgtgattctttatgttgtgttgttttgttttgtaaattgtataatttttaaatatctgagttttaaaaaaagaaaaaagtacaaaaaaatcttgttatggccttaagaaggggttagtgcatctttcaggggtcactctgccatggggataaaatagctgtttcacaaacagttttatttaaaaaaacaaaaaacaaaaaaaatcaaaaaatcaaaaaaataataaacttcattttaaccttg

SEQ ID NO: 158213 - protein, 406 aa, Artificial Sequence
  derived and/or modified sequence
MSGCPFLGNNFGYTFKKLPVEGSEEDKSQTGVNRASKGGLIYGNYLHLEKVLNAQELQSETKGNKIHDEHLFIITHQAYELWFKQILWELDSVREIFQNGHVRDERNMLKVVSRMHRVSVILKLLVQQFSILETMTALDFNDFREYLSPASGFQSLQFRLLENKIGVLQNMRVPYNRRHYRDNFKGEENELLLKSEQEKTLLELVEAWLERTPGLEPHGFNFWGKLEKNITRGLEEEFIRIQAKEESEEKEEQVAEFQKQKEVLLSLFDEKRHEHLLSKGERRLSYRALQGALMIYFYREEPRFQVPFQLLTSLMDIDSLMTKWRYNHVCMVHRMLGSKAGTGGSSGYHYLRSTVSDRYKVFVDLFNLSTYLIPRHWIPKMNPTIHKFLYTAEYCDSSYFSSDESD

SEQ ID NO: 158214 - DNA, 1221 bp, Artificial Sequence
  derived and/or modified sequence
atgagcggctgccccttcctgggcaacaacttcggctacaccttcaagaagctgcccgtggagggcagcgaggaggacaagagccagaccggcgtgaacagagccagcaagggcggcctgatctacggcaactacctgcacctggagaaggtgctgaacgcccaggagctgcagagcgagaccaagggcaacaagatccacgacgagcacctgttcatcatcacccaccaggcctacgagctgtggttcaagcagatcctgtgggagctggacagcgtgagagagatcttccagaacggccacgtgagagacgagagaaacatgctgaaggtggtgagcagaatgcacagagtgagcgtgatcctgaagctgctggtgcagcagttcagcatcctggagaccatgaccgccctggacttcaacgacttcagagagtacctgagccccgccagcggcttccagagcctgcagttcagactgctggagaacaagatcggcgtgctgcagaacatgagagtgccctacaacagaagacactacagagacaacttcaagggcgaggagaacgagctgctgctgaagagcgagcaggagaagaccctgctggagctggtggaggcctggctggagagaacccccggcctggagccccacggcttcaacttctggggcaagctggagaagaacatcaccagaggcctggaggaggagttcatcagaatccaggccaaggaggagagcgaggagaaggaggagcaggtggccgagttccagaagcagaaggaggtgctgctgagcctgttcgacgagaagagacacgagcacctgctgagcaagggcgagagaagactgagctacagagccctgcagggcgccctgatgatctacttctacagagaggagcccagattccaggtgcccttccagctgctgaccagcctgatggacatcgacagcctgatgaccaagtggagatacaaccacgtgtgcatggtgcacagaatgctgggcagcaaggccggcaccggcggcagcagcggctaccactacctgagaagcaccgtgagcgacagatacaaggtgttcgtggacctgttcaacctgagcacctacctgatccccagacactggatccccaagatgaaccccaccatccacaagttcctgtacaccgccgagtactgcgacagcagctacttcagcagcgacgagagcgactag

SEQ ID NO: 158215 - DNA, 1221 bp, Artificial Sequence
  derived and/or modified sequence
atgtcgggctgtccttttttagggaataatttcgggtatacctttaaaaaactgccagtggagggctcagaagaagataaatcccaaactggagtgaatcgtgcctccaaaggcggcctaatctatgggaactacctccacctggaaaaagtgctcaatgctcaagagcttcagagcgaaactaaaggaaataaaatacacgatgagcatctgtttatcataacccaccaagcctacgagttatggttcaagcagatcctgtgggagctcgacagcgtgcgcgaaatcttccagaatggacatgtgcgagacgagcgaaatatgctgaaggtcgtcagccgcatgcaccgggtttccgtaatactcaagctgctcgtccagcagttctctatcctcgaaactatgaccgccctggactttaacgacttccgcgaatatttgagcccggcttctgggttccaaagcctgcaattcagattgctggaaaacaaaattggagttttacaaaatatgagagttccttacaatcgcaggcattaccgggataactttaaaggtgaggaaaatgagttactgttaaaatccgagcaggaaaagaccctgttagagcttgtcgaagcttggcttgagagaacacccggccttgagccgcatgggtttaacttttggggcaagttggagaagaatatcactcgaggcctggaagaagagtttataagaattcaggcaaaagaggaatccgaggagaaggaggagcaggtagccgaattccagaagcaaaaagaggtgttactgagtctctttgacgagaagcgccacgaacacctactcagcaaaggtgaaaggcgtctcagctacagagcccttcagggagccctaatgatctacttttacagagaagaacccagattccaggtgccctttcagctgctcactagcctaatggatattgattccctaatgacaaagtggagatataatcacgtctgtatggttcatagaatgctaggatccaaagccggaaccggcgggagcagcggttaccactacttgaggagcaccgtttcagatagatacaaagtttttgttgatctgttcaacctcagcacttatctaatccccaggcattggattcccaaaatgaaccctacaattcataaatttctctacacggccgagtactgtgactcctcttacttctcctccgacgaatctgattag

SEQ ID NO: 158216 - DNA, 1221 bp, Artificial Sequence
  derived and/or modified sequence
atgagcggctgccccttcctgggcaacaactttggctacaccttcaagaagctgcctgtggagggcagcgaggaggacaagagccagacaggagtgaacagagccagcaaaggaggcctcatctacggcaactacctgcacctggagaaggtgctgaatgcccaggagctgcagagcgagaccaagggcaacaagatccatgatgagcacctgttcatcatcacccaccaggcctatgagctgtggttcaagcagatcctgtgggagctggacagcgtgcgggagatcttccagaatggacatgtgagagatgagaggaacatgctgaaggtggtgtccaggatgcaccgggtgtctgtcatcctgaagctgctggtgcagcagttcagcatcctggagaccatgacagccctggacttcaatgacttccgggagtacctgagccctgccagcggcttccagagcctgcagttccggctgctggagaacaagattggagtgctgcagaacatgagggtgccctacaacagaagacactacagagacaacttcaagggggaggagaatgagctgctgctgaagtctgagcaggagaagaccctgctggagctggtggaggcctggctggagaggaccccaggcctggagccccacggcttcaacttctggggcaagctggagaagaacatcacccggggcctggaggaggagttcatccgcatccaggccaaggaggagagcgaggagaaggaggagcaggtggccgagttccagaagcagaaggaggtgctgctgagcctgtttgatgagaagagacatgagcacctgctgagcaaaggagagcggcggctgagctaccgggccctgcagggcgccctgatgatctacttctaccgggaggagccccgcttccaggtgcccttccagctgctgaccagcctgatggacatcgacagcctgatgaccaagtggagatacaaccacgtgtgcatggtgcacaggatgctgggcagcaaggccggcaccggcggcagcagcggctaccactacctgcggagcacagtgtctgaccgctacaaggtgtttgtggacctcttcaacctgagcacctacctgatccccaggcactggatccccaagatgaaccccaccatccacaagttcctgtacacagctgagtactgtgacagcagctacttcagcagtgatgaaagtgactag

SEQ ID NO: 158217 - DNA, 1221 bp, Artificial Sequence
  derived and/or modified sequence
atgagcggctgccccttcctgggcaacaacttcggctacaccttcaagaagctccccgttgagggaagcgaggaggacaagtcccagactggcgtaaaccgcgctagtaaaggcgggctcatctatggtaattacctgcacctcgagaaggtccttaacgcacaagagttgcaaagcgaaactaagggcaataagatccatgatgaacacttgtttatcatcacacatcaggcgtatgagttatggttcaaacagattctgtgggagctggactctgtgcgagagatctttcagaatgggcatgtccgggacgagaggaacatgttgaaagtggtgtcccgaatgcacagggtgagcgtcatactcaaattgctggtgcagcagtttagtatacttgaaacaatgacagcgctggatttcaacgactttcgggagtacctatctcccgccagtggcttccagtctcttcagttccggctccttgagaacaaaatcggcgttctccaaaatatgcgagtcccatataacaggcgacattacagagacaattttaaaggagaggaaaacgaactcctactcaagtcggagcaagaaaagacactcctggagcttgttgaggcctggctggagagaaccccagggctcgaaccacatggattcaacttctgggggaagctggagaagaatattactagaggcctcgaggaagaatttattaggattcaggccaaggaggagagtgaggaaaaagaagagcaggtggcagaatttcagaagcagaaggaagtcttgttaagcctgtttgacgagaaaagacatgaacatctcctcagcaagggcgagcggcgactgagctatcgagcgctccagggcgcactcatgatatatttctaccgcgaagagccgcggtttcaggttccattccagctgctgaccagcttaatggacatcgattccctcatgaccaaatggaggtacaaccacgtctgtatggtacatcgaatgctgggctccaaagccggaaccgggggcagcagcggctaccattatctccgttccacagtgtctgacaggtacaaagtgttcgtggacctatttaatctaagcacatatctgatccctcggcactggatcccaaaaatgaatcccacgatacacaagttcctgtacacagccgagtattgtgattcttcctacttctcctctgacgagtccgattag

SEQ ID NO: 158218 - DNA, 1221 bp, Artificial Sequence
  derived and/or modified sequence
atgagtggctgccctttcctgggtaataattttggatacacattcaaaaaactccctgtggaaggcagtgaggaggataagtcccagactggcgtgaatcgggcatccaagggcggactcatttatgggaactacttacacttagaaaaagtcctcaatgcgcaagaactgcagtcagaaaccaagggtaataaaattcacgatgaacatttgttcattattacccaccaggcctatgagctgtggtttaaacagattctgtgggagctggattccgtgcgagagattttccagaatggtcacgtgcgcgatgagaggaatatgctcaaggttgttagccgaatgcaccgggtgagcgttatcctcaagctcctggtccagcagtttagcatactcgaaacgatgactgccttggacttcaacgattttagggagtacttatctcccgcttcgggctttcaatctcttcagttccggctgctagaaaacaagattggagtacttcagaatatgcgcgtgccatacaatcgccgacactacagggacaacttcaaaggggaggagaacgaactgttactgaagtctgagcaggagaaaactttactcgaactggtggaggcatggcttgaaagaacccccggactagagcctcatggctttaacttctgggggaagctggaaaagaatataacgcgcggtttggaagaagaattcattcggattcaagccaaggaagagtccgaagaaaaagaagaacaggttgccgagttccagaaacagaaggaggtgttgttgtccctgtttgacgagaagagacacgaacacctcttaagcaaaggggagcgcagattatcctatagggcgctgcagggagcactgatgatttacttttaccgcgaggagccaaggttccaggtgccttttcagctcttgacctcgctcatggatatcgattcactgatgaccaagtggcggtataaccatgtgtgtatggtgcatcggatgctgggttcaaaagctggcactggaggctctagcggctaccactacctgcgaagcacagtgtccgacagatacaaagtgtttgtggacctgttcaatctgtcaacttatctgatccccaggcattggattcccaaaatgaatcccactatccacaagttcctctacacagctgagtactgcgactccagctacttctccagcgacgagagcgactag

SEQ ID NO: 158219 - DNA, 1701 bp, Artificial Sequence
  derived and/or modified sequence
aaggtcaatgatagcatctgcctagagtcaaacctccgtgcttctcagacagtgccttttcaccatgagtgggtgcccatttttaggaaacaactttggatatacttttaaaaaactccccgtagaaggcagcgaagaagacaaatcacaaactggtgtgaatagagccagcaaaggaggtcttatctatgggaactacctgcatttggaaaaagttttgaatgcacaagaactgcaaagtgaaacaaaaggaaataaaatccatgatgaacatctttttatcataactcatcaagcttatgaactctggtttaagcaaatcctctgggagttggattctgttcgagagatctttcagaatggccatgtcagagatgaaaggaacatgcttaaggttgtttctcggatgcaccgagtgtcagtgatcctgaaactgctggtgcagcagttttccattctggagacgatgacagccttggacttcaatgacttcagagagtacttatctccagcatcaggcttccagagtttgcaattccgactattagaaaacaagataggtgttcttcagaacatgagagtcccttataacagaagacattatcgtgataacttcaaaggagaagaaaatgaactgctacttaaatctgagcaggaaaagacacttctggaattagtggaggcatggctggaaagaactccaggtttagagccacatggatttaacttctggggaaagcttgaaaaaaatatcaccagaggcctggaagaggaattcataaggattcaggctaaagaagagtctgaagaaaaagaggaacaggtggctgaatttcagaagcaaaaagaggtgctactgtccttatttgatgagaaacgtcatgaacatctccttagtaaaggtgaaagacggctgtcatacagagcacttcagggagcattgatgatatatttttacagggaagagcctaggttccaggtgccttttcagttgctgacttctcttatggacatagattcactgatgaccaaatggagatataaccatgtgtgcatggtgcacagaatgctgggcagcaaagctggcaccggtggttcctcaggctatcactacctgcgatcaactgtgagtgataggtacaaggtatttgtagatttatttaatctttcaacatacctgattccccgacactggataccgaagatgaacccaaccattcacaaatttctatatacagcagaatactgtgatagctcctacttcagcagtgatgaatcagattaaaatcgtctgcaaaatctatgaagaatactggtttcacagcctattttttattttctatggattttcataaatacagtttgaatatatgtatgcatatattgttcagcaccacgatgctctgatttaattctagaaacaatttgattacctcttgtttgtgacaagactaagcattaagatgagaaagaatacatttaaatagtaacattgtacatagggtgttttcctattaaaaattcagtttcccctgagacttaatgtaaccacttaatgtaatcactatctcattgtttcatctttataaacttgtaaacttcatctatttcaaatattttatgcagtacattatattattctgtacaaaggctttcaaacaaaatttttaaaataataaagtattaatctttctccctgta

SEQ ID NO: 158220 - protein, 500 aa, Artificial Sequence
  derived and/or modified sequence
MAGGGGSSDGSGRAAGRRASRSSGRARRGRHEPGLGGPAERGAGEARLEEAVNRWVLKFYFHEALRAFRGSRYGDFRQIRDIMQALLVRPLGKEHTVSRLLRVMQCLSRIEEGENLDCSFDMEAELTPLESAINVLEMIKTEFTLTEAVVESSRKLVKEAAVIICIKNKEFEKASKILKKHMSKDPTTQKLRNDLLNIIREKNLAHPVIQNFSYETFQQKMLRFLESHLDDAEPYLLTMAKKALKSESAASSTGKEDKQPAPGPVEKPPREPARQLRNPPTTIGMMTLKAAFKTLSGAQDSEAAFAKLDQKDLVLPTQALPASPALKNKRPRKDENESSAPADGEGGSELQPKNKRMTISRLVLEEDSQSTEPSAGLNSSQEAASAPPSKPTVLNQPLPGEKNPKVPKGKWNSSNGVEEKETWVEEDELFQVQAAPDEDSTTNITKKQKWTVEESEWVKAGVQKYGEGNWAAISKNYPFVNRTAVMIKDRWRTMKRLGMN

SEQ ID NO: 158221 - DNA, 1503 bp, Artificial Sequence
  derived and/or modified sequence
atggccggcggcggcggcagcagcgacggcagcggcagagccgccggcagaagagccagcagaagcagcggcagagccagaagaggcagacacgagcccggcctgggcggccccgccgagagaggcgccggcgaggccagactggaggaggccgtgaacagatgggtgctgaagttctacttccacgaggccctgagagccttcagaggcagcagatacggcgacttcagacagatcagagacatcatgcaggccctgctggtgagacccctgggcaaggagcacaccgtgagcagactgctgagagtgatgcagtgcctgagcagaatcgaggagggcgagaacctggactgcagcttcgacatggaggccgagctgacccccctggagagcgccatcaacgtgctggagatgatcaagaccgagttcaccctgaccgaggccgtggtggagagcagcagaaagctggtgaaggaggccgccgtgatcatctgcatcaagaacaaggagttcgagaaggccagcaagatcctgaagaagcacatgagcaaggaccccaccacccagaagctgagaaacgacctgctgaacatcatcagagagaagaacctggcccaccccgtgatccagaacttcagctacgagaccttccagcagaagatgctgagattcctggagagccacctggacgacgccgagccctacctgctgaccatggccaagaaggccctgaagagcgagagcgccgccagcagcaccggcaaggaggacaagcagcccgcccccggccccgtggagaagccccccagagagcccgccagacagctgagaaacccccccaccaccatcggcatgatgaccctgaaggccgccttcaagaccctgagcggcgcccaggacagcgaggccgccttcgccaagctggaccagaaggacctggtgctgcccacccaggccctgcccgccagccccgccctgaagaacaagagacccagaaaggacgagaacgagagcagcgcccccgccgacggcgagggcggcagcgagctgcagcccaagaacaagagaatgaccatcagcagactggtgctggaggaggacagccagagcaccgagcccagcgccggcctgaacagcagccaggaggccgccagcgccccccccagcaagcccaccgtgctgaaccagcccctgcccggcgagaagaaccccaaggtgcccaagggcaagtggaacagcagcaacggcgtggaggagaaggagacctgggtggaggaggacgagctgttccaggtgcaggccgcccccgacgaggacagcaccaccaacatcaccaagaagcagaagtggaccgtggaggagagcgagtgggtgaaggccggcgtgcagaagtacggcgagggcaactgggccgccatcagcaagaactaccccttcgtgaacagaaccgccgtgatgatcaaggacagatggagaaccatgaagagactgggcatgaactag

SEQ ID NO: 158222 - DNA, 1503 bp, Artificial Sequence
  derived and/or modified sequence
atggcaggcggtggaggctcctctgacgggtcgggaagagccgccggcaggcgggcatccaggtcttcaggccgcgctcggaggggtcggcatgagcccggattgggcggccccgcggaaaggggagccggagaggctcggcttgaggaggccgtgaaccgctgggtgctgaaattctactttcacgaggccctgagagccttcaggggatctagatacggggatttcaggcaaattcgtgacataatgcaggcactgctggtcagaccattgggcaaggaacacactgtgagtaggctccttagggtcatgcagtgcctgtcgcgaattgaagaaggggagaatctcgattgtagcttcgatatggaggccgagctgaccccgctggaatcagctatcaatgtgttggagatgatcaaaaccgaatttaccctaacggaagcagtggtggagagttcacggaagctggtgaaagaagccgcagtcattatctgtattaaaaataaagaattcgaaaaggccagtaaaatcctcaagaagcacatgtctaaagacccaaccacacagaagctccggaacgacttactaaatatcatacgcgagaagaatctcgctcacccagtcatacagaacttttcatacgaaacatttcagcagaagatgctgcggttcctagagagccatcttgatgatgctgaaccttatctgcttacaatggctaagaaggctctgaagagcgagtcagccgcctcttcaaccgggaaagaagataaacagccagctcccggccctgtggaaaagccgccaagagaaccggctcgacaactgaggaatccgcccacgaccatcggaatgatgactctcaaggccgcattcaagaccctgtctggggcccaggactccgaagcagccttcgctaagctggaccagaaagacctggtattaccaacccaggccctacccgcctctcccgcattgaaaaataagagaccaagaaaagacgagaacgaatcttccgcccccgccgacggcgaaggagggtccgaattacaaccaaaaaataagagaatgacaataagcagattggtactggaagaagattctcagtcaaccgaaccaagcgctggattgaactcttcccaggaggccgcttcagcaccaccttccaaaccaacggtcttgaaccagcctctgcctggggagaagaaccccaaagtgccaaaaggaaagtggaattccagtaacggcgtcgaggagaaagagacttgggttgaggaggacgaacttttccaggtccaggcggcccctgatgaggattcaactactaacataacaaaaaaacagaagtggaccgtggaggaaagtgagtgggtcaaagctggtgtgcagaaatatggcgagggaaactgggctgccatttcaaagaattatccctttgtcaacaggactgctgtcatgatcaaagataggtggcgcaccatgaaacgcctgggaatgaactag

SEQ ID NO: 158223 - DNA, 1503 bp, Artificial Sequence
  derived and/or modified sequence
atggccggcggcggcggcagcagtgatggcagcggccgggctgctggaagaagagccagccgcagcagcggccgggcccggcggggcagacatgagcccggcctgggcggccctgctgagagaggagctggggaggcccggctggaggaggccgtgaaccgctgggtgctgaagttctacttccacgaggccctgcgggccttccggggcagccgctatggagacttccggcagatccgggacatcatgcaggccctgctggtgcggcccctgggcaaggagcacacagtgtcccggctgctgcgggtgatgcagtgcctgagccgcatcgaggagggggagaacctggactgcagctttgacatggaggccgagctgacccccctggagagcgccatcaacgtgctggagatgatcaagacagagttcaccctgacagaggccgtggtggagagcagcaggaagctggtgaaggaggccgctgtgatcatctgcatcaagaacaaggagtttgagaaggccagcaagatcctgaagaagcacatgagcaaggaccccaccacccagaagctgagaaatgacctgctgaacatcatccgggagaagaacctggcccaccctgtgatccagaacttctcctatgagaccttccagcagaagatgctgcgcttcctggagagccacctggatgatgctgagccctacctgctgaccatggccaagaaggccctgaagtctgagagcgctgccagcagcacaggcaaggaggacaagcagcctgcccctggccctgtggagaagccaccccgggagcccgcccggcagctgagaaatccacccaccaccatcggcatgatgaccctgaaggccgccttcaagaccctgagcggggcccaggacagcgaggccgcctttgccaagctggaccagaaggacctggtgctgcccacccaggccctgcctgccagccctgccctgaagaacaagaggcccaggaaggatgaaaatgaatcttctgccccagcagatggagagggcggcagcgagctgcagcccaagaacaagaggatgaccatcagccggctggtgctggaggaggacagccagagcacagagcccagcgctggcctgaacagcagccaggaggccgccagcgccccacccagcaagcccaccgtgctgaaccagcccctgcctggagagaagaaccccaaggtgcccaagggcaagtggaacagcagcaatggagtggaggagaaggagacctgggtggaggaggatgagctgttccaggtgcaggccgccccagatgaggacagcaccaccaacatcaccaagaagcagaagtggacagtggaggagagcgagtgggtgaaggccggcgtgcagaagtatggagagggcaactgggccgccatcagcaagaactacccctttgtgaacagaacagctgtgatgatcaaggaccgctggaggaccatgaagaggctgggcatgaactag

SEQ ID NO: 158224 - DNA, 1503 bp, Artificial Sequence
  derived and/or modified sequence
atggccggcggcggcggcagcagcgacggcagcggccgggccgccggccgccgggcatctcgttcatccggtcgggcccgccgcggcagacacgagcccggcctcggaggccctgcagagcggggcgcaggcgaggcccggttagaggaagctgttaatcgatgggttctgaaattttacttccatgaggccctgagagcgttccgaggaagcaggtacggcgactttcggcagatcagggatatcatgcaggccttgctcgtacggccgctgggtaaagagcatacggtgtctagactgcttagggtcatgcaatgtctgagccggatcgaagagggcgagaacctcgattgtagtttcgatatggaggccgaacttacccctctggaatctgccataaacgttctggaaatgattaaaaccgagttcaccctgactgaagccgtagtagagtcttccaggaagctggttaaggaggctgccgtaataatttgtataaagaataaagaatttgagaaagccagtaagatacttaaaaagcacatgtcaaaggatcctacaacacaaaagctccgaaacgatttattgaacatcatcagggagaagaatctcgctcaccctgttattcaaaacttctcgtatgagactttccagcagaaaatgctgcgattcctggagagccacctggatgatgctgaaccctacctcctgactatggctaagaaggcgcttaaaagtgagtccgcagcctcctcaactggtaaggaggataagcagccggcacccggaccagtggaaaagccaccaagggaaccagccagacagctccgcaatccccccaccacaatcggaatgatgacgttgaaagccgcattcaagaccctcagtggtgcacaggactccgaagccgcattcgctaagctagatcagaaggatctcgtgctgccgacccaggcccttcctgccagccccgccttgaaaaacaagcgcccgcgaaaggatgagaacgagagcagtgccccagccgacggagagggcggatccgagctccagccaaagaacaagagaatgaccatctctagacttgtgctggaggaggattcacagtcaacagaacccagcgccgggttaaacagctcccaagaagcagcctctgccccaccctctaaaccaaccgtgctgaaccagccactgccaggagagaagaatcctaaggtacctaagggcaaatggaattccagtaatggggtcgaagagaaggagacttgggtagaagaagacgaactgtttcaggtgcaggcagctcctgatgaagactctaccacaaacatcaccaaaaagcagaagtggaccgtggaggaatctgagtgggtcaaagccggtgtgcagaagtacggcgagggtaattgggcggcaatctccaaaaattatccctttgttaacaggacagctgtcatgattaaagatcggtggcgcaccatgaagcgtctaggaatgaactag

SEQ ID NO: 158225 - DNA, 1503 bp, Artificial Sequence
  derived and/or modified sequence
atggccggaggaggaggcagctctgatggctcaggccgagcagctggtaggcgagcgtctagaagttcaggtcgcgctcgccgtgggaggcacgaaccaggtctggggggacccgcagaacgtggggctggtgaagctagactagaggaagctgtgaaccgatgggtcctcaaattttacttccatgaggctttgcgcgctttccgcggttcccgttacggtgatttcaggcaaatcagggacatcatgcaggcactgcttgtccgtcccttgggcaaagagcatacagtgtccagactgctgcgggtaatgcagtgtctgtcccgcatcgaggagggggaaaatttggactgtagttttgacatggaggccgagttgactcctctggagtcagcaataaatgtgcttgaaatgatcaagaccgagttcaccctgacagaggctgtggtggagtcttcccgaaagttggtcaaggaggccgctgtgattatttgcatcaagaataaggaattcgagaaggccagcaaaatcctgaagaagcacatgagcaaagatcctaccacccagaagctcaggaatgatcttctgaacatcataagggaaaaaaacctcgcccatcctgtgatccagaatttcagctatgagactttccagcaaaagatgctgagatttctagaatcacacctggacgatgctgaaccatacctcctcacaatggccaagaaggccctgaaatctgaaagcgccgcatcatccacaggaaaagaggacaaacaaccggcacctggccctgtcgagaaacccccaagggagccagctcggcagttgagaaaccccccaactacaattggcatgatgaccctgaaggcggcatttaaaacactgagtggtgctcaggattctgaggcggcattcgctaagttggatcaaaaagaccttgtgctccccactcaggcccttcctgcgtcacccgctctgaaaaataagcgacccagaaaggatgagaatgagagctccgccccagccgacggagaaggtggctcagaattgcaaccaaaaaacaaaaggatgactatcagccggttagtactggaagaggatagccaatccacagaaccgtcggcaggactgaattccagtcaagaggcggctagtgctccccctagcaaacctaccgtcctcaatcaacctcttccaggagaaaaaaacccgaaggtgccgaaaggcaaatggaacagctcaaacggtgtggaggagaaagagacctgggtcgaggaagatgagttgtttcaggtccaggctgccccagacgaagatagcacaacgaacatcactaaaaagcagaaatggaccgtagaagagtccgaatgggtcaaagcaggcgtgcagaaatacggggaggggaattgggctgccatcagcaaaaactatcccttcgttaacagaaccgcagtgatgattaaggatagatggagaacaatgaagagactggggatgaactag

SEQ ID NO: 158226 - DNA, 2951 bp, Artificial Sequence
  derived and/or modified sequence
gggacggcgggccccgcttccggcccgggcgtcgtgcgtgacccagcggcgtcacagccgaggaagcggcccggccgggagggcggggagggcgcgcggcgatcggacacgatggcgggaggaggcgggagtagcgacggcagcgggcgggcagctggcaggcgggcgtcccgcagtagcgggcgggcccggcgggggcgccacgagccggggctggggggcccggcggagcgcggcgcgggggaggcacggctggaagaggcagtcaatcgctgggtgctcaagttctacttccacgaggcgctgcgggcctttcggggtagccggtacggggacttcagacagatccgggacatcatgcaggctttgcttgtcaggcccttggggaaggagcacaccgtgtcccgattgctgcgggttatgcagtgtctgtcgcggattgaagaaggggaaaatttagactgttcctttgatatggaggctgagctcacaccactggaatcagctatcaatgtgctggagatgattaaaacggaatttacactgacagaagcagtggtcgaatccagtagaaaactggtcaaggaagctgctgtcattatttgtatcaaaaacaaagaatttgaaaaggcttcaaaaattttgaaaaaacatatgtccaaggaccccacaactcagaagctgagaaatgatctcctgaatattattcgagaaaagaacttggcccatcctgttatccagaacttttcatatgagaccttccagcagaagatgctgcgcttcctggagagccacctggatgacgccgagccctacctcctcacgatggccaaaaaggctttgaaatctgagtccgctgcctcaagtacagggaaggaagataaacagccagcaccagggcctgtggaaaagccacccagagaacccgcaaggcagctacggaatcctccaaccaccattggaatgatgactctgaaagcagctttcaagactctgtctggtgcacaggattctgaggcagcctttgcaaaactggaccagaaggatctggttcttcctactcaagctctcccagcatcaccagccctcaaaaacaagagacccagaaaagatgaaaacgaaagttcagccccggctgacggtgagggtggctcggaactgcagcccaagaacaagcgcatgacaataagcagattggtcttggaggaggacagccagagtactgagcccagcgcaggcctcaactcctcccaggaggccgcttcagcgccaccatccaagcccaccgttctcaaccaacccctccctggagagaagaatcccaaagtacccaaaggcaagtggaacagctctaatggggttgaagaaaaggagacttgggtggaagaggatgaactgtttcaagttcaggcagcaccagatgaagacagtacaaccaatataacaaaaaagcagaagtggactgtagaagaaagcgagtgggtcaaggctggagtgcagaaatatggggaaggaaactgggctgccatttctaaaaattacccatttgttaaccgaacagctgtgatgattaaggatcgctggcggaccatgaaaagacttggcatgaactgaaacaggctttcatttccacagaattcacaggagcatggttcctaataatagcccctgatagtctgctctttctttctttttcttttttttttttttttgagacagagtctcgctctgtcacccaggctggagtgcagtggcgtgatctcggctcactgcgacctccgtctcccgggctcacgccattctcctgcctcagcctcccgagtagctgggactacaggcgcccgccatcacgcccggctaatgttttgtatttttagtagagacggggtttcaccgtgttagccaggatggtctcgatctcctgacctcgtgatccacccaactcggcctcccaaagtgctgggattacaggcatgagccaccgcgcctggcatctgctgtttctttcagaagctgggctgggatgagaattttgggcaacctccttcgacgtgggggaggtcccatttccacttcatcactgttggagatcatggagctaagaagcagagccaagtccacccatgtccttggcagagatgacaggcacacagcttgtgcagtgccagaatatcattagcgtttcccttctttagtggtttgcttaaatttaaatccctggtaatctgtagaaccttctcctaggaaatggtgaagtctattaggagccacttgtgactccatgacctgttaaaaccagcaatgtgagtattatttggagtaaatttgttccacgtcaagttctggccttctgatgcaaatgcaaaggaacttagtctgttatgaacccaggttgatgacagaccagtccttgtggaataagattccctttaaaaactctttagccagtcgtgacatcaaccctagacctgtctgccttggcatttgctgtcaacatctgctgggctatgtaggcaggttaatcctccacttctcatgtggttgaaccagtgtgttttttggtaaaatggtgattgtagataagattagttccctgatcccctgccccctgtcccctgcctcttttcccaattcccttccttatgctggacttttaaagcttaaaaaaaatccgattgaatataaatgcctaatttcattctttgtgaaatggttgcttcctcctgattccctaattgtgctgtgttcgtgtcttgcactggaattcaacattcccttctccttttgtactgtgttgtgcttgctgtctctcccggacacccttaaagactgtctttttagcaaaaaatttcagtaaagtgttttctgtaatctttttttaaaaggtgagaactaattattgtccatacttgtagcattcttcattaaagtcttgcttctctcaactgtaa

SEQ ID NO: 158227 - protein, 502 aa, Artificial Sequence
  derived and/or modified sequence
MAWALKLPLADEVIESGLVQDFDASLSGIGQELGAGAYSMSDVLALPIFKQEESSLPPDNENKILPFQYVLCAATSPAVKLHDETLTYLNQGQSYEIRMLDNRKLGELPEINGKLVKSIFRVVFHDRRLQYTEHQQLEGWRWNRPGDRILDIDIPMSVGIIDPRANPTQLNTVEFLWDPAKRTSVFIQVHCISTEFTMRKHGGEKGVPFRVQIDTFKENENGEYTEHLHSASCQIKVFKPKGADRKQKTDREKMEKRTPHEKEKYQPSYETTILTECSPWPEITYVNNSPSPGFNSSHSSFSLGEGNGSPNHQPEPPPPVTDNLLPTTTPQEAQQWLHRNRFSTFTRLFTNFSGADLLKLTRDDVIQICGPADGIRLFNALKGRMVRPRLTIYVCQESLQLREQQQQQQQQQQKHEDGDSNGTFFVYHAIYLEELTAVELTEKIAQLFSISPCQISQIYKQGPTGIHVLISDEMIQNFQEEACFILDTMKAETNDSYHIILK

SEQ ID NO: 158228 - DNA, 3715 bp, Artificial Sequence
  derived and/or modified sequence
gacgtcatgttcgccgggcaggcgaggaaagaggacgccatgattggttggcgctggggcggcggacggtggaagggcctggcgagtctaggttttacgcctgtgctggactttctccttccatgtttccaggccgtggggggctacagagggcgagaagtcggctcagcggaaacctggatttggttctaagccgtggggttgagaaggggtgaccggaagtgatcgtgggactgaccggaagcgaggcctggaggggaaagagagagcgagacctgggagggagggggcctccagcagaaaggggcgggggaaaaggtgcaaaagcagcgtgggagcgccgggctggcttcctgcggctgctgctggtctgactgggaagcagcaagccaccactacgaactctcaagaggagtgggagtgcgggagtccagagctgcctctgggaagtctgcagtagttgagcaaaggggtcctcacgttcctgagagctgggcaggggggattttggaacctggggcagccaagaacgagcagccaagggtacgggagattagttgtgcacagagcagtgctggtcgggcttgggggtggctggtgggcactgcgtgggaaaccttggtttgtagttttcttggtttgcgttactcctgttgggtagaattaccctccgcgcctttgtacaagacacggtgtctcctggggcaaggaaggagccaggatggcctgggctctgaagctgcctctggccgacgaagtgattgaatccgggttggtgcaggactttgatgctagcctgtccgggatcggccaggaactgggtgctggtgcctatagcatgagtgatgtccttgcattgcccatttttaagcaagaagagtcgagtttgcctcctgataatgagaataaaatcctgccttttcaatatgtgctttgtgctgctacctctccagcagtgaaactccatgatgaaaccctaacgtatctcaatcaaggacagtcttatgaaattcgaatgctagacaataggaaacttggagaacttccagaaattaatggcaaattggtgaagagtatattccgtgtggtgttccatgacagaaggcttcagtacactgagcatcagcagctagagggctggaggtggaaccgacctggagacagaattcttgacatagatatcccgatgtctgtgggtataatcgatcctagggctaatccaactcaactaaatacagtggagttcctgtgggaccctgcaaagaggacatctgtgtttattcaggtgcactgtattagcacagagttcactatgaggaaacatggtggagaaaagggggtgccattccgagtacaaatagataccttcaaggagaatgaaaacggggaatatactgagcacttacactcggccagctgccagatcaaagttttcaagcccaaaggtgcagacagaaagcaaaaaacggatagggaaaaaatggagaaacgaacacctcatgaaaaggagaaatatcagccttcctatgagacaaccatactcacagagtgttctccatggcccgagatcacgtatgtcaataactccccatcacctggcttcaacagttcccatagcagtttttctcttggggaaggaaatggttcaccaaaccaccagccagagccaccccctccagtcacagataacctcttaccaacaaccacacctcaggaagctcagcagtggttgcatcgaaatcgtttttctacattcacaaggcttttcacaaacttctcaggggcagatttattgaaattaactagagatgatgtgatccaaatctgtggccctgcagatggaatcagactttttaatgcattaaaaggccggatggtgcgtccaaggttaaccatttatgtttgtcaggaatcactgcagttgagggagcagcaacaacagcagcagcaacagcagcagaagcatgaggatggagactcaaatggtactttcttcgtttaccatgctatctatctagaagaactaacagctgttgaattgacagaaaaaattgctcagcttttcagcatttccccttgccagatcagccagatttacaagcaggggccaacaggaattcatgtgctcatcagtgatgagatgatacagaactttcaggaagaagcatgttttattctggacacaatgaaagcagaaaccaatgatagctatcatatcatactgaagtaggagtgcggcgtttcgtgcccagtggctgctccttccttcacctctgaaaacggccctcttgaagggggatatgaatggagatttgaaggtctgcaagaacctgactcgtctgactgtgtgtggaggagtccaggccatggaggcagaatcctggccctctgtgttggcccaagctcttgtggtacacacagattactgcccaatatgcagttctgcagctgttttagttaaatttctggaccttgttgttgttaaatatcagtagaaactctacataatttagagtgtatgtagggcataatgatgatgggaattgtgtgatgtttaacaggaagatcttaaattttgtgatatggagccctgtaatttttttcttatataaaaatgggtatctatattcataagactaggtcttcaatctctttgtactggtctcaaatgtactggtatctctgctttttgccacagtttgtccctgaaaactttatcagtgaggagaaatacagaattttccttttggttcccctgtaataccacaactaatagtattttcagctaacatttattgaccaggcagtgtgataaattttttgaatgaccatcttgtttaaccccctaatcacactatctgaagtaggtgctatagtgacccccaaccgaagatgaggaaatggagacacacagtggctaagtagcttgctaggtgccaggagctggcaggcagtgatgctgaaatccaaaccaggcaatctggccctccttattcaccctctcataccaccagtgctacccattataacctgtgttcacttcgcttattactgtggcccttctggtgactacaacataacactgagtatgaactgaggaattaaccactgaaagagacaaagcacacctaaataatgatgaacaaatcaagacctacaagaaatgaacacatagatgctttttaagtgtcattagttatcggaatcaaagaatttgaggtggtgacaactggggattatctgtaactccccaaatttactgttcttgaatgacattctcaaactatttattaatgagttagtctcatccctgctttctgtttcctctctctgcatcttctcttggcataggaagttattttactcatgctatgttttttaatagaagctttacaaaaaaagatgcattcccttcctgttcacactcttaccatgtttttgttcttccttaagaatgattgtgtgtgtgtgtgtgtgtgtgtgtaagtgtgtaagtgtaacatcatgggttttctttcttcacttgtaaagttttatctagaaatacttttacaggttatgttgaggtacacaaagataatgttctaagattgtgtattggatttggatttgtgtgtgtgtgtgtgtgtgtgtgtgtttaaagcatttgataaggtttaaatgttttttatacagagatttttgttcattaaactcaatctgcatcatggtctaa

SEQ ID NO: 158229 - DNA, 1509 bp, Artificial Sequence
  derived and/or modified sequence
atggcctgggccctgaagctgcccctggccgacgaggtgatcgagagcggcctggtgcaggacttcgacgccagcctgagcggcatcggccaggagctgggcgccggcgcctacagcatgagcgacgtgctggccctgcccatcttcaagcaggaggagagcagcctgccccccgacaacgagaacaagatcctgcccttccagtacgtgctgtgcgccgccaccagccccgccgtgaagctgcacgacgagaccctgacctacctgaaccagggccagagctacgagatcagaatgctggacaacagaaagctgggcgagctgcccgagatcaacggcaagctggtgaagagcatcttcagagtggtgttccacgacagaagactgcagtacaccgagcaccagcagctggagggctggagatggaacagacccggcgacagaatcctggacatcgacatccccatgagcgtgggcatcatcgaccccagagccaaccccacccagctgaacaccgtggagttcctgtgggaccccgccaagagaaccagcgtgttcatccaggtgcactgcatcagcaccgagttcaccatgagaaagcacggcggcgagaagggcgtgcccttcagagtgcagatcgacaccttcaaggagaacgagaacggcgagtacaccgagcacctgcacagcgccagctgccagatcaaggtgttcaagcccaagggcgccgacagaaagcagaagaccgacagagagaagatggagaagagaaccccccacgagaaggagaagtaccagcccagctacgagaccaccatcctgaccgagtgcagcccctggcccgagatcacctacgtgaacaacagccccagccccggcttcaacagcagccacagcagcttcagcctgggcgagggcaacggcagccccaaccaccagcccgagccccccccccccgtgaccgacaacctgctgcccaccaccaccccccaggaggcccagcagtggctgcacagaaacagattcagcaccttcaccagactgttcaccaacttcagcggcgccgacctgctgaagctgaccagagacgacgtgatccagatctgcggccccgccgacggcatcagactgttcaacgccctgaagggcagaatggtgagacccagactgaccatctacgtgtgccaggagagcctgcagctgagagagcagcagcagcagcagcagcagcagcagcagaagcacgaggacggcgacagcaacggcaccttcttcgtgtaccacgccatctacctggaggagctgaccgccgtggagctgaccgagaagatcgcccagctgttcagcatcagcccctgccagatcagccagatctacaagcagggccccaccggcatccacgtgctgatcagcgacgagatgatccagaacttccaggaggaggcctgcttcatcctggacaccatgaaggccgagaccaacgacagctaccacatcatcctgaagtag

SEQ ID NO: 158230 - DNA, 1509 bp, Artificial Sequence
  derived and/or modified sequence
atggcttgggccctgaagctgccgctggctgacgaagttatcgaaagtgggctggtacaggacttcgacgcatctctcagtggcattggacaagagctcggagccggtgcctactccatgtctgatgtgctggcactacctatctttaagcaggaggagagttcacttccccccgataatgaaaataagattctgccgttccagtatgtgctgtgtgccgcaaccagcccggctgtgaaattacacgatgagaccctcacctatttgaatcaaggacaatcatatgaaattcgcatgctagacaaccgaaagctgggcgaactgcctgagattaacggtaagttggttaaatctatctttcgggtcgtcttccatgaccggcgcttgcaatataccgaacatcagcagctggagggttggaggtggaaccgtccgggcgatcgaatcctggacatcgacattcctatgtcagtgggcataattgatccccgtgcaaacccaactcaactgaacacggtcgaattcttgtgggatcctgccaaacgcaccagcgtcttcatacaggtgcattgtatatccaccgagttcaccatgcgcaagcacggcggggagaaaggggtccccttccgcgtccaaatcgacacttttaaagagaacgaaaatggggaatacacagagcatttgcatagcgcaagctgtcaaatcaaagtcttcaaaccgaagggtgctgaccgaaagcagaagactgacagagagaaaatggagaaaagaacgcctcatgagaaagagaagtatcagccctcctatgagaccaccatattgaccgaatgtagcccgtggcctgaaataacatacgtcaacaattcccctagcccaggcttcaattctagccattcaagctttagtctgggagagggaaacggatcccctaaccaccaaccagagcctcctcccccagtgaccgacaatctgctgccaacaactacaccacaggaggctcagcagtggctacatcgcaatagattttctacttttacacggctgtttaccaacttcagcggggctgatctgctgaaattgacccgggatgatgtcatccagatttgtgggcctgccgatgggatccggctgtttaacgcgttaaaaggccgtatggtgcggccccggttaaccatctatgtctgccaagagagtctgcagctccgggagcagcagcaacagcaacagcaacagcagcagaagcacgaagatggagacagcaacgggactttctttgtctatcacgccatatacctggaagaactgacggccgtggaattgactgagaaaatcgcacaactattcagcatatccccttgtcaaattagtcagatttataagcaggggcctactggaatccacgttctgatctctgatgagatgattcaaaatttccaagaagaagcatgtttcattttggacactatgaaggctgaaactaacgattcctatcatataatactcaagtag

SEQ ID NO: 158231 - DNA, 1509 bp, Artificial Sequence
  derived and/or modified sequence
atggcctgggccctgaagctgcccctggctgatgaagtcatcgagagcggcctggtgcaggactttgatgccagcctgtctggaattggccaggagctgggcgctggggcctacagcatgtctgatgtgctggccctgcccatcttcaagcaggaggagagcagcctgcccccagacaatgaaaacaagatcctgcccttccagtatgtgctgtgtgccgccaccagccctgctgtgaagctgcatgatgagaccctgacctacctgaaccagggccagagctatgagatccgcatgctggacaacaggaagctgggggagctgcctgagatcaacgggaagctggtgaagagcatcttccgggtggtgttccatgaccggcggctgcagtacacagagcaccagcagctggagggctggcgctggaacagacctggggaccgcatcctggacatcgacatccccatgtctgtgggcatcatcgacccccgggccaaccccacccagctgaacacagtggagttcctgtgggaccctgccaagaggaccagcgtcttcatccaggtgcactgcatcagcacagagttcaccatgaggaagcatggaggagagaagggcgtgcccttccgggtgcagattgacaccttcaaggaaaatgaaaatggagagtacacagagcacctgcacagcgccagctgccagatcaaggtgttcaagcccaagggagctgacaggaagcagaagacagaccgggagaagatggagaagaggacccctcatgagaaggagaagtaccagcccagctatgagaccaccatcctgacagagtgcagcccctggccagagatcacctacgtgaacaacagccccagccctggcttcaacagcagccacagcagcttcagcctgggggagggcaatggcagccccaaccaccagcctgagcccccacctcctgtgacagacaacctgctgcccaccaccaccccccaggaggcccagcagtggctgcacaggaaccgcttcagcaccttcaccaggctcttcaccaacttctctggagctgacctgctgaagctgaccagagatgatgtgatccagatctgtggccctgcagatggcatccgcctcttcaatgccctgaagggccgcatggtgcggccccggctgaccatctacgtgtgccaggagagcctgcagctgcgggagcagcagcagcagcagcagcagcagcagcagaagcatgaagatggagacagcaatggcaccttctttgtgtaccacgccatctacctggaggagctgacagctgtggagctgacagagaagatcgcccagctgttcagcatcagcccctgccagatcagccagatctacaagcagggccccaccggcatccacgtgctgatcagtgatgagatgatccagaacttccaggaggaggcctgcttcatcctggacaccatgaaggccgagaccaatgacagctaccacatcatcctgaagtag

SEQ ID NO: 158232 - DNA, 1509 bp, Artificial Sequence
  derived and/or modified sequence
atggcctgggccctgaagctgcccctggccgacgaggtgatcgagtccggactggtgcaagatttcgacgcaagtctgtcagggatcggccaagagctcggcgccggcgcttatagtatgtccgacgtccttgccttgcctatttttaagcaggaagagtccagccttccgccagataatgaaaataaaattctccccttccagtacgttctttgcgccgcaacctcaccggctgtgaaactgcacgacgagacactgacgtatctgaaccagggccagagttatgagatccgcatgctggacaacagaaagctcggcgaactcccggagataaatggaaaactggtgaagagcatctttcgggtcgtgtttcacgaccggaggctgcaatataccgaacatcagcagttggaggggtggcgttggaaccgccccggcgaccgtatcctggacatcgacattccgatgtccgtgggtatcatcgacccaagggccaacccgacacagctgaataccgttgagtttctgtgggatccggccaagcggacctccgtgttcatccaggttcattgcatatccacagagttcaccatgcgcaagcatggaggggaaaagggggtcccatttcgggttcaaatcgatactttcaaagagaatgaaaatggggagtacacagagcatctgcacagcgcctcctgtcagattaaagttttcaagcctaagggggcagatcgcaaacaaaagaccgacagggagaagatggaaaagaggacacctcatgaaaaagagaaataccaaccctcctatgagactaccatcctgaccgaatgcagcccctggcccgaaatcacctatgtcaacaacagtcccagccccggctttaacagctcccactctagcttcagcctgggcgagggaaacggaagcccaaatcaccagccagaacctccaccacctgtaactgacaatttgctgccaaccaccacccctcaggaggcacagcagtggctccataggaaccgattttccacattcactcgcctgttcaccaatttcagcggggccgatctactgaaactcacgagggatgatgtcatccagatttgcgggcccgccgacggcattcgactcttcaatgctcttaaaggcagaatggtgcgcccacgcctaactatttatgtatgccaggagagcctccagctccgggagcagcagcagcagcaacagcaacaacagcagaaacacgaagatggagactcaaacggcactttctttgtttatcacgccatttacctagaggaattgacagcggtggaactgaccgagaagattgcccagctctttagcatcagcccttgccagatcagtcagatttataagcaaggcccgactggcatccacgtgttgattagtgatgagatgatacagaactttcaagaggaggcctgcttcatacttgatacaatgaaagccgaaactaacgacagttatcatatcatactgaagtag

SEQ ID NO: 158233 - DNA, 1509 bp, Artificial Sequence
  derived and/or modified sequence
atggcatgggctctcaaactgccccttgccgatgaggtcatcgaatccgggctcgtgcaggattttgacgcatccctgtcaggtatcgggcaggaacttggggcaggggcatattctatgtcggacgtgctggcgcttccaatctttaagcaggaggagtcatccctgccaccagataatgagaataaaattctcccatttcaatacgtactgtgcgcagctacctctcccgctgtgaaactgcacgacgagaccctcacctacctgaaccaggggcaatcttatgaaatcagaatgctggataaccggaaacttggtgagttgccagagattaatggaaagctcgtgaaatccatcttcagggtagtctttcacgatagacgtttgcagtacactgagcaccaacagctggaggggtggcgatggaatcggccaggagacaggattctggatattgatatccccatgtcagtcggaattatcgatcccagggctaaccctactcagctgaacacagttgaattcctgtgggaccccgctaagcggacctccgtttttatacaggtccactgcatcagtaccgagttcaccatgagaaaacatggcggtgagaagggcgtgccgttcagagtccaaatcgacacatttaaggagaacgagaacggcgagtatactgaacacctacattccgcttcctgtcagatcaaagtgttcaaaccaaaaggcgctgacagaaagcagaaaacagatcgggagaaaatggaaaaaagaaccccccatgagaaggaaaaatatcagccaagttacgagactacaatcttgactgaatgctcgccatggccagagattacctatgttaacaacagccccagtccagggtttaattctagtcactccagcttttccttgggcgaaggcaatgggtcaccaaatcatcagcccgagcccccaccccctgtgacagataatctcttaccaacgacgactcctcaggaagcccagcagtggctgcataggaataggtttagcactttcacacggcttttcaccaatttctcaggggcagacctgctgaagctcacccgtgatgatgtgatccagatctgcggtccagccgacggtattagactgtttaatgccctgaaggggcgaatggttcggcctcgactcactatctacgtatgtcaagagtcgcttcagcttagagaacagcagcagcagcagcagcaacagcaacagaagcatgaggatggtgattcgaatggcacgttctttgtctatcacgctatttaccttgaagaattaactgcagtagaactgactgaaaagatcgcccagcttttttccataagtccttgtcagatcagccaaatatataagcagggccctaccggaatacacgtgctgatcagtgatgagatgatccagaattttcaggaggaggcctgctttatcctcgacacaatgaaggccgagacaaatgactcctaccatatcatccttaagtag

SEQ ID NO: 158234 - DNA, 3546 bp, Artificial Sequence
  derived and/or modified sequence
gagagagcgagacctgggagggagggggcctccagcagaaaggggcgggggaaaaggtgcaaaagcagcgtgggagcgccgggctggcttcctgcggctgctgctggtctgactgggaagcagcaagccaccactacgaactctcaagaggagtgggagtgcgggagtccagagctgcctctgggaagtctgcagtagttgagcaaaggggtcctcacgttcctgagagctgggcaggggggattttggaacctggggcagccaagaacgagcagccaagggtacgggagattagttgtgcacagagcagtgctggtcgggcttgggggtggctggtgggcactgcgtgggaaaccttggtttgtagttttcttggtttgcgttactcctgttgggtagaattaccctccgcgcctttgtacaagacacggtgtctcctggggcaaggaaggagccaggatggcctgggctctgaagctgcctctggccgacgaagtgattgaatccgggttggtgcaggactttgatgctagcctgtccgggatcggccaggaactgggtgctggtgcctatagcatgagtgatgtccttgcattgcccatttttaagcaagaagagtcgagtttgcctcctgataatgagaataaaatcctgccttttcaatatgtgctttgtgctgctacctctccagcagtgaaactccatgatgaaaccctaacgtatctcaatcaaggacagtcttatgaaattcgaatgctagacaataggaaacttggagaacttccagaaattaatggcaaattggtgaagagtatattccgtgtggtgttccatgacagaaggcttcagtacactgagcatcagcagctagagggctggaggtggaaccgacctggagacagaattcttgacatagatatcccgatgtctgtgggtataatcgatcctagggctaatccaactcaactaaatacagtggagttcctgtgggaccctgcaaagaggacatctgtgtttattcaggtgcactgtattagcacagagttcactatgaggaaacatggtggagaaaagggggtgccattccgagtacaaatagataccttcaaggagaatgaaaacggggaatatactgagcacttacactcggccagctgccagatcaaagttttcaagcccaaaggtgcagacagaaagcaaaaaacggatagggaaaaaatggagaaacgaacacctcatgaaaaggagaaatatcagccttcctatgagacaaccatactcacagagtgttctccatggcccgagatcacgtatgtcaataactccccatcacctggcttcaacagttcccatagcagtttttctcttggggaaggaaatggttcaccaaaccaccagccagagccaccccctccagtcacagataacctcttaccaacaaccacacctcaggaagctcagcagtggttgcatcgaaatcgtttttctacattcacaaggcttttcacaaacttctcaggggcagatttattgaaattaactagagatgatgtgatccaaatctgtggccctgcagatggaatcagactttttaatgcattaaaaggccggatggtgcgtccaaggttaaccatttatgtttgtcaggaatcactgcagttgagggagcagcaacaacagcagcagcaacagcagcagaagcatgaggatggagactcaaatggtactttcttcgtttaccatgctatctatctagaagaactaacagctgttgaattgacagaaaaaattgctcagcttttcagcatttccccttgccagatcagccagatttacaagcaggggccaacaggaattcatgtgctcatcagtgatgagatgatacagaactttcaggaagaagcatgttttattctggacacaatgaaagcagaaaccaatgatagctatcatatcatactgaagtaggagtgcggcgtttcgtgcccagtggctgctccttccttcacctctgaaaacggccctcttgaagggggatatgaatggagatttgaaggtctgcaagaacctgactcgtctgactgtgtgtggaggagtccaggccatggaggcagaatcctggccctctgtgttggcccaagctcttgtggtacacacagattactgcccaatatgcagttctgcagctgttttagttaaatttctggaccttgttgttgttaaatatcagtagaaactctacataatttagagtgtatgtagggcataatgatgatgggaattgtgtgatgtttaacaggaagatcttaaattttgtgatatggagccctgtaatttttttcttatataaaaatgggtatctatattcataagactaggtcttcaatctctttgtactggtctcaaatgtactggtatctctgctttttgccacagtttgtccctgaaaactttatcagtgaggagaaatacagaattttccttttggttcccctgtaataccacaactaatagtattttcagctaacatttattgaccaggcagtgtgataaattttttgaatgaccatcttgtttaaccccctaatcacactatctgaagtaggtgctatagtgacccccaaccgaagatgaggaaatggagacacacagtggctaagtagcttgctaggtgccaggagctggcaggcagtgatgctgaaatccaaaccaggcaatctggccctccttattcaccctctcataccaccagtgctacccattataacctgtgttcacttcgcttattactgtggcccttctggtgactacaacataacactgagtatgaactgaggaattaaccactgaaagagacaaagcacacctaaataatgatgaacaaatcaagacctacaagaaatgaacacatagatgctttttaagtgtcattagttatcggaatcaaagaatttgaggtggtgacaactggggattatctgtaactccccaaatttactgttcttgaatgacattctcaaactatttattaatgagttagtctcatccctgctttctgtttcctctctctgcatcttctcttggcataggaagttattttactcatgctatgttttttaatagaagctttacaaaaaaagatgcattcccttcctgttcacactcttaccatgtttttgttcttccttaagaatgattgtgtgtgtgtgtgtgtgtgtgtgtaagtgtgtaagtgtaacatcatgggttttctttcttcacttgtaaagttttatctagaaatacttttacaggttatgttgaggtacacaaagataatgttctaagattgtgtattggatttggatttgtgtgtgtgtgtgtgtgtgtgtgtgtttaaagcatttgataaggtttaaatgttttttatacagagatttttgttcattaaactcaatctgcatcatggtctaatttctcttggtttgaaacaaattgaaaactttgaaaccaaaaaattaagtcaatgacttgtttaaaactgacctgagcaacttgttatattac

SEQ ID NO: 158235 - protein, 423 aa, Artificial Sequence
  derived and/or modified sequence
MAMVVSSWRDPQDDVAGGNPGGPNPAAQAARGGGGGAGEQQQQAGSGAPHTPQTPGQPGAPATPGTAGDKGQGPPGSGQSQQHIECVVCGDKSSGKHYGQFTCEGCKSFFKRSVRRNLTYTCRANRNCPIDQHHRNQCQYCRLKKCLKVGMRREAVQRGRMPPTQPNPGQYALTNGDPLNGHCYLSGYISLLLRAEPYPTSRYGSQCMQPNNIMGIENICELAARLLFSAVEWARNIPFFPDLQITDQVSLLRLTWSELFVLNAAQCSMPLHVAPLLAAAGLHASPMSADRVVAFMDHIRIFQEQVEKLKALHVDSAEYSCLKAIVLFTSDACGLSDAAHIESLQEKSQCALEEYVRSQYPNQPSRFGKLLLRLPSLRTVSSSVIEQLFFVRLVGKTPIETLIRDMLLSGSSFNWPYMSIQCS

SEQ ID NO: 158236 - DNA, 3210 bp, Artificial Sequence
  derived and/or modified sequence
cctctttctcccccctctctccctcctctcctctctctctcctctcttctctgaacctctcttctctttctcttttcttacatattctactagttgttttccccttcttcttctcctttctctcctttttctccctcctccttgtctcttttactccattcctgcagaagagagagggctaaacttaaaaaaaaaaaaaaggaggaggaggaggaggaggcacccccttcgtattcttcttatcgttattttatacatatatgattttttttggagggagggtgttggttgccggctgaagagcacttatttaaaatactaaaaaaagaacatttttgggcgatctccagggtttttttaactagctctgtgtgttatagcagaagaagcagaagaaggagcaagaaagaggaaaagaagaggattatttattcgacctactttggatgtctctctcgcttttcctttttcctttttttggcaattattttcttctgatttttattttttctatttcgctgtgatttcgtcgccggcgtgaattatcccgtatttttctcccccttccgtcacctcccgaaagaagaaggcagcgagagcccggcgccaccggcacaacaaaaagagcaaagtgtgtgatcttcctcgccggctgcctcccgctctccagcgctgccttcctgaatggctggctgcgtccggccctggacctggccccccgacacccgcgcgccctgatcgccggcggcagcctcgcccagcgccctgctcggctcaccgcgctccccgcactcccgagcccggcgagggctcccgccgggacagcggcggcgccgcgggcggccccggcctccgctcgcgctccggctgcggccccgactcctgctcggactccggcccgggtcccggctcctccagcggcgctcgccgcagcagctccggcggcagctccagcggcgcctgcagccgcgacctcctcctcctccgccgccgccgccgcctccgccctcgccggcttcctctatgtcggctcagcccgcgcgctgcgcgtagcccgagcggccggcgggcgggcgcccggcgcgggtgagcgactgtgtgtgcgagtgtgtgtgtgcgcgggggtgcgggcgaggcggagggcgagtgtgtgcgcgcgccgtggcccatgcccgccgcccccggcgctgcgccccgcgccgctcccggctgccgcctgtgccatttctgattttgcaacttggggaagaagaaaaaagcgagagaagggagcttgctcgccggggggtggggaggggggaaggagagcgcggcccccccaggaacggagcgcggggggagcgggcgaggggagcaggggtgttggggggggagcctgagagcctgggggggctgcaaaaagagagaaagaaaacagcaggaaccacaacaaaacgccagcagggcgggcgggcgcgcagcagcagcggggcggccgaggcagtagcggcggcagcggcggcggcggcggaggcagcggccggtgtccggctcgggctcggctcctgcgaccccggggcgcccggcgggccccccgccccctccccctccccccttccccttccccttcccctcccagcgcgcccgcgcgccccgcggccctcggcgagcagctcggctccccccagcgctccccgggcccaaagatatggcaatggtagttagcagctggcgagatccgcaggacgacgtggccgggggcaaccccggcggccccaaccccgcagcgcaggcggcccgcggcggcggcggcggcgccggcgagcagcagcagcaggcgggctcgggcgcgccgcacacgccgcagaccccgggccagcccggagcgcccgccacccccggcacggcgggggacaagggccagggcccgcccggttcgggccagagccagcagcacatcgagtgcgtggtgtgcggggacaagtcgagcggcaagcactacggccaattcacctgcgagggctgcaaaagtttcttcaagaggagcgtccgcaggaacttaacttacacatgccgtgccaacaggaactgtcccatcgaccagcaccaccgcaaccagtgccaatactgccgcctcaagaagtgcctcaaagtgggcatgaggcgggaagcggttcagcgaggaagaatgcctccaacccagcccaatccaggccagtacgcactcaccaacggggaccccctcaacggccactgctacctgtccggctacatctcgctgctgctgcgcgccgagccctaccccacgtcgcgctacggcagccagtgcatgcagcccaacaacattatgggcatcgagaacatctgcgagctggccgcgcgcctgctcttcagcgccgtcgagtgggcccgcaacatccccttcttcccggatctgcagatcaccgaccaggtgtccctgctacgcctcacctggagcgagctgttcgtgctcaacgcggcccagtgctctatgccgctgcacgtggcgccgttgctggccgccgccggcctgcatgcctcgcccatgtctgccgaccgcgtcgtggccttcatggaccacatccgcatcttccaggagcaggtggagaagctcaaggcgctacacgtcgactcagccgagtacagctgcctcaaagccatcgtgctgttcacgtcagacgcctgtggcctgtcggatgcggcccacatcgagagcctgcaggagaagtcgcagtgcgcactggaggagtacgtgaggagccagtaccccaaccagcccagccgttttggcaaactgctgctgcgactgccctcgctgcgcaccgtgtcctcctccgtcatcgagcagctcttcttcgtccgtttggtaggtaaaacccccatcgaaactctcatccgcgatatgttactgtctgggagcagcttcaactggccttacatgtccatccagtgctcctagaccttgggcgcttcccacctgccccgtccccctagagactcagaggacccacctgggccaaggactccaaagccgcggggacaccgggaagtgcagcgggccaggcaggctgggtgggagggaggagggccgagacaggagcagcccacccagcagaaatacaatccgagctacaaagcatgggaaaaagagactcttttaggatcagatctgtgagcacgttggcgaggaaaaacaaaaaaaaaaaaaaa

SEQ ID NO: 158237 - DNA, 1272 bp, Artificial Sequence
  derived and/or modified sequence
atggccatggtggtgagttcttggcgggacccccaagatgacgttgcaggtggtaaccctggcgggccaaatcctgctgcacaggcagctagagggggcggcggcggcgccggcgaacagcaacaacaggcaggcagtggggccccacacacacctcagacacccggacagcctggggcccccgctacgcctggtactgctggagacaaggggcagggcccgcctggtagtggccagagccaacagcacatcgaatgcgtagtgtgcggagacaaaagctctggaaaacattacggtcagttcacttgtgaggggtgcaagagctttttcaaacgctcagttcgacgaaacctcacgtatacttgccgcgctaacagaaattgcccaatcgatcagcaccacagaaaccagtgtcaatactgtaggctgaagaagtgcctgaaggtaggtatgcgcagggaagcagtgcagcgcggtcgtatgcctcctacacaaccaaacccgggtcagtacgcgctgacaaatggcgatccattgaatggccattgttacctgagcggatatatcagcctcctgctgagggcggaaccttatcccaccagccggtacggatcacagtgcatgcagccgaataacattatgggtatcgagaatatctgtgagctcgccgcacgtctcctcttctcagcagttgaatgggccagaaacattccttttttcccagatctccaaattacagatcaagtatcactactccgactaacttggtcggagctgtttgtgcttaacgccgctcaatgcagcatgccccttcatgttgctcccctattggccgctgccggccttcatgccagccccatgagtgccgaccgcgttgtggcattcatggatcacattagaattttccaggagcaggtggaaaagctcaaagctctgcacgtcgacagcgccgagtattcttgtttgaaggccattgtgctgttcacctctgatgcctgtggtctctctgatgccgcgcacattgaatctttgcaggagaagtcccagtgtgcacttgaggaatacgtccggtcacagtacccgaaccagccaagtcgcttcgggaagctgctgctcaggctgccatcactgcggactgtgagctctagtgtcatcgagcagttattttttgtgaggttagttggcaaaacgccaattgaaaccctgatcagggacatgctactgagtggaagctcatttaattggccctacatgtcaatccagtgttcttag

SEQ ID NO: 158238 - DNA, 1272 bp, Artificial Sequence
  derived and/or modified sequence
atggccatggtggtgtcctcctggagggacccccaggatgatgtggccggcggcaaccctgggggccccaacccagctgcccaggccgcccggggcggcggcggcggggccggggagcagcagcagcaggccggcagcggggccccccacaccccccagaccccaggccagcccggggccccagccaccccaggcacagctggggacaagggccagggccccccaggcagcggccagagccagcagcacattgaatgtgtggtgtgtggggacaagagcagcggcaagcactacggccagttcacctgtgagggctgcaagagcttcttcaagaggtctgtgagaagaaacctgacctacacctgccgggccaacagaaactgccccatcgaccagcaccacaggaaccagtgccagtactgccgcctgaagaagtgcctgaaggtgggcatgaggcgggaggccgtgcagaggggccgcatgccacccacccagcccaaccctggccagtatgccctgaccaatggagaccccctgaatggccactgctacctgagcggctacatcagcctgctgctgcgggcagagccctaccccaccagccgctatggcagccagtgcatgcagcccaacaacatcatgggcatcgagaacatctgtgagctggccgcccggctgctcttctctgctgtggagtgggccaggaacatccccttcttcccagacctgcagatcacagaccaggtgtccctgctgcggctgacctggagcgagctgtttgtgctgaatgctgcccagtgcagcatgcccctgcacgtggcccccctgctggccgccgccggcctgcacgccagccccatgtctgctgacagagtggtggccttcatggaccacatccgcatcttccaggagcaggtggagaagctgaaggccctgcacgtggacagcgctgagtacagctgcctgaaggccatcgtgctcttcaccagtgatgcctgtggcctgagtgatgctgcccacatcgagagcctgcaggagaagagccagtgtgccctggaggagtatgtgcgcagccagtaccccaaccagcccagcagatttgggaagctgctgctgcggctgcccagcctgaggacagtgagcagctctgtgattgagcagctgttctttgtgcggctggtgggcaagacccccatcgagaccctcatccgggacatgctgctgagcggcagcagcttcaactggccctacatgagcatccagtgcagctag

SEQ ID NO: 158239 - DNA, 1272 bp, Artificial Sequence
  derived and/or modified sequence
atggccatggtggtgagcagctggcgggacccccaggacgacgtggcaggagggaatccaggaggaccaaatcccgcggcacaggctgctcggggtgggggcgggggggcgggggaacagcagcagcaagctggttccggtgccccgcataccccgcagacaccaggacagcccggagcccctgccactcccggtactgcaggtgataaaggccaggggccccccggaagtggccagagccaacaacatatagaatgtgtggtctgcggagacaaatcctcgggcaaacactacggtcaatttacatgtgaagggtgcaaatctttttttaagcgttcagtgcgtagaaatttgacctatacatgtcgcgccaatcgtaactgcccaatcgaccagcaccatcgcaatcagtgccaatactgccgcctgaagaagtgtctcaaggtcggcatgcgtcgcgaagccgtgcagcgcggacggatgcccccaacccagccgaatccagggcagtatgcacttacaaacggagatcctttaaacggtcattgttacctgtcgggatacatctctctgttgctgcgggccgagccttatcccacatcacggtatgggagccaatgcatgcagccaaacaacattatggggatcgaaaacatttgtgagctcgccgcccggcttctgttttccgccgtcgagtgggctcggaatataccatttttcccagacctgcaaataacagatcaggtatccctgttgcgcctcacttggtctgaactgtttgtcctcaatgctgcccaatgctcgatgccgctgcacgtcgccccactgttagcggctgcagggctgcatgcaagccctatgtctgcagatcgggtcgttgccttcatggatcatattagaatcttccaggagcaggtagagaagctgaaggccctgcacgttgacagcgcagaatactcttgtttaaaggcgattgtgctatttacaagcgacgcatgtggcctgagtgacgccgctcatatagagtcactgcaggaaaaatcccagtgtgccctggaggaatatgtcaggtcacagtatccaaatcaaccctctaggttcgggaagctcttgttgcgcctcccgagcctgcggacagtgtcgtctagcgtgatcgagcagctcttctttgttaggctagtcgggaagacgccaatagaaacacttatccgcgacatgttgctgtccggttcttcctttaactggccttacatgtctattcaatgcagttag

SEQ ID NO: 158240 - DNA, 3732 bp, Artificial Sequence
  derived and/or modified sequence
cctctttctcccccctctctccctcctctcctctctctctcctctcttctctgaacctctcttctctttctcttttcttacatattctactagttgttttccccttcttcttctcctttctctcctttttctccctcctccttgtctcttttactccattcctgcagaagagagagggctaaacttaaagaaaaaaaaaaggaggaggaggaggaggaggcacccccttcgtattcttcttatcgttattttatacatatatgattttttttggagggagggtgttggttgccggctgaagagcacttatttaaaatactaaaaaaagaacatttttgggcgatctccagggtttttttaactagctctgtgtgttatagcagaagaagcagaagaaggagcaagaaagaggaaaagaagaggattatttattcgacctactttggatgtctctctcgcttttcctttttcctttttttggcaattattttcttctgatttttattttttctatttcgctgtgatttcgtcgccggcgtgaattatcccgtatttttctcccccttccgtcacctcccgaaagaagaaggcagcgagagcccggcgccaccggcacaacaaaaagagcaaagtgtgtgatcttcctcgccggctgcctcccgctctccagcgctgccttcctgaatggctggctgcgtccggccctggacctggccccccgacacccgcgcgccctgatcgccggcggcagcctcgcccagcgccctgctcggctcaccgcgctccccgcactcccgagcccggcgagggctcccgccgggacagcggcggcgccgcgggcggccccggcctccgctcgcgctccggctgcggccccgactcctgctcggactccggcccgggtcccggctcctccagcggcgctcgccgcagcagctccggcggcagctccagcggcgcctgcagccgcgacctcctcctcctccgccgccgccgccgcctccgccctcgccggcttcctctatgtcggctcagcccgcgcgctgcgcgtagcccgagcggccggcgggcgggcgcccggcgcgggtgagcgactgtgtgtgcgagtgtgtgtgtgcgcgggggtgcgggcgaggcggagggcgagtgtgtgcgcgcgccgtggcccatgcccgccgcccccggcgctgcgccccgcgccgctcccggctgccgcctgtgccatttctgattttgcaacttggggaagaagaaaaaagcgagagaagggagcttgctcgccggggggtggggaggggggaaggagagcgcggcccccccaggaacggagcgcggggggagcgggcgaggggagcaggggtgttggggggggagcctgagagcctgggggggctgcaaaaagagagaaagaaaacagcaggaaccacaacaaaacgccagcagggcgggcgggcgcgcagcagcagcggggcggccgaggcagtagcggcggcagcggcggcggcggcggaggcagcggccggtgtccggctcgggctcggctcctgcgaccccggggcgcccggcgggccccccgccccctccccctccccccttccccttccccttcccctcccagcgcgcccgcgcgccccgcggccctcggcgagcagctcggctccccccagcgctccccgggcccaaagatatggcaatggtagttagcagctggcgagatccgcaggacgacgtggccgggggcaaccccggcggccccaaccccgcagcgcaggcggcccgcggcggcggcggcggcgccggcgagcagcagcagcaggcgggctcgggcgcgccgcacacgccgcagaccccgggccagcccggagcgcccgccacccccggcacggcgggggacaagggccagggcccgcccggttcgggccagagccagcagcacatcgagtgcgtggtgtgcggggacaagtcgagcggcaagcactacggccaattcacctgcgagggctgcaaaagtttcttcaagaggagcgtccgcaggaacttaacttacacatgccgtgccaacaggaactgtcccatcgaccagcaccaccgcaaccagtgccaatactgccgcctcaagaagtgcctcaaagtgggcatgaggcgggaagcggttcagcgaggaagaatgcctccaacccagcccaatccaggccagtacgcactcaccaacggggaccccctcaacggccactgctacctgtccggctacatctcgctgctgctgcgcgccgagccctaccccacgtcgcgctacggcagccagtgcatgcagcccaacaacattatgggcatcgagaacatctgcgagctggccgcgcgcctgctcttcagcgccgtcgagtgggcccgcaacatccccttcttcccggatctgcagatcaccgaccaggtgtccctgctacgcctcacctggagcgagctgttcgtgctcaacgcggcccagtgctctatgccgctgcacgtggcgccgttgctggccgccgccggcctgcatgcctcgcccatgtctgccgaccgcgtcgtggccttcatggaccacatccgcatcttccaggagcaggtggagaagctcaaggcgctacacgtcgactcagccgagtacagctgcctcaaagccatcgtgctgttcacgtcagacgcctgtggcctgtcggatgcggcccacatcgagagcctgcaggagaagtcgcagtgcgcactggaggagtacgtgaggagccagtaccccaaccagcccagccgttttggcaaactgctgctgcgactgccctcgctgcgcaccgtgtcctcctccgtcatcgagcagctcttcttcgtccgtttggtaggtaaaacccccatcgaaactctcatccgcgatatgttactgtctgggagcagcttcaactggccttacatgtccatccagtgctcctagaccttgggcgcttcccacctgccccgtccccctagagactcagaggacccacctgggccaaggactccaaagccgcggggacaccgggaagtgcagcgggccaggcaggctgggtgggagggaggagggccgagacaggagcagcccacccagcagaaatacaatccgagctacaaagcatgggaaaaagagactcttttaggatcagatctgtgagcacgttggcgaggaaaaacaaaacaaacaaaaaaaagaaccttgtgtctgtctggtgaaaaaaagaaaaacaaattggaagagaggaccatgagaattttaataaaacagaaggaaactaatggaccttccaggatttattgtggacggatgtggatatattctgtacaggaacaacacatatggaagtggactgaagcctatgtagaaacacacacacactgaacattgttattcattttgtaaaatactagtctttattttcattttttgtaaaatttaaacatcgtatgcgcataaagaaaaaggaaacaagaattaggggaaaataacattttccaaataattataaaaaattgtcctgtgtctatgtatctatatctgttttgtatttttttctggttccaaaccagatttcctgtgattctatactaataatttttgatataaccctttgcttcttataatgagtgcgatatatgttgtcgaggctgttcttcaagaattaaaattgaagtgaaaatttaaacaaaaataaaagaatttagcaaaaccca

SEQ ID NO: 158241 - DNA, 1272 bp, Artificial Sequence
  derived and/or modified sequence
atggctatggtggtgagctcttggcgtgacccacaggacgatgtagctggcggaaacccaggtgggcctaatccagcagctcaagcagctaggggcggagggggaggtgccggagaacaacagcagcaggcagggtccggtgctcctcatacgccacaaacccccggacagccaggggctccagccacccccggtactgccggagataaaggacaggggcctcccggtagtgggcagtcacagcaacatatcgaatgtgttgtgtgtggcgacaaaagcagcgggaagcactacggccagttcacatgtgaagggtgtaagtcattcttcaagaggagcgttcggagaaacctgacttacacttgtcgggctaaccgaaactgccccatcgaccagcaccatcggaatcaatgccagtactgcagactcaaaaagtgcctgaaggtgggtatgcgccgagaggctgttcaaagaggcagaatgcctcctacgcaacccaaccccggacagtacgccctgaccaacggcgatccactgaacgggcattgttatcttagcggctacatttctttactgctgcgcgcagagccctatcccacttcacgttatgggtcacagtgcatgcagcccaacaatattatgggaatcgaaaacatttgtgaactggcagcccgtctgctgttttctgcagtcgagtgggcacgcaacataccctttttccccgaccttcaaatcacagatcaggtctccctgcttcgtctcacgtggtctgaactttttgtcttaaacgccgcacagtgcagtatgccattacatgtcgccccactgcttgctgcggcaggcctgcacgcctccccaatgtccgctgatcgtgtggtggcttttatggatcacatcaggatctttcaggaacaggttgaaaaactcaaggctctgcacgtggatagtgccgaatattcctgccttaaggccattgtgctcttcacctccgacgcgtgcggtttaagcgatgctgcccacatagaaagcctgcaggagaaaagccagtgcgcccttgaggaatacgtgaggtcccagtatccaaaccagccaagcaggtttggcaaactcttgctgcgcctgccttcactccgcacagtcagcagctcagtgattgaacagctgttctttgtgcggctggtgggcaagactccgatcgagactcttattagagatatgctgttgtccggctctagttttaactggccttatatgtccattcagtgctcatag

SEQ ID NO: 158242 - DNA, 1272 bp, Artificial Sequence
  derived and/or modified sequence
atggccatggtggtgagcagctggagagacccccaggacgacgtggccggcggcaaccccggcggccccaaccccgccgcccaggccgccagaggcggcggcggcggcgccggcgagcagcagcagcaggccggcagcggcgccccccacaccccccagacccccggccagcccggcgcccccgccacccccggcaccgccggcgacaagggccagggcccccccggcagcggccagagccagcagcacatcgagtgcgtggtgtgcggcgacaagagcagcggcaagcactacggccagttcacctgcgagggctgcaagagcttcttcaagagaagcgtgagaagaaacctgacctacacctgcagagccaacagaaactgccccatcgaccagcaccacagaaaccagtgccagtactgcagactgaagaagtgcctgaaggtgggcatgagaagagaggccgtgcagagaggcagaatgccccccacccagcccaaccccggccagtacgccctgaccaacggcgaccccctgaacggccactgctacctgagcggctacatcagcctgctgctgagagccgagccctaccccaccagcagatacggcagccagtgcatgcagcccaacaacatcatgggcatcgagaacatctgcgagctggccgccagactgctgttcagcgccgtggagtgggccagaaacatccccttcttccccgacctgcagatcaccgaccaggtgagcctgctgagactgacctggagcgagctgttcgtgctgaacgccgcccagtgcagcatgcccctgcacgtggcccccctgctggccgccgccggcctgcacgccagccccatgagcgccgacagagtggtggccttcatggaccacatcagaatcttccaggagcaggtggagaagctgaaggccctgcacgtggacagcgccgagtacagctgcctgaaggccatcgtgctgttcaccagcgacgcctgcggcctgagcgacgccgcccacatcgagagcctgcaggagaagagccagtgcgccctggaggagtacgtgagaagccagtaccccaaccagcccagcagattcggcaagctgctgctgagactgcccagcctgagaaccgtgagcagcagcgtgatcgagcagctgttcttcgtgagactggtgggcaagacccccatcgagaccctgatcagagacatgctgctgagcggcagcagcttcaactggccctacatgagcatccagtgcagctag

SEQ ID NO: 158243 - protein, 480 aa, Artificial Sequence
  derived and/or modified sequence
MLNFGASLQQTAEERMEMISERPKESMYSWNKTAEKSDFEAVEALMSMSCSWKSDFKKYVENRPVTPVSDLSEEENLLPGTPDFHTIPAFCLTPPYSPSDFEPSQVSNLMAPAPSTVHFKSLSDTAKPHIAAPFKEEEKSPVSAPKLPKAQATSVIRHTADAQLCNHQTCPMKAASILNYQNNSFRRRTHLNVEAARKNIPCAAVSPNRSKCERNTVADVDEKASAALYDFSVPSSETVICRSQPAPVSPQQKSVLVSPPAVSAGGVPPMPVICQMVPLPANNPVVTTVVPSTPPSQPPAVCPPVVFMGTQVPKGAVMFVVPQPVVQSSKPPVVSPNGTRLSPIAPAPGFSPSAAKVTPQIDSSRIRSHICSHPGCGKTYFKSSHLKAHTRTHTGEKPFSCSWKGCERRFARSDELSRHRRTHTGEKKFACPMCDRRFMRSDHLTKHARRHLSAKKLPNWQMEVSKLNDIALPPTPAPTQ

SEQ ID NO: 158244 - DNA, 2968 bp, Artificial Sequence
  derived and/or modified sequence
aggctgagcggctacctgaatggggagggggcagacggcgctgagcgcggcggcggcgggagcggcgtcgagtgtctccgtgcgcccgtctgtggccaagcagccagcagcctagcagccagtcagcttgccgccggcggccaagcagccaaccatgctcaacttcggtgcctctctccagcagactgcggaggaaagaatggaaatgatttctgaaaggccaaaagagagtatgtattcctggaacaaaactgcagagaaaagtgattttgaagctgtagaagcacttatgtcaatgagctgcagttggaagtctgattttaagaaatacgttgaaaacagacctgttacaccagtatctgatttgtcagaggaagagaatctgcttccgggaacacctgattttcatacaatcccagcattttgtttgactccaccttacagtccttctgactttgaaccctctcaagtgtcaaatctgatggcaccagcgccatctactgtacacttcaagtcactctcagatactgccaaacctcacattgccgcacctttcaaagaggaagaaaagagcccagtatctgcccccaaactccccaaagctcaggcaacaagtgtgattcgtcatacagctgatgcccagctatgtaaccaccagacctgcccaatgaaagcagccagcatcctcaactatcagaacaattcttttagaagaagaacccacctaaatgttgaggctgcaagaaagaacataccatgtgccgctgtgtcaccaaacagatccaaatgtgagagaaacacagtggcagatgttgatgagaaagcaagtgctgcactttatgacttttctgtgccttcctcagagacggtcatctgcaggtctcagccagcccctgtgtccccacaacagaagtcagtgttggtctctccacctgcagtatctgcagggggagtgccacctatgccggtcatctgccagatggttccccttcctgccaacaaccctgttgtgacaacagtcgttcccagcactcctcccagccagccaccagccgtttgcccccctgttgtgttcatgggcacacaagtccccaaaggcgctgtcatgtttgtggtaccccagcccgttgtgcagagttcaaagcctccggtggtgagcccgaatggcaccagactctctcccattgcccctgctcctgggttttccccttcagcagcaaaagtcactcctcagattgattcatcaaggataaggagtcacatctgtagccacccaggatgtggcaagacatactttaaaagttcccatctgaaggcccacacgaggacgcacacaggagaaaagcctttcagctgtagctggaaaggttgtgaaaggaggtttgcccgttctgatgaactgtccagacacaggcgaacccacacgggtgagaagaaatttgcgtgccccatgtgtgaccggcggttcatgaggagtgaccatttgaccaagcatgcccggcgccatctatcagccaagaagctaccaaactggcagatggaagtgagcaagctaaatgacattgctctacctccaacccctgctcccacacagtgacagaccggaaagtgaagagtcagaactaactttggtctcagcgggagccagtggtgatgtaaaaatgcttccactgcaagtctgtggccccacaacgtgggcttaaagcagaagccccacagcctggcacgaaggccccgcctgggttaggtgactaaaagggcttcggccacaggcaggtcacagaaaggcaggtttcatttcttatcacataagagagatgagaaagcttttattcctttgaatattttttgaaggtttcagatgaggtcaacacaggtagcacagattttgaatctgtgtgcatatttgttactttacttttgctgtttatacttgagaccaacttttcaatgtgattcttctaaagcactggtttcaagaatatggaggctggaaggaaataaacattacggtacagacatggagatgtaaaatgagtttgtattattacaaatattgtcatctttttctagagttatcttctttattattcctagtctttccagtcaacatcgtggatgtagtgattaaatatatctagaactatcatttttacactattgtgaatatttggaattgaacgactgtatattgctaagagggcccaaagaattggaatcctccttaatttaattgctttgaagcatagctacaatttgtttttgcatttttgttttgaaagtttaacaaatgactgtatctaggcatttcattatgctttgaactttagtttgcctgcagtttcttgtgtagatttgaaaattgtataccaatgtgttttctgtagactctaagatacactgcactttgtttagaaaaaaaactgaagatgaaatatatattgtaaagaagggatattaagaatcttagataacttcttgaaaaagatggcttatgtcatcagtaaagtacctttatgttatgaggatataatgtgtgctttattgaattagaaaattagtgaccattattcacaggtggacaaatgttgatgttgtcctgttaatttataggcgttttttggggatgtggaggtagttgggtagaaaaattattagaacattcacttttgttaacagtatttctcttttattctgttatatagtggatgatatacacagtggcaaaacaaaagtacattgcttaaaatatatagtgaaaaatgtcactatatcttcccatttaacattgtttttgtatattgggtgtagatttctgacatcaaaacttggacccttggaaaacaaaagttttaattaaaaaaaatccttgtgacttacaatttgcacaatatttcttttgttgtactttatatcttgtttacaataaagaattccctttggtatatggaaaaaaaaaaaaaaaaaa

SEQ ID NO: 158245 - DNA, 3097 bp, Artificial Sequence
  derived and/or modified sequence
acacgctccactgacaccagcttcacgctgccgggcagtcgccgatcacgcgtggccccgcgagcccattggccggcgcctcacacacctttgccgttgattggccggcctcaggctccgcccccacccccgcccgcggcgcggggcaggctgagcggctacctgaatggggagggggcagacggcgctgagcgcggcggcggcgggagcggcgtcgagtgtctccgtgcgcccgtctgtggccaagcagccagcagcctagcagccagtcagcttgccgccggcggccaagcagccaaccatgctcaacttcggtgcctctctccagcagactgcggaggaaagaatggaaatgatttctgaaaggccaaaagagagtatgtattcctggaacaaaactgcagagaaaagtgattttgaagctgtagaagcacttatgtcaatgagctgcagttggaagtctgattttaagaaatacgttgaaaacagacctgttacaccagtatctgatttgtcagaggaagagaatctgcttccgggaacacctgattttcatacaatcccagcattttgtttgactccaccttacagtccttctgactttgaaccctctcaagtgtcaaatctgatggcaccagcgccatctactgtacacttcaagtcactctcagatactgccaaacctcacattgccgcacctttcaaagaggaagaaaagagcccagtatctgcccccaaactccccaaagctcaggcaacaagtgtgattcgtcatacagctgatgcccagctatgtaaccaccagacctgcccaatgaaagcagccagcatcctcaactatcagaacaattcttttagaagaagaacccacctaaatgttgaggctgcaagaaagaacataccatgtgccgctgtgtcaccaaacagatccaaatgtgagagaaacacagtggcagatgttgatgagaaagcaagtgctgcactttatgacttttctgtgccttcctcagagacggtcatctgcaggtctcagccagcccctgtgtccccacaacagaagtcagtgttggtctctccacctgcagtatctgcagggggagtgccacctatgccggtcatctgccagatggttccccttcctgccaacaaccctgttgtgacaacagtcgttcccagcactcctcccagccagccaccagccgtttgcccccctgttgtgttcatgggcacacaagtccccaaaggcgctgtcatgtttgtggtaccccagcccgttgtgcagagttcaaagcctccggtggtgagcccgaatggcaccagactctctcccattgcccctgctcctgggttttccccttcagcagcaaaagtcactcctcagattgattcatcaaggataaggagtcacatctgtagccacccaggatgtggcaagacatactttaaaagttcccatctgaaggcccacacgaggacgcacacaggagaaaagcctttcagctgtagctggaaaggttgtgaaaggaggtttgcccgttctgatgaactgtccagacacaggcgaacccacacgggtgagaagaaatttgcgtgccccatgtgtgaccggcggttcatgaggagtgaccatttgaccaagcatgcccggcgccatctatcagccaagaagctaccaaactggcagatggaagtgagcaagctaaatgacattgctctacctccaacccctgctcccacacagtgacagaccggaaagtgaagagtcagaactaactttggtctcagcgggagccagtggtgatgtaaaaatgcttccactgcaagtctgtggccccacaacgtgggcttaaagcagaagccccacagcctggcacgaaggccccgcctgggttaggtgactaaaagggcttcggccacaggcaggtcacagaaaggcaggtttcatttcttatcacataagagagatgagaaagcttttattcctttgaatattttttgaaggtttcagatgaggtcaacacaggtagcacagattttgaatctgtgtgcatatttgttactttacttttgctgtttatacttgagaccaacttttcaatgtgattcttctaaagcactggtttcaagaatatggaggctggaaggaaataaacattacggtacagacatggagatgtaaaatgagtttgtattattacaaatattgtcatctttttctagagttatcttctttattattcctagtctttccagtcaacatcgtggatgtagtgattaaatatatctagaactatcatttttacactattgtgaatatttggaattgaacgactgtatattgctaagagggcccaaagaattggaatcctccttaatttaattgctttgaagcatagctacaatttgtttttgcatttttgttttgaaagtttaacaaatgactgtatctaggcatttcattatgctttgaactttagtttgcctgcagtttcttgtgtagatttgaaaattgtataccaatgtgttttctgtagactctaagatacactgcactttgtttagaaaaaaaactgaagatgaaatatatattgtaaagaagggatattaagaatcttagataacttcttgaaaaagatggcttatgtcatcagtaaagtacctttatgttatgaggatataatgtgtgctttattgaattagaaaattagtgaccattattcacaggtggacaaatgttgatgttgtcctgttaatttataggcgttttttggggatgtggaggtagttgggtagaaaaattattagaacattcacttttgttaacagtatttctcttttattctgttatatagtggatgatatacacagtggcaaaacaaaagtacattgcttaaaatatatagtgaaaaatgtcactatatcttcccatttaacattgtttttgtatattgggtgtagatttctgacatcaaaacttggacccttggaaaacaaaagttttaattaaaaaaaatccttgtgacttacaatttgcacaatatttcttttgttgtactttatatcttgtttacaataaagaattccctttggtatatgg

SEQ ID NO: 158246 - DNA, 1443 bp, Artificial Sequence
  derived and/or modified sequence
atgctgaacttcggtgcatcactgcagcagaccgctgaggagcggatggaaatgatcagcgagaggcctaaagaatcgatgtactcctggaacaagacagccgaaaagtcagactttgaagcagtggaagccctgatgagtatgagctgcagctggaagtctgatttcaaaaaatatgtggaaaataggccggtcacgcccgtgtcagacctgagcgaagaagagaacctcctacccggcacaccagactttcataccatcccggccttctgcctgacccctccatacagcccatcagacttcgagccctcacaggtcagcaatctcatggcccctgctccatctaccgtacattttaaatctctgtccgatacagccaagcctcatatcgccgcaccattcaaagaagaagaaaagagtcccgtgtccgccccaaaattgcccaaggcgcaagcaacttctgtgattcgccacaccgctgatgcacagctctgtaatcaccagacctgcccgatgaaggccgcttccatcttgaactatcagaataattccttccggcgccggactcacctgaatgtcgaggccgcacgcaagaatatcccatgcgccgctgtgtccccaaatcgaagtaagtgtgagaggaatacagtggccgacgtcgatgagaaggcgtccgccgcattatacgacttctccgttccctcctcagagacagtaatttgtcgttcacaaccggcccccgttagccctcagcaaaagagcgtgctggtatcaccccctgctgtgtcggccggtggggtgccacccatgccagtgatttgccagatggtgccattaccggctaataatccagttgtgacaaccgtggttccttccacgcctcccagtcaaccgccagctgtctgcccccccgtcgtgttcatgggaacgcaggtcccgaagggggctgtgatgtttgtagtgcctcagccagtggtgcagtcttccaaacctcccgtagtcagtcccaacggtacgcgccttagccctatagctccagcacccggtttttcaccgtcagccgctaaagtgactccacagatcgatagttccaggatccgaagccatatctgcagtcacccagggtgcggtaaaacatacttcaagtccagccatttgaaagcacatactaggactcacacaggggagaaaccattcagctgctcctggaagggttgcgaaaggcgctttgcgcgaagtgacgagctgtcgcgtcatcggagaacccacactggggagaaaaagttcgcgtgccccatgtgcgaccgccggtttatgagaagtgaccacctgaccaaacatgcgagacgccacctgagtgccaaaaagttgcccaattggcagatggaagtctctaaactaaacgatattgccctgccacccacacccgcccctacacagtag

SEQ ID NO: 158247 - DNA, 1443 bp, Artificial Sequence
  derived and/or modified sequence
atgctgaactttggagccagcctgcagcagacagctgaggagaggatggagatgatcagcgagcggcccaaggagagcatgtacagctggaacaagacagctgagaagagtgactttgaagctgtggaggccctgatgtccatgagctgctcctggaagagtgacttcaagaagtatgtggagaacagacctgtgacccctgtgtctgacctgtctgaggaggagaacctgctgcccggcaccccagacttccacaccatcccagccttctgcctgaccccaccctacagccccagcgactttgagcccagccaggtgagcaacctgatggccccagcccccagcacagtgcacttcaagagcctgagtgacacagccaagccccacatcgccgcccccttcaaggaggaggagaagagccctgtgtctgcccccaagctgcccaaggcccaggccaccagcgtcatccgccacacagcagatgcccagctgtgcaaccaccagacctgccccatgaaggccgccagcatcctgaactaccagaacaacagcttcagaagaaggacccacctgaatgtggaggccgccaggaagaacatcccctgtgccgctgtgagccccaacagaagcaaatgtgagaggaacacagtggctgatgtggatgagaaggccagcgctgccctgtatgacttctctgtgcccagcagcgagaccgtcatctgccgcagccagcctgcccctgtgagcccccagcagaagtctgtgctggtgtccccacctgctgtgtctgctgggggcgtgccccccatgcctgtgatctgccagatggtgcccctgcctgccaacaaccctgtggtgaccaccgtggtgcccagcaccccacccagccagcccccagctgtgtgcccccctgtggtgttcatgggcacccaggtgcccaagggagctgtgatgtttgtggtgccccagcctgtggtgcagagcagcaagccccctgtggtgagccccaacggcacccggctgagccccatcgccccagcccctggcttcagccccagcgctgccaaggtgaccccccagattgacagcagccgcatccgcagccacatctgcagccaccctggctgtgggaagacctacttcaagagcagccacctgaaggcccacaccaggacccacactggagagaagcccttcagctgctcctggaagggctgtgagaggagatttgcccggagtgatgagctgagccgccacaggaggacccacactggagagaagaagtttgcctgccccatgtgtgaccggcgcttcatgagaagtgaccacctgaccaagcacgcccggcggcacctgagcgccaagaagctgcccaactggcagatggaggtgtccaagctgaatgacatcgccctgccccccaccccagcccccacccagtag

SEQ ID NO: 158248 - DNA, 1443 bp, Artificial Sequence
  derived and/or modified sequence
atgctgaacttcggcgccagcctgcagcagaccgccgaggagcggatggagatgataagcgaacgacctaaagagagtatgtacagttggaacaaaaccgccgagaagagcgacttcgaggcggtggaagcccttatgtctatgtcttgtagttggaagtccgacttcaagaaatacgtggagaatcgtcccgtgaccccagtttccgatctttcagaggaggagaatttgctccccggtacccccgattttcatacaatcccagcattttgtttaacgcctccatactccccatctgatttcgaacccagccaggtttcaaacttaatggcgccagcaccctcaactgtacactttaagagtctgtcagacaccgccaagcctcatatagctgcccctttcaaggaggaggaaaagtccccagtcagcgccccaaagttacctaaggcccaggctacaagcgtgatcagacatacagcagacgcccagctgtgtaatcaccaaacctgtcctatgaaggcggcctctatcctcaactatcagaataacagtttccgccggagaacgcacctcaacgttgaggcagcaagaaagaacatcccctgcgcggccgtcagccctaatagatcaaagtgcgaacggaacactgttgccgacgtggatgagaaagcctccgctgccctctacgacttctccgttccatccagcgaaacggttatatgccggtcccaaccagccccagtgagcccccagcagaaaagcgtgctggtgagtcccccggccgtgtcggccggaggggtgcccccaatgcccgtaatatgccaaatggttcccctccctgcgaacaaccccgtagtcacaaccgtggtcccatctacccccccttcccaaccacctgcagtgtgcccgcccgtcgtgttcatgggcacacaggtgccaaagggtgccgtgatgtttgtagtgcctcagcctgtagttcaatcttctaagcctccagtggtgtcacctaatggcactaggctaagcccaatagcccccgctcctggcttctcccctagcgccgccaaggttaccccacagattgattcatcaaggatccgaagtcatatctgcagtcacccaggttgtgggaaaacctacttcaaatcatcccacctgaaggctcatacccggactcacaccggcgaaaaacctttttcgtgcagctggaagggatgcgaaagaaggttcgcaaggtcagacgaacttagccggcacagacggacccataccggtgaaaagaaattcgcttgtccaatgtgcgatagaaggttcatgcgctccgatcacctcacaaagcacgcgcgacgtcacctgagcgcaaagaaactgccaaactggcagatggaggtctccaagctgaacgacatcgcgctcccgccaactcccgcaccaacacagtag

SEQ ID NO: 158249 - DNA, 1443 bp, Artificial Sequence
  derived and/or modified sequence
atgctgaacttcggagcgagtctgcagcagaccgccgaagagcgcatggagatgatcagcgagagacccaaggaaagcatgtacagctggaataaaacagcagagaagagcgacttcgaagctgtggaagccctgatgagtatgagctgctcctggaagtctgactttaagaagtatgtggagaaccgacccgttactccagtgagtgacctgtcagaggaagaaaatctgttaccgggaactccagatttccacacgatccccgctttttgccttactcccccttattccccctctgacttcgagccgtcgcaggtgtccaatttgatggcccctgccccttcaacagtgcatttcaaatcgctttcagacaccgccaagccgcatatcgctgcaccttttaaagaagaggaaaaatctcccgtaagtgcccctaaactaccaaaagctcaggctacaagcgtgatccgccatactgcagatgctcagctgtgtaaccatcagacatgtccaatgaaagcagcatcgattctgaattaccagaataactctttcaggaggaggactcatctcaacgtggaggcagcccgaaaaaatataccttgcgcagctgtgtcccccaataggtctaagtgcgagaggaacacggtcgctgacgtggatgagaaggcctctgcagcgttgtacgactttagcgtgccatcctccgagactgtcatctgtaggtcgcagccggctccagtgagcccccagcagaaaagtgtgcttgtgtctcctccggctgtgtcagctgggggtgtgcccccaatgccagttatttgccagatggttcctctgcctgctaataaccctgtcgtgaccaccgttgtaccttcgactcctccatctcagccccctgctgtttgccctcctgtcgtgttcatgggcacccaagtgcctaagggagcagtgatgttcgtcgtgccccaacccgtcgtgcagagttcaaagccccctgtggtctctccaaacgggactcggctaagtccaatcgctccagcccctggtttctctccatccgctgcaaaggtgacaccccaaatcgactcctctcggatcagatcacacatatgctcacaccccggatgcgggaagacctatttcaaatcctcccatctcaaggcacacactcgaactcataccggggagaagcccttctcctgtagctggaagggatgtgaacgtcgctttgccagatccgatgagctgtccaggcaccgtagaactcacacgggagaaaagaaatttgcctgcccgatgtgcgatcggcgatttatgagaagcgatcacctcacaaagcacgccaggaggcacttgtcggctaaaaaactccccaactggcagatggaggtgagtaagctgaacgatatcgcactgccccctactcccgcacccacccagtag

SEQ ID NO: 158250 - DNA, 1443 bp, Artificial Sequence
  derived and/or modified sequence
atgctgaacttcggcgccagcctgcagcagaccgccgaggagagaatggagatgatcagcgagagacccaaggagagcatgtacagctggaacaagaccgccgagaagagcgacttcgaggccgtggaggccctgatgagcatgagctgcagctggaagagcgacttcaagaagtacgtggagaacagacccgtgacccccgtgagcgacctgagcgaggaggagaacctgctgcccggcacccccgacttccacaccatccccgccttctgcctgacccccccctacagccccagcgacttcgagcccagccaggtgagcaacctgatggcccccgcccccagcaccgtgcacttcaagagcctgagcgacaccgccaagccccacatcgccgcccccttcaaggaggaggagaagagccccgtgagcgcccccaagctgcccaaggcccaggccaccagcgtgatcagacacaccgccgacgcccagctgtgcaaccaccagacctgccccatgaaggccgccagcatcctgaactaccagaacaacagcttcagaagaagaacccacctgaacgtggaggccgccagaaagaacatcccctgcgccgccgtgagccccaacagaagcaagtgcgagagaaacaccgtggccgacgtggacgagaaggccagcgccgccctgtacgacttcagcgtgcccagcagcgagaccgtgatctgcagaagccagcccgcccccgtgagcccccagcagaagagcgtgctggtgagcccccccgccgtgagcgccggcggcgtgccccccatgcccgtgatctgccagatggtgcccctgcccgccaacaaccccgtggtgaccaccgtggtgcccagcaccccccccagccagccccccgccgtgtgcccccccgtggtgttcatgggcacccaggtgcccaagggcgccgtgatgttcgtggtgccccagcccgtggtgcagagcagcaagccccccgtggtgagccccaacggcaccagactgagccccatcgcccccgcccccggcttcagccccagcgccgccaaggtgaccccccagatcgacagcagcagaatcagaagccacatctgcagccaccccggctgcggcaagacctacttcaagagcagccacctgaaggcccacaccagaacccacaccggcgagaagcccttcagctgcagctggaagggctgcgagagaagattcgccagaagcgacgagctgagcagacacagaagaacccacaccggcgagaagaagttcgcctgccccatgtgcgacagaagattcatgagaagcgaccacctgaccaagcacgccagaagacacctgagcgccaagaagctgcccaactggcagatggaggtgagcaagctgaacgacatcgccctgccccccacccccgcccccacccagtag

SEQ ID NO: 158251 - protein, 1972 aa, Artificial Sequence
  derived and/or modified sequence
MDPTGSQLDSDFSQQDTPCLIIEDSQPESQVLEDDSGSHFSMLSRHLPNLQTHKENPVLDVVSNPEQTAGEERGDGNSGFNEHLKENKVADPVDSSNLDTCGSISQVIEQLPQPNRTSSVLGMSVESAPAVEEEKGEELEQKEKEKEEDTSGNTTHSLGAEDTASSQLGFGVLELSQSQDVEENTVPYEVDKEQLQSVTTNSGYTRLSDVDANTAIKHEEQSNEDIPIAEQSSKDIPVTAQPSKDVHVVKEQNPPPARSEDMPFSPKASVAAMEAKEQLSAQELMESGLQIQKSPEPEVLSTQEDLFDQSNKTVSSDGCSTPSREEGGCSLASTPATTLHLLQLSGQRSLVQDSLSTNSSDLVAPSPDAFRSTPFIVPSSPTEQEGRQDKPMDTSVLSEEGGEPFQKKLQSGEPVELENPPLLPESTVSPQASTPISQSTPVFPPGSLPIPSQPQFSHDIFIPSPSLEEQSNDGKKDGDMHSSSLTVECSKTSEIEPKNSPEDLGLSLTGDSCKLMLSTSEYSQSPKMESLSSHRIDEDGENTQIEDTEPMSPVLNSKFVPAENDSILMNPAQDGEVQLSQNDDKTKGDDTDTRDDISILATGCKGREETVAEDVCIDLTCDSGSQAVPSPATRSEALSSVLDQEEAMEIKEHHPEEGSSGSEVEEIPETPCESQGEELKEENMESVPLHLSLTETQSQGLCLQKEMPKKECSEAMEVETSVISIDSPQKLAILDQELEHKEQEAWEEATSEDSSVVIVDVKEPSPRVDVSCEPLEGVEKCSDSQSWEDIAPEIEPCAENRLDTKEEKSVEYEGDLKSGTAETEPVEQDSSQPSLPLVRADDPLRLDQELQQPQTQEKTSNSLTEDSKMANAKQLSSDAEAQKLGKPSAHASQSFCESSSETPFHFTLPKEGDIIPPLTGATPPLIGHLKLEPKRHSTPIGISNYPESTIATSDVMSESMVETHDPILGSGKGDSGAAPDVDDKLCLRMKLVSPETEASEESLQFNLEKPATGERKNGSTAVAESVASPQKTMSVLSCICEARQENEARSEDPPTTPIRGNLLHFPSSQGEEEKEKLEGDHTIRQSQQPMKPISPVKDPVSPASQKMVIQGPSSPQGEAMVTDVLEDQKEGRSTNKENPSKALIERPSQNNIGIQTMECSLRVPETVSAATQTIKNVCEQGTSTVDQNFGKQDATVQTERGSGEKPVSAPGDDTESLHSQGEEEFDMPQPPHGHVLHRHMRTIREVRTLVTRVITDVYYVDGTEVERKVTEETEEPIVECQECETEVSPSQTGGSSGDLGDISSFSSKASSLHRTSSGTSLSAMHSSGSSGKGAGPLRGKTSGTEPADFALPSSRGGPGKLSPRKGVSQTGTPVCEEDGDAGLGIRQGGKAPVTPRGRGRRGRPPSRTTGTRETAVPGPLGIEDISPNLSPDDKSFSRVVPRVPDSTRRTDVGAGALRRSDSPEIPFQAAAGPSDGLDASSPGNSFVGLRVVAKWSSNGYFYSGKITRDVGAGKYKLLFDDGYECDVLGKDILLCDPIPLDTEVTALSEDEYFSAGVVKGHRKESGELYYSIEKEGQRKWYKRMAVILSLEQGNRLREQYGLGPYEAVTPLTKAADISLDNLVEGKRKRRSNVSSPATPTASSSSSTTPTRKITESPRASMGVLSGKRKLITSEEERSPAKRGRKSATVKPGAVGAGEFVSPCESGDNTGEPSALEEQRGPLPLNKTLFLGYAFLLTMATTSDKLASRSKLPDGPTGSSEEEEEFLEIPPFNKQYTESQLRAGAGYILEDFNEAQCNTAYQCLLIADQHCRTRKYFLCLASGIPCVSHVWVHDSCHANQLQNYRNYLLPAGYSLEEQRILDWQPRENPFQNLKVLLVSDQQQNFLELWSEILMTGGAASVKQHHSSAHNKDIALGVFDVVVTDPSCPASVLKCAEALQLPVVSQEWVIQCLIVGERIGFKQHPKYKHDYVSH

SEQ ID NO: 158252 - protein, 416 aa, Artificial Sequence
  derived and/or modified sequence
MASSSGSSPRPAPDENEFPFGCPPTVCQDPKEPRALCCAGCLSENPRNGEDQICPKCRGEDLQSISPGSRLRTQEKAHPEVAEAGIGCPFAGVGCSFKGSPQSVQEHEVTSQTSHLNLLLGFMKQWKARLGCGLESGPMALEQNLSDLQLQAAVEVAGDLEVDCYRAPCSESQEELALQHFMKEKLLAELEGKLRVFENIVAVLNKEVEASHLALATSIHQSQLDRERILSLEQRVVELQQTLAQKDQALGKLEQSLRLMEEASFDGTFLWKITNVTRRCHESACGRTVSLFSPAFYTAKYGYKLCLRLYLNGDGTGKRTHLSLFIVIMRGEYDALLPWPFRNKVTFMLLDQNNREHAIDAFRPDLSSASFQRPQSETNVASGCPLFFPLSKLQSPKHAYVKDDTMFLKCIVETST

SEQ ID NO: 158253 - DNA, 1251 bp, Artificial Sequence
  derived and/or modified sequence
atggccagcagcagcggcagcagccccagacccgcccccgacgagaacgagttccccttcggctgcccccccaccgtgtgccaggaccccaaggagcccagagccctgtgctgcgccggctgcctgagcgagaaccccagaaacggcgaggaccagatctgccccaagtgcagaggcgaggacctgcagagcatcagccccggcagcagactgagaacccaggagaaggcccaccccgaggtggccgaggccggcatcggctgccccttcgccggcgtgggctgcagcttcaagggcagcccccagagcgtgcaggagcacgaggtgaccagccagaccagccacctgaacctgctgctgggcttcatgaagcagtggaaggccagactgggctgcggcctggagagcggccccatggccctggagcagaacctgagcgacctgcagctgcaggccgccgtggaggtggccggcgacctggaggtggactgctacagagccccctgcagcgagagccaggaggagctggccctgcagcacttcatgaaggagaagctgctggccgagctggagggcaagctgagagtgttcgagaacatcgtggccgtgctgaacaaggaggtggaggccagccacctggccctggccaccagcatccaccagagccagctggacagagagagaatcctgagcctggagcagagagtggtggagctgcagcagaccctggcccagaaggaccaggccctgggcaagctggagcagagcctgagactgatggaggaggccagcttcgacggcaccttcctgtggaagatcaccaacgtgaccagaagatgccacgagagcgcctgcggcagaaccgtgagcctgttcagccccgccttctacaccgccaagtacggctacaagctgtgcctgagactgtacctgaacggcgacggcaccggcaagagaacccacctgagcctgttcatcgtgatcatgagaggcgagtacgacgccctgctgccctggcccttcagaaacaaggtgaccttcatgctgctggaccagaacaacagagagcacgccatcgacgccttcagacccgacctgagcagcgccagcttccagagaccccagagcgagaccaacgtggccagcggctgccccctgttcttccccctgagcaagctgcagagccccaagcacgcctacgtgaaggacgacaccatgttcctgaagtgcatcgtggagaccagcacctag

SEQ ID NO: 158254 - DNA, 1251 bp, Artificial Sequence
  derived and/or modified sequence
atggcttcttcgtcgggctcaagcccacggcccgcgcctgatgagaacgagttccctttcgggtgccctcctactgtgtgccaggaccccaaggaaccgcgcgctttatgttgtgccggatgtctgtccgagaatcccaggaatggcgaagatcagatctgccccaagtgccgaggggaagacttgcagagcatcagcccgggttctagacttcggacccaggagaaggcccaccccgaggttgcagaggcaggcatcgggtgcccgtttgccggggttggctgttcatttaaagggagccctcaaagcgtccaggagcacgaagtaacctcacagactagccatttgaacttgctgctgggcttcatgaagcaatggaaagccagactgggctgtggtctagagtccggtccaatggcccttgagcagaatctgagtgatttacagctgcaagcagcggtagaagtggctggtgatctggaggtggactgctaccgggccccttgttcagaatctcaggaagagctcgccctccagcacttcatgaaggaaaaactgcttgctgagctggagggaaagctgagagtcttcgaaaatatcgtcgcagttttgaacaaagaggtggaagccagccacttggctctggccactagcatccaccagtcccaactggacagagaaagaatacttagcttggagcagcgagttgttgagttacagcagaccctagcacagaaggaccaggctctgggcaaactagagcaaagcttgagacttatggaggaggcatcgttcgatggaacattcctctggaaaataacaaatgtgaccagacgttgtcatgagtctgcctgcggcaggacagtaagcctgttcagcccagccttttacacagccaagtacggctataagctgtgcttacgcctttacttgaacggggatggaaccggcaagaggacacacctatcactgttcatagtcattatgcgaggcgagtacgatgccctgctaccatggccctttagaaataaggtgaccttcatgctccttgaccagaataatcgagaacacgctatcgatgcgttccggccagatctgagctcggcgagcttccaacgacctcaatcggagacgaacgtggcgagcggctgtccactctttttccctctctccaagctgcagtctcctaaacatgcttacgttaaagatgacacgatgtttctgaaatgtattgtggagacctccacctag

SEQ ID NO: 158255 - DNA, 1251 bp, Artificial Sequence
  derived and/or modified sequence
atggcaagctcaagtgggtccagcccgcgacctgcccccgatgagaacgagttccctttcggatgtccccctacggtgtgccaggatccgaaagagcctcgcgccctgtgctgcgccggctgtctgtcagagaatcctcgcaatggggaggaccaaatctgtccaaaatgtcgaggcgaggacctgcagagtatctcccccggtagccggctccgcacccaggaaaaggctcacccagaagttgccgaggcgggaattggctgcccgtttgctggcgtcggttgtagctttaaaggctccccacagtctgtccaggaacatgaagtcacctctcaaacaagtcacctgaatttgttgctcggcttcatgaagcagtggaaggctcgcttgggatgtggactggaatctggccccatggccttggagcaaaaccttagcgatcttcagctgcaggcagcggtggaagtggccggagacctcgaggtggactgctaccgtgctccttgcagcgaatctcaagaggaacttgccctgcaacattttatgaaagaaaagttgctggcggaactggagggcaagctgagagtttttgaaaatattgtcgcggtacttaataaggaggtggaggcaagccacctcgccctagcaaccagcatccatcagtctcagctggacagggaaagaatcctgagcttagaacaaagggtcgtggagttgcagcagaccctggctcaaaaagatcaggccttaggcaaactggaacagagtctgcgacttatggaggaggcatctttcgacgggacttttttgtggaaaataacaaacgttacccgtagatgtcatgaatccgcgtgcggccgcactgtctctttgttcagccctgccttttataccgctaagtatggctataaattgtgcctgcggctgtatttgaacggcgatggcacaggaaaacggacacacctgagcctctttattgtgatcatgcgtggggagtacgatgctctgcttccatggccgttcaggaataaagtgacctttatgctgcttgaccagaataacagagaacacgccattgatgcctttcggcctgacctgagtagtgcttcctttcagagaccacaatccgaaactaacgttgcttctggatgtccactgttttttccattatctaaacttcagtctcctaaacacgcatatgtgaaagacgatactatgtttctcaaatgcattgtcgaaacctctacatag

SEQ ID NO: 158256 - DNA, 1251 bp, Artificial Sequence
  derived and/or modified sequence
atggccagcagcagcggcagcagccccaggcctgccccagatgaaaatgagttccccttcggctgccccccaacagtgtgccaggaccccaaggagccccgggccctgtgctgtgccggctgcctgtctgagaaccccagaaatggagaggaccagatctgccccaagtgccgcggggaggacctgcagagcatcagccctggcagccggctgcggacccaggagaaggcccaccctgaggtggccgaggccggcatcggctgcccctttgctggggtgggctgcagcttcaagggcagcccccagagcgtgcaggagcacgaggtgaccagccagaccagccacctgaacctgctgctgggcttcatgaagcagtggaaggcccggctgggctgcggcctggagagcggccccatggccctggagcagaacctgagtgacctgcagctgcaggccgctgtggaggtggccggggacctggaggtggactgctaccgggccccctgcagcgagagccaggaggagctggccctgcagcacttcatgaaggagaagctgctggccgagctggagggcaagctgcgggtgtttgagaacatcgtggccgtgctgaacaaggaggtggaggccagccacctggccctggccaccagcatccaccagagccagctggaccgggagcgcatcctgagcctggagcagagggtggtggagctgcagcagaccctggcccagaaggaccaggccctgggcaagctggagcagagcctgcggctgatggaggaggccagctttgatggcaccttcctgtggaagatcaccaacgtgacccggcgctgccatgaaagtgcctgtggccgcacagtgtccctcttcagccctgccttctacacagccaagtatggctacaagctgtgcctgcggctgtacctgaatggagatggcaccgggaagaggacccacctgagcctcttcatcgtcatcatgagaggagaatatgatgccctgctgccctggcccttcaggaacaaggtgaccttcatgctgctggaccagaacaaccgggagcacgccattgatgccttccggccagacctgagcagcgccagcttccagaggccccagagcgagaccaacgtggccagcggctgccccctcttcttccccctgagcaagctgcagagccccaagcacgcctacgtgaaggatgacaccatgttcctgaagtgcatcgtggagaccagcacctag

SEQ ID NO: 158257 - DNA, 1251 bp, Artificial Sequence
  derived and/or modified sequence
atggccagcagcagcggcagcagcccccggcccgcccccgacgagaacgagttccctttcggctgtccccccactgtgtgtcaggacccaaaggagccacgcgccctatgctgcgcaggctgtttgtcagaaaaccccaggaacggcgaagatcagatctgtccaaagtgtcgaggggaagatttgcagtcaatctctcccggcagccgccttcggactcaagaaaaagcacatccggaggtggcggaggcggggatagggtgtccattcgccggagttggatgctcttttaagggctcacctcagtcggttcaggagcatgaggtcacttcccaaaccagccacctcaatctcctactcggcttcatgaagcaatggaaggcgcggcttggttgcggactggagtctgggcctatggcgttagaacagaacctgagcgatctgcagctccaggcagcggtggaggtggctggagacctggaagtcgattgctaccgagctccatgctccgaatcacaggaggaactggctctccaacacttcatgaaggagaagcttttagcagaattagaaggaaaattacgggtattcgagaatatcgtcgcagttctgaataaggaggttgaggcgagtcatctggcactggctacatccatccaccagtcacagctggaccgggaaaggatcctgtccctggagcagcgcgtggttgaactccaacagaccctggcccaaaaagaccaggcactgggcaaattggagcagagcttaagactgatggaagaggcctctttcgacggtaccttcctgtggaaaataactaatgtgacacgccgctgccacgagtccgcatgtggccgaaccgtgtcgctgttcagcccggcattctatacagccaagtacgggtacaaactgtgtttgcgactgtatctgaacggtgacgggaccgggaagcgcactcacctcagtctgtttatcgtgatcatgcgcggtgagtacgacgcactgctgccctggcctttcagaaacaaggtcacattcatgttactggaccagaacaatagagagcacgccatcgacgcctttcgtccagatcttagctccgcctcattccagcgcccacagtcagaaacaaatgtggcatcagggtgccctctgttttttcctctgtcaaagttgcagagccctaaacacgcgtacgtcaaggacgacaccatgtttttgaaatgcatcgtcgagacatccacttag

SEQ ID NO: 158258 - DNA, 1251 bp, Artificial Sequence
  derived and/or modified sequence
atggccagcagcagcggcagcagcccccggcccgcccccgacgagaatgaatttcccttcggctgcccgcccacagtgtgccaggacccaaaagagcctcgggctttgtgttgtgccgggtgtctgagtgagaacccccgcaacggcgaagatcaaatttgtcccaaatgcaggggagaagatctgcagtccataagcccgggcagccggctccggactcaggaaaaggcacaccccgaggtcgctgaggccggtattggctgtccctttgctggggtgggatgcagctttaagggctcaccacagtctgtccaggaacatgaagtgacttcacagacatctcatctcaacctcttactgggcttcatgaagcagtggaaggcgagactgggttgcggcctggagtccggcccaatggccctggagcagaacctctccgatttacagctacaagctgccgtcgaagtggctggtgatctggaggtggactgttaccgagctccgtgctccgagagccaagaggagctcgccctccagcattttatgaaggagaaattactagcagagctggaaggcaagctcagagtattcgagaacattgtggccgtgctgaacaaggaggtggaagcctcccacctggctttggcgacttctatacaccagtcgcagttagaccgagagaggattctcagcctcgagcaaagggtcgtcgagttgcagcagactctagctcagaaagaccaggccctgggcaaattagaacaaagcttaaggctcatggaggaagcgagcttcgacggcacatttctgtggaagatcaccaacgtgaccaggcgctgtcatgaatccgcgtgcggcagaactgtgtcgctcttcagtccagcgttttatacagctaagtacggctataaattatgcttaaggctttatttgaacggagatgggactggcaaaaggacacacctgtccctcttcattgttataatgaggggagaatatgatgccttgctcccatggccattccgtaataaagtcacctttatgctgctcgatcagaataacagagaacacgcaatcgacgcttttaggcctgatctgagcagtgcctccttccagagacctcaaagcgagactaatgtggcaagcggatgccctctgttttttcccttgtctaagctccaatctcccaaacatgcttacgttaaggatgataccatgttcctcaagtgtatcgtagagactagtacgtag

SEQ ID NO: 158259 - DNA, 1251 bp, Artificial Sequence
  derived and/or modified sequence
atggcatcaagttcagggtcttccccaagaccggctccagatgagaacgagttcccctttggttgccctcccacagtctgtcaggatcccaaggagcctagggcgctttgctgcgcaggctgtctttctgagaaccctcgtaacggggaagaccaaatatgtccgaaatgtagaggcgaagacttacagtccatcagccccggatccagacttagaacacaagaaaaggcccaccccgaggtggccgaggccggaattggatgtccttttgcaggggtgggttgttctttcaagggctcgccccagtcggtccaagaacacgaggtgacctcccagactagtcatctgaatctgctgcttggattcatgaagcagtggaaagctcgattgggatgcggcctggaatcgggcccaatggccctggaacagaatctgtccgatcttcagctgcaggctgccgtcgaagtagccggagacttggaagtggactgttaccgagctccttgctctgagtctcaggaggagctcgccttacaacacttcatgaaggaaaaactgctggccgagctcgagggcaagctgcgggtgttcgaaaatatcgttgcggttctaaataaagaggttgaagcgagtcatctggcactcgcaacgagtatccatcagtcacagctggacagagaacgaatcctgtctttggaacaacgagtggtggaactccaacagaccctcgctcagaaagaccaggcccttggcaagctggagcagagcttgcgtttgatggaggaggcaagtttcgatggaacctttctttggaaaatcaccaatgtgacgcgtagatgccacgagtcagcttgcggaaggacagtgagtctatttagcccagctttttacacagccaaatatggttacaagttgtgcctgcgcctctatctgaatggcgacggaaccggcaagcgaacccacttgtctctttttattgtgattatgaggggagaatatgatgctctgctgccttggcccttcagaaacaaggtcacgtttatgttactggaccagaacaaccgcgaacatgcgatcgatgcatttagacctgacctgtctagtgcctccttccaaaggcctcagtcagagactaatgtagcgtcaggctgcccactatttttccctctttcgaaactccagtcgccaaagcatgcgtatgtcaaagacgatactatgtttctgaaatgtatcgtcgagacaagcacatag

SEQ ID NO: 158260 - DNA, 1251 bp, Artificial Sequence
  derived and/or modified sequence
atggcatcttcatctggctcctccccccgtcctgctcctgatgaaaatgagtttcctttcggttgcccacccacagtgtgtcaggatcccaaggagcctcgagccctgtgctgcgccggatgtctgtccgaaaatcctcggaacggcgaggaccagatatgccccaagtgtcggggtgaagatctgcagtctatatctcccggtagcagactgcgaacgcaagagaaagcacacccagaggtcgcagaggcaggaatcggatgtcctttcgctggagtcggctgcagttttaaaggctcaccgcaatccgtgcaggaacacgaggtgactagccagacatcccacctgaatcttctgctgggttttatgaaacagtggaaggctaggctcgggtgtggactggagtccggcccaatggctctcgagcagaaccttagcgacctccagcttcaagcagcggtcgaggtggccggtgatctcgaggtcgattgctacagggcgccatgttccgagtcccaggaagagttagcactccagcacttcatgaaggagaagcttctggcagagctcgagggaaaactgcgcgtatttgagaatatcgtagctgtgttgaacaaggaggtggaggcctcccacctagctttagcgacttccattcaccagagtcagctggatagggagcgtatcctcagcttagaacaacgggtcgtcgagctgcagcaaaccctggcacagaaagaccaggcactcggaaagctggaacagagcctgcgcctcatggaggaagcttcattcgacggaactttcctgtggaagattacaaacgtcaccaggcggtgtcatgaatccgcatgtgggagaactgtgtccttgtttagccccgcattttataccgcaaagtatggctataagctgtgtctgcgactctatctgaacggggacggtactgggaaacgcactcatctgagcctctttatcgtaattatgcgcggtgagtatgatgctttgctgccttggccatttaggaacaaagttacctttatgctgctggaccagaacaatcgcgagcatgccatcgacgcattcaggcctgaccttagcagcgcctcctttcagaggccacagtcagagacaaacgtcgccagtggctgcccactgttcttccctctgtctaagttgcagtcccctaagcacgcatacgtcaaggacgacacgatgtttctcaaatgcattgtcgagacctcaacttag

SEQ ID NO: 158261 - DNA, 6324 bp, Artificial Sequence
  derived and/or modified sequence
gcggcgggggctgtgctggcgccggcaggcgcgaggaatcacagagcggggcgcccagcctcatcatggggcggcccacggagacttcccgtgggagtggggtctggtgcaggggcgccccaaaggacgagtgggagatggggacacgcggcgcagagagactcctcgtggatggagccgatggaggcccagtgtagaagagaaaggggtcaaggagacggataaggagccaccagagacgcggggggaattccccgcagaggatgcgggaagccggggaaaggaagggattccggaaggaagggctgagagccgggtcaggtgctggcaggagggctggttggatagaaactggggcgggcccagggcatttggcgtccccgacatgcgtatacacttggagagatgattccctggagatccaagtgcctgtatagacaatcttttctagaagttctaccgttaggtgaggcgagagtagatgtagaaattggagacgagaataaagagtgttttaaaagcgtgcgtggttacaggactggctctgggttcaggggtccccactcactagctgtgagaccttgaacaagtcgcttagcctctctgtgcctcagttttctcatctgtaaggtggggatgatgatggcaatacctgcttcacagagtgaaaattagatgagatgatgtctgtaaaattacgtaagacggtacccaaaagtagtactatttttcccttttcttattagagcaggttgcgcacgttttgatgtccgtgggaatgagcaggtagagagggtggtattgaggccggaggggagagaagggacccacagatggggagagaagtcttgggtgcctgttttatcccaaaccaggggaaggagggaacaggtagggctggctgcaggaaagcttgcaggtatggggtacacagttaaaagggagtgtcttctgatagtcttgatgcaggcctggaggtcgtttgttatgggggtggaggtcctgatgtacattgtggcggtaagatgccgtgctgtctttgccaccagcctgtggcagccctggtgttacaccagggcaggtgggcagtttaatgtatctcaggccagatgacctgccctgcccacctgttgaggctccagtagatagacgtgaaagcacagtataagcataatgcaccactttaatccttttctctgaggagctggaaggcctgtagtcaccatctgagccaaatgtcattcaagtacttcacttgggttacacaccacactttgacccactatctcatttagtcatcacaacaaatgggtgaaataggtattattgtcccattttacagatgcagaatctgagtttcagggaagttaaggactttgtcccagggcccacagttagtaagcagtggacccaggatttcaactcagctctgtctgacctcaaaacccatgatctgaaaccactgtgaaagtttgcaaaacctctgtagcagccaagcaggatggaaagatgtgtagggattgtcttctccatttgatagatgagacaagagctgggtactctgatctccatcccaagcacacagagcttggggccccacagccctggtgtgaatcccactccactaccagaggctgtgtgcctttggaccaggcatcttgcttctctgaccctatatacagctgcagaagaattccttgcaggttgctgtaaggatttggagggaaactgttgcccagcacacagtacacattctgggagccatcgtttccccagtgcacttttcctgcaaatgtggatctacatcccacttggatgctgagaccagctgctgtgatcttgcatttgtttagcgctttgttctccttgaggcagtaaagtggtggcacctgaccggagcatgtagccacctatgacttcctgagtggggtggtgtggggagggccctgaggagtctgtggtcctaggccttggatttcatcagggctttcctgctccttctggttgcctcagtcccaggcaagatagggtcccagaatcttacagcccagaggccacctgttgcaacttcttttttacagatggagtcatcagaacccactgtgaggaagtgacttctccttgaggtcacccagacactccaaacagagcagagcaaaagcgcctagaacttgaaattttggacctgtctccaacaccctggggatttccaccaggaagccttcagtcaccatccaggggatttttatcgccacaaagggtaattcctgctccatccctgctgtgactcagctgtgacgttgaaccacacaagccagagagaagaagataaagtcatcagagctcctactcaccagagagtgaggcccaggccaggactccacaaggctggtcccctgccctggagcaacttaaacaggccctctggccagcctggaaccctgagatggcctccagctcaggcagcagtcctcgcccggcccctgatgagaatgagtttccctttgggtgccctcccaccgtctgccaggacccaaaggagcccagggctctctgctgtgcaggctgtctctctgagaacccgaggaatggcgaggatcagatctgccccaaatgcagaggggaagacctccagtctataagcccaggaagccgtcttcgaactcaggagaaggctcaccccgaggtggctgaggctggaattgggtgcccctttgcaggtgtcggctgctccttcaagggaagcccacagtctgtgcaagagcatgaggtcacctcccagacctcccacctaaacctgctgttggggttcatgaaacagtggaaggcccggctgggctgtggcctggagtctgggcccatggccctggagcagaacctgtcagacctgcagctgcaggcagccgtggaagtggcgggggacctggaggtcgattgctaccgggcaccctgctccgagagccaggaggagctggccctgcagcacttcatgaaggagaagcttctggctgagctggaggggaagctgcgtgtgtttgagaacattgttgctgtcctcaacaaggaggtggaggcctcccacctggccctggccacctctatccaccagagccagctggaccgtgagcgcatcctgagcttggagcagagggtggtggagcttcagcagaccctggcccagaaagaccaggccctgggcaagctggagcagagcttgcgcctcatggaggaggcctccttcgatggcactttcctgtggaagatcaccaatgtcaccaggcggtgccatgagtcggcctgtggcaggaccgtcagcctcttctccccagccttctacactgccaagtatggctacaagttgtgcctgcggctgtacctgaatggagatggcactggaaagagaacccatctgtcgctcttcatcgtgatcatgagaggggagtatgatgcgctgctgccgtggcccttccggaacaaggtcaccttcatgctgctggaccagaacaaccgtgagcacgccattgacgccttccggcctgacctaagctcagcgtccttccagaggccccagagtgaaaccaacgtggccagtggatgcccactcttcttccccctcagcaaactgcagtcacccaagcacgcctacgtgaaggacgacacaatgttcctcaagtgcattgtggagaccagcacttagggtgggcggggctcctgagggagctccaactcagaagggagctagccagaggactgtgatgccctgcccttggcacccaagacctcagggcacaaagatgggtgaaggctggcatgatccaagcaagactgaggggtcgacttcgggctggccatctggttaggatggcaggacgtgggctgggcccacaaaggcaaagggtccagaaggagacaggcagagctgctcccctctgcacggaccatgcgacactgggaggccagtgagccactccggccccgaatgttgaggtggactctcaccaaatgagaagaaaatggaaccaggcttggaaccgtaggacccaagcagagaagctctcgggctaggaagatctctgcagggccgccagggagacctggacacaggcctgctctctttttctccagggtcagaaacaggaccgggtggaagggatggggtgccagtttgaatgcagtctgtccaggctcgtcattggaggtgaacaagcaaacccagacggctccactaggacttcaaattgggggttggatttgaagacttttaagtttccttccagcccagaaagtctctcattctaggcctcctggcccaggtgagtcctagagctacaggggttctggaaacattcaggagcttcctgtcctcccagctcctcactcaccttcagtaacccccactggactgacctggtccacagggcacctgccaccctgggcctggcagctcagcttccccaacacgcaggagcacacccagcccccacatcctgtgcctccatcagctaaacaccacgtcacttcatgcaggtgaaacccagtcactgtgagctcccaggtgcagccagaggcacctcaagaagaagaggggcataaactttcctcttcctgcctagaggccccacctttggtgctttccagaatcccgtaacacctgattaactgaggcatccacttctttcagcagactgatcaggacctccaagccactgagcaatgtataaccccaaagaaataatttttagaatctctttcgaagttttcctaaagtgtatggtttgggagttgtttgtactgagccaggtttgaaaaggccattgctgagtttgaggtggtgccaccagttttgcaggtggcatcagaggctggcatgctggcaggaacatcccctcttagccccagtcttctcttttctataatgagacccaccccagcttgcctccctccctggcttctctgaccctcaaaggagatgccacgcaggacagactggagagagaagcctgggcaatactgcccgcctgtcatggcctggtggtggcccacacctatcttctcaccttggaggccacacccaactttccaaagaccctgagacaagtcaggaccctactactctcccctgctgctttcctgacagcttactcttcctccacctgctgagcctgtgccagactccattgctcaaatcgttagggttgcttctataaaaatgggtcagtagcccttcctgttctctccagcccagcatacaggaggatcaaaggaggtgacggagcatcgtggcacggcagtctcaatgggtcagaaacccaggccagctgggctctaagcctggcatcctgtcatgcttagtccttcagctgaagatcagaggaagcctctcccttgccctctccagctctaggggttttcaggaggcccaactgcaataatggagcactagtgcttttatgtgcaatggtgtcgtccatgcacgacagcagcaaacattctggggctgctttttattgttcccacggctgacagcgtggcagcggagactgtggaggcagtggagactgacttcttcctgctgacagctggatgtcacacatgaaggtctggcctagcgagtgatgggtctaggccctgaaactgatgtcctagcaataacctcttgatccctactcaccgagtgttgagcccaaggggggatttgtagaacaagcccccatgagaaacagctgttactctacacttttgattgcctatttctgatggcaagagatacatactctcttcaaagagcatgagatgcagccattctttcagcaaagcttcattgacacctgcacctgttaactgtgttcgacattgaagggagaaaggcaagatgtgcactctggactcaagaaactcttagttcagtggaggaaatgagcagataagtagatcattatgattgagagtaggagaagcttagagaaagcacagaatcccagatccagctggtgaaggagggaaggcttcaggcctttaagctcagcctgagaatattgtgaaatgcagaggatggggaaaagggaagagtaccgacttgaaaacggagagctgtcttggctgagggcagggtctgtgtggcaggatgggggagggagtcagaagggtcagatgaactggagtgtagacagcatcagatgcagcagtgcccaccgcccccccccccaccccccgccctgcccacagagcacctgctggtaaccctgggcctattgaaagcaggatgagatgataatttaagacactgaatgatttcttttccaacaaagctctatgttaagtgca

SEQ ID NO: 158262 - DNA, 4303 bp, Artificial Sequence
  derived and/or modified sequence
acactccaccggaagctccgggcctggccgccggtaggcggtggcggaggcggcgccgagatggagtcatcagaacccactgtgaggaagtgacttctccttgaggtcacccagacactccaaacagagcagagcaaaagcgcctagaacttgaaattttggacctgtctccaacaccctggggatttccaccaggaagccttcagtcaccatccaggggatttttatcgccacaaagggtaattcctgctccatccctgctgtgactcagctgtgacgttgaaccacacaagccagagagaagaagataaagtcatcagagctcctactcaccagagagtgaggcccaggccaggactccacaaggctggtcccctgccctggagcaacttaaacaggccctctggccagcctggaaccctgagatggcctccagctcaggcagcagtcctcgcccggcccctgatgagaatgagtttccctttgggtgccctcccaccgtctgccaggacccaaaggagcccagggctctctgctgtgcaggctgtctctctgagaacccgaggaatggcgaggatcagatctgccccaaatgcagaggggaagacctccagtctataagcccaggaagccgtcttcgaactcaggagaaggctcaccccgaggtggctgaggctggaattgggtgcccctttgcaggtgtcggctgctccttcaagggaagcccacagtctgtgcaagagcatgaggtcacctcccagacctcccacctaaacctgctgttggggttcatgaaacagtggaaggcccggctgggctgtggcctggagtctgggcccatggccctggagcagaacctgtcagacctgcagctgcaggcagccgtggaagtggcgggggacctggaggtcgattgctaccgggcaccctgctccgagagccaggaggagctggccctgcagcacttcatgaaggagaagcttctggctgagctggaggggaagctgcgtgtgtttgagaacattgttgctgtcctcaacaaggaggtggaggcctcccacctggccctggccacctctatccaccagagccagctggaccgtgagcgcatcctgagcttggagcagagggtggtggagcttcagcagaccctggcccagaaagaccaggccctgggcaagctggagcagagcttgcgcctcatggaggaggcctccttcgatggcactttcctgtggaagatcaccaatgtcaccaggcggtgccatgagtcggcctgtggcaggaccgtcagcctcttctccccagccttctacactgccaagtatggctacaagttgtgcctgcggctgtacctgaatggagatggcactggaaagagaacccatctgtcgctcttcatcgtgatcatgagaggggagtatgatgcgctgctgccgtggcccttccggaacaaggtcaccttcatgctgctggaccagaacaaccgtgagcacgccattgacgccttccggcctgacctaagctcagcgtccttccagaggccccagagtgaaaccaacgtggccagtggatgcccactcttcttccccctcagcaaactgcagtcacccaagcacgcctacgtgaaggacgacacaatgttcctcaagtgcattgtggagaccagcacttagggtgggcggggctcctgagggagctccaactcagaagggagctagccagaggactgtgatgccctgcccttggcacccaagacctcagggcacaaagatgggtgaaggctggcatgatccaagcaagactgaggggtcgacttcgggctggccatctggttaggatggcaggacgtgggctgggcccacaaaggcaaagggtccagaaggagacaggcagagctgctcccctctgcacggaccatgcgacactgggaggccagtgagccactccggccccgaatgttgaggtggactctcaccaaatgagaagaaaatggaaccaggcttggaaccgtaggacccaagcagagaagctctcgggctaggaagatctctgcagggccgccagggagacctggacacaggcctgctctctttttctccagggtcagaaacaggaccgggtggaagggatggggtgccagtttgaatgcagtctgtccaggctcgtcattggaggtgaacaagcaaacccagacggctccactaggacttcaaattgggggttggatttgaagacttttaagtttccttccagcccagaaagtctctcattctaggcctcctggcccaggtgagtcctagagctacaggggttctggaaacattcaggagcttcctgtcctcccagctcctcactcaccttcagtaacccccactggactgacctggtccacagggcacctgccaccctgggcctggcagctcagcttccccaacacgcaggagcacacccagcccccacatcctgtgcctccatcagctaaacaccacgtcacttcatgcaggtgaaacccagtcactgtgagctcccaggtgcagccagaggcacctcaagaagaagaggggcataaactttcctcttcctgcctagaggccccacctttggtgctttccagaatcccgtaacacctgattaactgaggcatccacttctttcagcagactgatcaggacctccaagccactgagcaatgtataaccccaaagaaataatttttagaatctctttcgaagttttcctaaagtgtatggtttgggagttgtttgtactgagccaggtttgaaaaggccattgctgagtttgaggtggtgccaccagttttgcaggtggcatcagaggctggcatgctggcaggaacatcccctcttagccccagtcttctcttttctataatgagacccaccccagcttgcctccctccctggcttctctgaccctcaaaggagatgccacgcaggacagactggagagagaagcctgggcaatactgcccgcctgtcatggcctggtggtggcccacacctatcttctcaccttggaggccacacccaactttccaaagaccctgagacaagtcaggaccctactactctcccctgctgctttcctgacagcttactcttcctccacctgctgagcctgtgccagactccattgctcaaatcgttagggttgcttctataaaaatgggtcagtagcccttcctgttctctccagcccagcatacaggaggatcaaaggaggtgacggagcatcgtggcacggcagtctcaatgggtcagaaacccaggccagctgggctctaagcctggcatcctgtcatgcttagtccttcagctgaagatcagaggaagcctctcccttgccctctccagctctaggggttttcaggaggcccaactgcaataatggagcactagtgcttttatgtgcaatggtgtcgtccatgcacgacagcagcaaacattctggggctgctttttattgttcccacggctgacagcgtggcagcggagactgtggaggcagtggagactgacttcttcctgctgacagctggatgtcacacatgaaggtctggcctagcgagtgatgggtctaggccctgaaactgatgtcctagcaataacctcttgatccctactcaccgagtgttgagcccaaggggggatttgtagaacaagcccccatgagaaacagctgttactctacacttttgattgcctatttctgatggcaagagatacatactctcttcaaagagcatgagatgcagccattctttcagcaaagcttcattgacacctgcacctgttaactgtgttcgacattgaagggagaaaggcaagatgtgcactctggactcaagaaactcttagttcagtggaggaaatgagcagataagtagatcattatgattgagagtaggagaagcttagagaaagcacagaatcccagatccagctggtgaaggagggaaggcttcaggcctttaagctcagcctgagaatattgtgaaatgcagaggatggggaaaagggaagagtaccgacttgaaaacggagagctgtcttggctgagggcagggtctgtgtggcaggatgggggagggagtcagaagggtcagatgaactggagtgtagacagcatcagatgcagcagtgcccaccgcccccccccccaccccccgccctgcccacagagcacctgctggtaaccctgggcctattgaaagcaggatgagatgataatttaagacactgaatgatttcttttccaacaaagctctatgttaagtgca

SEQ ID NO: 158263 - DNA, 3715 bp, Artificial Sequence
  derived and/or modified sequence
gatgattacggagctgtgtggactgtgccctgacaggagaaatagcagtgctgcccaggatcacagctcaccccgaggtggctgaggctggaattgggtgcccctttgcaggtgtcggctgctccttcaagggaagcccacagtctgtgcaagagcatgaggtcacctcccagacctcccacctaaacctgctgttggggttcatgaaacagtggaaggcccggctgggctgtggcctggagtctgggcccatggccctggagcagaacctgtcagacctgcagctgcaggcagccgtggaagtggcgggggacctggaggtcgattgctaccgggcaccctgctccgagagccaggaggagctggccctgcagcacttcatgaaggagaagcttctggctgagctggaggggaagctgcgtgtgtttgagaacattgttgctgtcctcaacaaggaggtggaggcctcccacctggccctggccacctctatccaccagagccagctggaccgtgagcgcatcctgagcttggagcagagggtggtggagcttcagcagaccctggcccagaaagaccaggccctgggcaagctggagcagagcttgcgcctcatggaggaggcctccttcgatggcactttcctgtggaagatcaccaatgtcaccaggcggtgccatgagtcggcctgtggcaggaccgtcagcctcttctccccagccttctacactgccaagtatggctacaagttgtgcctgcggctgtacctgaatggagatggcactggaaagagaacccatctgtcgctcttcatcgtgatcatgagaggggagtatgatgcgctgctgccgtggcccttccggaacaaggtcaccttcatgctgctggaccagaacaaccgtgagcacgccattgacgccttccggcctgacctaagctcagcgtccttccagaggccccagagtgaaaccaacgtggccagtggatgcccactcttcttccccctcagcaaactgcagtcacccaagcacgcctacgtgaaggacgacacaatgttcctcaagtgcattgtggagaccagcacttagggtgggcggggctcctgagggagctccaactcagaagggagctagccagaggactgtgatgccctgcccttggcacccaagacctcagggcacaaagatgggtgaaggctggcatgatccaagcaagactgaggggtcgacttcgggctggccatctggttaggatggcaggacgtgggctgggcccacaaaggcaaagggtccagaaggagacaggcagagctgctcccctctgcacggaccatgcgacactgggaggccagtgagccactccggccccgaatgttgaggtggactctcaccaaatgagaagaaaatggaaccaggcttggaaccgtaggacccaagcagagaagctctcgggctaggaagatctctgcagggccgccagggagacctggacacaggcctgctctctttttctccagggtcagaaacaggaccgggtggaagggatggggtgccagtttgaatgcagtctgtccaggctcgtcattggaggtgaacaagcaaacccagacggctccactaggacttcaaattgggggttggatttgaagacttttaagtttccttccagcccagaaagtctctcattctaggcctcctggcccaggtgagtcctagagctacaggggttctggaaacattcaggagcttcctgtcctcccagctcctcactcaccttcagtaacccccactggactgacctggtccacagggcacctgccaccctgggcctggcagctcagcttccccaacacgcaggagcacacccagcccccacatcctgtgcctccatcagctaaacaccacgtcacttcatgcaggtgaaacccagtcactgtgagctcccaggtgcagccagaggcacctcaagaagaagaggggcataaactttcctcttcctgcctagaggccccacctttggtgctttccagaatcccgtaacacctgattaactgaggcatccacttctttcagcagactgatcaggacctccaagccactgagcaatgtataaccccaaagaaataatttttagaatctctttcgaagttttcctaaagtgtatggtttgggagttgtttgtactgagccaggtttgaaaaggccattgctgagtttgaggtggtgccaccagttttgcaggtggcatcagaggctggcatgctggcaggaacatcccctcttagccccagtcttctcttttctataatgagacccaccccagcttgcctccctccctggcttctctgaccctcaaaggagatgccacgcaggacagactggagagagaagcctgggcaatactgcccgcctgtcatggcctggtggtggcccacacctatcttctcaccttggaggccacacccaactttccaaagaccctgagacaagtcaggaccctactactctcccctgctgctttcctgacagcttactcttcctccacctgctgagcctgtgccagactccattgctcaaatcgttagggttgcttctataaaaatgggtcagtagcccttcctgttctctccagcccagcatacaggaggatcaaaggaggtgacggagcatcgtggcacggcagtctcaatgggtcagaaacccaggccagctgggctctaagcctggcatcctgtcatgcttagtccttcagctgaagatcagaggaagcctctcccttgccctctccagctctaggggttttcaggaggcccaactgcaataatggagcactagtgcttttatgtgcaatggtgtcgtccatgcacgacagcagcaaacattctggggctgctttttattgttcccacggctgacagcgtggcagcggagactgtggaggcagtggagactgacttcttcctgctgacagctggatgtcacacatgaaggtctggcctagcgagtgatgggtctaggccctgaaactgatgtcctagcaataacctcttgatccctactcaccgagtgttgagcccaaggggggatttgtagaacaagcccccatgagaaacagctgttactctacacttttgattgcctatttctgatggcaagagatacatactctcttcaaagagcatgagatgcagccattctttcagcaaagcttcattgacacctgcacctgttaactgtgttcgacattgaagggagaaaggcaagatgtgcactctggactcaagaaactcttagttcagtggaggaaatgagcagataagtagatcattatgattgagagtaggagaagcttagagaaagcacagaatcccagatccagctggtgaaggagggaaggcttcaggcctttaagctcagcctgagaatattgtgaaatgcagaggatggggaaaagggaagagtaccgacttgaaaacggagagctgtcttggctgagggcagggtctgtgtggcaggatgggggagggagtcagaagggtcagatgaactggagtgtagacagcatcagatgcagcagtgcccaccgcccccccccccaccccccgccctgcccacagagcacctgctggtaaccctgggcctattgaaagcaggatgagatgataatttaagacactgaatgatttcttttccaacaaagctctatgttaagtgca

SEQ ID NO: 158264 - protein, 307 aa, Artificial Sequence
  derived and/or modified sequence
MFSFNMFDHPIPRVFQNRFSTQYRCFSVSMLAGPNDRSDVEKGGKIIMPPSALDQLSRLNITYPMLFKLTNKNSDRMTHCGVLEFVADEGICYLPHWMMQNLLLEEGGLVQVESVNLQVATYSKFQPQSPDFLDITNPKAVLENALRNFACLTTGDVIAINYNEKIYELRVMETKPDKAVSIIECDMNVDFDAPLGYKEPERQVQHEESTEGEADHSGYAGELGFRAFSGSGNRLDGKKKGVEPSPSPIKPGDIKRGIPNYEFKLGKITFIRNSRPLVKKVEEDEAGGRFVAFSGEGQSLRKKGRKP

SEQ ID NO: 158265 - protein, 296 aa, Artificial Sequence
  derived and/or modified sequence
MFSFNMFDHPIPRVFQNRFSTQYRCFSVSMLAGPNDRSDVEKGGKSRLNITYPMLFKLTNKNSDRMTHCGVLEFVADEGICYLPHWMMQNLLLEEGGLVQVESVNLQVATYSKFQPQSPDFLDITNPKAVLENALRNFACLTTGDVIAINYNEKIYELRVMETKPDKAVSIIECDMNVDFDAPLGYKEPERQVQHEESTEGEADHSGYAGELGFRAFSGSGNRLDGKKKGVEPSPSPIKPGDIKRGIPNYEFKLGKITFIRNSRPLVKKVEEDEAGGRFVAFSGEGQSLRKKGRKP

SEQ ID NO: 158266 - protein, 343 aa, Artificial Sequence
  derived and/or modified sequence
MFSFNMFDHPIPRVFQNRFSTQYRCFSVSMLAGPNDRSDVEKGGKIIMPPSALDQLSRLNITYPMLFKLTNKNSDRMTHCGVLEFVADEGICYLPHWVVYRLSLERDGLKSLEVAEVSGSDYFPSPFCGLEVWMMQNLLLEEGGLVQVESVNLQVATYSKFQPQSPDFLDITNPKAVLENALRNFACLTTGDVIAINYNEKIYELRVMETKPDKAVSIIECDMNVDFDAPLGYKEPERQVQHEESTEGEADHSGYAGELGFRAFSGSGNRLDGKKKGVEPSPSPIKPGDIKRGIPNYEFKLGKITFIRNSRPLVKKVEEDEAGGRFVAFSGEGQSLRKKGRKP

SEQ ID NO: 158267 - protein, 266 aa, Artificial Sequence
  derived and/or modified sequence
MFSFNMFDHPIPRVFQNRFSTQYRCFSVSMLAGPNDRSDVEKGGKIIMPPSALDQLSRLNITYPMLFKLTNKNSDRMTHCGVLEFVADEGICYLPHWMMQNLLLEEGGLVQVESVNLQVATYSKFQPQSPDFLDITNPKAVLENALRNFACLTTGDVIAINYNEKIYELRVMETKPDKAVSIIECDMNVDFDAPLGYKEPERQVQHEESTEGEADHSGYAGELGFRAFSGSGNRLDGKKKGVEPSPSPIKPGDIKRGIPNYEFKLG

SEQ ID NO: 158268 - DNA, 924 bp, Artificial Sequence
  derived and/or modified sequence
atgttcagcttcaacatgttcgaccaccccatccccagagtgttccagaacagattcagcacccagtacagatgcttcagcgtgagcatgctggccggccccaacgacagaagcgacgtggagaagggcggcaagatcatcatgccccccagcgccctggaccagctgagcagactgaacatcacctaccccatgctgttcaagctgaccaacaagaacagcgacagaatgacccactgcggcgtgctggagttcgtggccgacgagggcatctgctacctgccccactggatgatgcagaacctgctgctggaggagggcggcctggtgcaggtggagagcgtgaacctgcaggtggccacctacagcaagttccagccccagagccccgacttcctggacatcaccaaccccaaggccgtgctggagaacgccctgagaaacttcgcctgcctgaccaccggcgacgtgatcgccatcaactacaacgagaagatctacgagctgagagtgatggagaccaagcccgacaaggccgtgagcatcatcgagtgcgacatgaacgtggacttcgacgcccccctgggctacaaggagcccgagagacaggtgcagcacgaggagagcaccgagggcgaggccgaccacagcggctacgccggcgagctgggcttcagagccttcagcggcagcggcaacagactggacggcaagaagaagggcgtggagcccagccccagccccatcaagcccggcgacatcaagagaggcatccccaactacgagttcaagctgggcaagatcaccttcatcagaaacagcagacccctggtgaagaaggtggaggaggacgaggccggcggcagattcgtggccttcagcggcgagggccagagcctgagaaagaagggcagaaagccctag

SEQ ID NO: 158269 - DNA, 891 bp, Artificial Sequence
  derived and/or modified sequence
atgttcagcttcaacatgttcgaccaccccatccccagagtgttccagaacagattcagcacccagtacagatgcttcagcgtgagcatgctggccggccccaacgacagaagcgacgtggagaagggcggcaagagcagactgaacatcacctaccccatgctgttcaagctgaccaacaagaacagcgacagaatgacccactgcggcgtgctggagttcgtggccgacgagggcatctgctacctgccccactggatgatgcagaacctgctgctggaggagggcggcctggtgcaggtggagagcgtgaacctgcaggtggccacctacagcaagttccagccccagagccccgacttcctggacatcaccaaccccaaggccgtgctggagaacgccctgagaaacttcgcctgcctgaccaccggcgacgtgatcgccatcaactacaacgagaagatctacgagctgagagtgatggagaccaagcccgacaaggccgtgagcatcatcgagtgcgacatgaacgtggacttcgacgcccccctgggctacaaggagcccgagagacaggtgcagcacgaggagagcaccgagggcgaggccgaccacagcggctacgccggcgagctgggcttcagagccttcagcggcagcggcaacagactggacggcaagaagaagggcgtggagcccagccccagccccatcaagcccggcgacatcaagagaggcatccccaactacgagttcaagctgggcaagatcaccttcatcagaaacagcagacccctggtgaagaaggtggaggaggacgaggccggcggcagattcgtggccttcagcggcgagggccagagcctgagaaagaagggcagaaagccctag

SEQ ID NO: 158270 - DNA, 1032 bp, Artificial Sequence
  derived and/or modified sequence
atgttcagcttcaacatgttcgaccaccccatccccagagtgttccagaacagattcagcacccagtacagatgcttcagcgtgagcatgctggccggccccaacgacagaagcgacgtggagaagggcggcaagatcatcatgccccccagcgccctggaccagctgagcagactgaacatcacctaccccatgctgttcaagctgaccaacaagaacagcgacagaatgacccactgcggcgtgctggagttcgtggccgacgagggcatctgctacctgccccactgggtggtgtacagactgagcctggagagagacggcctgaagagcctggaggtggccgaggtgagcggcagcgactacttccccagccccttctgcggcctggaggtgtggatgatgcagaacctgctgctggaggagggcggcctggtgcaggtggagagcgtgaacctgcaggtggccacctacagcaagttccagccccagagccccgacttcctggacatcaccaaccccaaggccgtgctggagaacgccctgagaaacttcgcctgcctgaccaccggcgacgtgatcgccatcaactacaacgagaagatctacgagctgagagtgatggagaccaagcccgacaaggccgtgagcatcatcgagtgcgacatgaacgtggacttcgacgcccccctgggctacaaggagcccgagagacaggtgcagcacgaggagagcaccgagggcgaggccgaccacagcggctacgccggcgagctgggcttcagagccttcagcggcagcggcaacagactggacggcaagaagaagggcgtggagcccagccccagccccatcaagcccggcgacatcaagagaggcatccccaactacgagttcaagctgggcaagatcaccttcatcagaaacagcagacccctggtgaagaaggtggaggaggacgaggccggcggcagattcgtggccttcagcggcgagggccagagcctgagaaagaagggcagaaagccctag

SEQ ID NO: 158271 - DNA, 924 bp, Artificial Sequence
  derived and/or modified sequence
atgtttagctttaacatgttcgatcaccccatcccacgggtcttccagaatcgcttcagcacgcagtacagatgttttagcgtgtcaatgctcgcaggtcccaatgacagaagcgacgtggaaaagggtggtaagataataatgcccccgtcggccttggatcagttaagccgcttgaacatcacatatcccatgctgttcaaactcacgaacaagaattctgacagaatgactcactgtggcgtacttgaatttgttgctgacgagggtatctgctatcttccacactggatgatgcagaacttgttgctggaggaaggtgggctggtgcaagtagaatctgttaatctgcaggttgcaacgtattccaagttccagccacagagcccagactttctcgacatcactaacccaaaggcggtgctcgaaaacgccttgcgaaatttcgcctgcctcaccaccggcgacgtaatagctatcaattataatgagaagatctatgagctcagagttatggagactaagcccgataaggcggtatccatcattgaatgcgatatgaatgtagattttgatgcaccattaggctataaagagcctgagaggcaggtgcagcatgaggagagcacagaaggcgaggctgatcattccggatacgcgggagagctaggatttagggctttcagcggaagcggcaacaggctggacgggaagaaaaagggagtagagccatcgccgagccccattaagccaggggacattaaacgtgggatccccaattacgaatttaagctagggaagatcacatttattaggaattcgcgaccattagtgaagaaagtcgaagaagatgaggctggcggccgtttcgtagctttctcaggcgagggccagtctttgcgaaaaaaggggcgcaagccttag

SEQ ID NO: 158272 - DNA, 891 bp, Artificial Sequence
  derived and/or modified sequence
atgttctcgtttaatatgttcgaccacccgatcccgagggtgtttcagaaccgtttctctacacagtatcgctgcttctctgtgagcatgctggccggccctaatgatagatcagatgtggagaaaggtggcaaatctcgcctgaatataacatatccgatgttattcaaactaaccaataaaaactcggaccgtatgacacattgcggtgttttggagttcgtagctgatgaaggaatttgctacctcccccattggatgatgcagaacctgcttctcgaagaaggggggctggtccaagtggagtctgtcaacctgcaagtggctacatactctaagtttcagcctcagagccccgatttccttgatatcacgaaccctaaggctgtccttgagaatgcccttaggaatttcgcttgcctaacaaccggggatgtcatcgcaataaactacaatgagaaaatctacgaacttcgggtcatggaaacaaaaccagacaaagctgtctcaattatcgagtgcgacatgaacgtagactttgatgcgccactcggctacaaagaaccagagagacaggtgcaacacgaggaatcaaccgagggtgaagcggaccattccgggtacgccggcgaattggggttccgggcgttctccgggtcaggcaaccggcttgacgggaagaagaagggtgtcgaaccttcaccttctcccatcaaacctggcgatattaaacgcgggatcccgaattacgagtttaagctggggaaaatcaccttcatccgtaatagtcgccccctggtgaagaaggtggaggaagacgaggccggcggcaggttcgtcgctttttctggtgaaggtcagagcctcagaaaaaagggccgcaaaccctag

SEQ ID NO: 158273 - DNA, 1032 bp, Artificial Sequence
  derived and/or modified sequence
atgttctctttcaacatgttcgaccacccaatccctagggtgtttcagaatagattctcgacacaatatcgctgcttttctgtgtccatgttggccggacctaacgaccggtccgacgtggagaaaggcgggaaaatcattatgcctccatccgcccttgaccagctttctcggctgaatattacataccctatgctgtttaagttaacaaataagaattcagaccgtatgacacattgcggggtcttagaatttgtggctgacgagggcatatgctatctccctcactgggttgtgtataggctaagcctggagagggacgggctgaaatctctggaggtcgccgaggtctctgggagtgactacttccccagcccattttgcgggctggaggtgtggatgatgcaaaacctgctgctcgaagaaggtggcctggttcaagtcgaatccgtgaacctccaggtcgctacctacagtaaatttcaacctcagtccccagatttcctcgatatcacaaatcccaaagccgtgctggagaatgccctacgcaactttgcatgcttgacaactggcgacgtgatagcgatcaattataatgaaaagatatacgaactcagggtgatggagactaagcctgataaggctgtgtccatcatagagtgcgacatgaacgttgattttgatgctcccctcggctataaggagcccgagcgtcaggtgcagcacgaggaaagtaccgagggcgaggccgatcacagtggatacgcgggggaattaggattcagagcattctcgggtagcggcaatcgattagatggcaaaaaaaaaggcgtggaaccctcacccagtcctattaagcctggagatatcaagagaggcattcctaattacgagtttaagttagggaagattacatttattaggaatagtcgccctctggtcaaaaaggtggaggaagatgaggccgggggccgctttgtggccttttctggggaagggcagtcactgcggaagaagggtagaaagccctag

SEQ ID NO: 158274 - DNA, 924 bp, Artificial Sequence
  derived and/or modified sequence
atgttctccttcaacatgtttgaccaccccatccccagggtcttccagaaccgcttcagcacccagtaccgctgcttctctgtgtccatgctggccggccccaatgacagaagtgatgtggagaagggcggcaagatcatcatgcctccttctgccctggaccagctgagccggctgaacatcacctaccccatgctgttcaagctgaccaacaagaacagcgacaggatgacccactgcggcgtgctggagtttgtggctgatgagggcatctgctacctgccccactggatgatgcagaacctgctgctggaggagggcggcctggtgcaggtggagagcgtgaacctgcaggtggccacctacagcaagttccagccccagagcccagacttcctggacatcaccaaccccaaggctgtgctggagaatgccctgaggaactttgcctgcctgaccactggagatgtgattgccatcaactacaatgagaagatctatgagctgcgggtgatggagaccaagccagacaaggctgtgtccatcattgaatgtgacatgaatgtggactttgatgcccccctgggctacaaggagcctgagcggcaggtgcagcacgaggagagcacagaaggagaggccgaccacagcggctacgccggggagctgggcttccgggccttcagcggcagcggcaaccggctggatggcaagaagaagggcgtggagcccagccccagccccatcaagccaggggacatcaagaggggcatccccaactatgagttcaagctgggcaagatcaccttcatccggaacagccggcccctggtgaagaaggtggaggaggatgaggccggcggccgctttgtggccttcagcggggagggccagagcctgaggaagaagggcaggaagccctag

SEQ ID NO: 158275 - DNA, 891 bp, Artificial Sequence
  derived and/or modified sequence
atgttctccttcaacatgtttgaccaccccatccccagggtcttccagaaccgcttcagcacccagtaccgctgcttctctgtgtccatgctggccggccccaatgacagaagtgatgtggagaagggcggcaagagccggctgaacatcacctaccccatgctgttcaagctgaccaacaagaacagcgacaggatgacccactgcggcgtgctggagtttgtggctgatgagggcatctgctacctgccccactggatgatgcagaacctgctgctggaggagggcggcctggtgcaggtggagagcgtgaacctgcaggtggccacctacagcaagttccagccccagagcccagacttcctggacatcaccaaccccaaggctgtgctggagaatgccctgaggaactttgcctgcctgaccactggagatgtgattgccatcaactacaatgagaagatctatgagctgcgggtgatggagaccaagccagacaaggctgtgtccatcattgaatgtgacatgaatgtggactttgatgcccccctgggctacaaggagcctgagcggcaggtgcagcacgaggagagcacagaaggagaggccgaccacagcggctacgccggggagctgggcttccgggccttcagcggcagcggcaaccggctggatggcaagaagaagggcgtggagcccagccccagccccatcaagccaggggacatcaagaggggcatccccaactatgagttcaagctgggcaagatcaccttcatccggaacagccggcccctggtgaagaaggtggaggaggatgaagctgggggccgctttgtggccttctctggagagggccagagcctgaggaagaagggcaggaagccctag

SEQ ID NO: 158276 - DNA, 1032 bp, Artificial Sequence
  derived and/or modified sequence
atgttctccttcaacatgtttgaccaccccatccccagggtcttccagaaccgcttcagcacccagtaccgctgcttctctgtgtccatgctggccggccccaatgacagaagtgatgtggagaagggcggcaagatcatcatgcctccttctgccctggaccagctgagccggctgaacatcacctaccccatgctgttcaagctgaccaacaagaacagcgacaggatgacccactgcggcgtgctggagtttgtggctgatgagggcatctgctacctgccccactgggtggtgtaccgcctgagcctggagagagatggcctgaagagcctggaggtggccgaggtgtctggcagtgactacttccccagccccttctgtggcctggaggtgtggatgatgcagaacctgctgctggaggagggcggcctggtgcaggtggagagcgtgaacctgcaggtggccacctacagcaagttccagccccagagcccagacttcctggacatcaccaaccccaaggctgtgctggagaatgccctgaggaactttgcctgcctgaccactggagatgtgattgccatcaactacaatgagaagatctatgagctgcgggtgatggagaccaagccagacaaggctgtgtccatcattgaatgtgacatgaatgtggactttgatgcccccctgggctacaaggagcctgagcggcaggtgcagcacgaggagagcacagaaggagaggccgaccacagcggctacgccggggagctgggcttccgggccttcagcggcagcggcaaccggctggatggcaagaagaagggcgtggagcccagccccagccccatcaagccaggggacatcaagaggggcatccccaactatgagttcaagctgggcaagatcaccttcatccggaacagccggcccctggtgaagaaggtggaggaggatgaggccggcggccgctttgtggccttcagcggggagggccagagcctgaggaagaagggcaggaagccctag

SEQ ID NO: 158277 - DNA, 924 bp, Artificial Sequence
  derived and/or modified sequence
atgttcagcttcaacatgttcgaccaccccatcccccgggtgttccagaatcggttttccactcaatatagatgtttttctgtctctatgctggccggcccaaatgataggtctgatgttgagaaaggaggaaagattataatgccgccctctgcccttgatcaattatcacggctgaatattacataccctatgctttttaagcttacgaacaaaaactcagaccggatgactcactgtggagtcctcgagttcgttgccgacgagggaatctgttacttaccgcactggatgatgcagaaccttctgttggaagagggcgggctcgtccaggtggaaagcgtcaacttacaggtggccacctactctaagttccagccccaaagccctgacttcctggacatcactaaccccaaggctgtgttggagaatgcgttaagaaattttgcttgcctgacaaccggcgatgtcattgccatcaattacaacgaaaagatatatgaactacgggtcatggagactaaaccagacaaagcagtgtccattattgaatgtgatatgaacgtcgatttcgatgcccccctggggtacaaggagcctgaacggcaggtccaacacgaggagtcgacagaaggtgaggctgatcactctgggtacgcgggagagctggggtttcgtgcgttctctggatcgggcaatagactggacggcaagaagaagggtgttgagccctcccccagccccataaaaccgggagacatcaaacgcggaatcccaaattatgagtttaaacttggaaaaattacgttcatcaggaactcgaggccactggttaagaaggtggaggaagatgaagccggcgggcggttcgtcgcatttagcggcgaaggtcagtccctgaggaaaaaggggcgcaagccgtag

SEQ ID NO: 158278 - DNA, 891 bp, Artificial Sequence
  derived and/or modified sequence
atgttcagcttcaacatgttcgaccaccccatcccccgggtgttccagaaccgattctctacccagtacaggtgttttagcgtgagtatgctcgctggcccaaatgatcgaagcgacgttgaaaagggagggaaaagcagactgaatataacatatcctatgttgtttaagctgactaataaaaattctgacaggatgacacactgtggtgtgttagagttcgttgccgatgaggggatttgctatctcccccactggatgatgcagaatctgctcctggaagaggggggcctggttcaggtcgagagcgtcaacttgcaggtcgccacatacagtaagtttcaaccccaaagccccgacttcttggatattacaaacccaaaggctgtcctcgaaaatgctctacgaaatttcgcctgcctcaccacgggcgacgtgatcgcgattaactataatgaaaaaatttacgagttacgggttatggagacaaaaccagacaaggcagtgtcaattatcgagtgtgatatgaacgtggactttgatgcgcccctgggatacaaggagcctgagcggcaggtccagcacgaagagtcaacggagggcgaggccgaccactcaggctatgccggggagctcggatttcgggccttcagcggttccggaaaccgactggacgggaaaaagaaaggcgtcgagccgtcccctagcccaatcaagccaggagatatcaagagggggataccgaattatgagttcaagcttgggaaaattacctttatccggaacagccgccctctcgtgaagaaggtggaggaggatgaggcagggggaaggttcgtggcgttcagcggcgaaggtcagagccttagaaagaaagggcggaagccttag

SEQ ID NO: 158279 - DNA, 1032 bp, Artificial Sequence
  derived and/or modified sequence
atgttcagcttcaacatgttcgaccaccccatcccccgggtgttccagaataggttctcaactcagtatagatgtttttccgtgtccatgctggccggacctaatgaccgctccgatgtggaaaaaggagggaagattattatgccacccagtgcattagaccagctgtctcgattgaacatcacatacccaatgctattcaagcttactaacaagaattctgatcgaatgacgcattgcggtgtactggagttcgtcgctgatgagggcatttgttacctacctcattgggtggtttatagactcagtctggagcgagatggtctgaagtctctagaagtggccgaggtgagcggatccgattacttccctagccccttctgcggactggaagtctggatgatgcagaatctcctgctggaagaaggcggcctggtacaggtcgaaagcgtgaatcttcaggtcgctacgtacagtaaatttcagccccagtctccagatttcctggatatcaccaacccgaaggctgtgctagagaatgctttgagaaattttgcgtgccttacgaccggtgacgtcatagcaatcaactataacgagaagatttatgaactcagagttatggaaacaaagcctgataaagctgttagtattattgagtgcgatatgaatgtggacttcgatgcccccctgggatataaagagcctgaacgacaggtccagcacgaggaatcaactgaaggagaggcagatcactcagggtatgcaggggagttgggatttagagcattttctggatctgggaataggctcgatggcaagaagaaaggcgtcgaaccgtcccccagtcctattaaaccaggcgatatcaagcggggcattcctaactacgagtttaagttaggaaagattaccttcatccgcaactcacggccactagtgaagaaggtagaagaggacgaagccggtgggcgcttcgtggccttcagcggagaaggtcagagtctgagaaaaaaaggacggaaaccttag

SEQ ID NO: 158280 - DNA, 924 bp, Artificial Sequence
  derived and/or modified sequence
atgttcagctttaatatgttcgaccatccgatccctcgggtgttccagaacaggttcagtacacagtacaggtgcttctcagtgtcaatgctggccggacctaacgatagaagcgatgttgaaaaaggcggaaagattatcatgccgcctagtgcgttggatcagttatcaaggcttaacattacttatcccatgttgttcaagctaacaaataaaaattctgaccgcatgacccattgcggggtattggaattcgttgcagacgagggaatctgttacttgcctcattggatgatgcaaaacctgttgcttgaggagggtggcctggtccaagttgaaagtgtaaatctgcaggtcgctacatactctaaatttcagcctcaatccccagattttctggacattaccaaccccaaagcagtcctggagaatgcccttcggaattttgcttgcctgacaaccggcgacgttatcgctatcaactataatgagaagatttatgaacttcgggtcatggagacaaagcccgataaagcagtgtcaatcatagaatgcgacatgaacgtagacttcgacgcgcctctgggttacaaggagccagaacgtcaggtgcagcacgaggagtccacagagggcgaagccgaccattcaggctatgctggggaactcggctttcgcgcattcagcggtagcggaaacagactggacggcaagaaaaaaggcgtcgagccgagccctagtccaattaaacccggagatattaaaaggggcatacctaattacgaatttaagctaggaaagatcacattcatacgcaactcccgtccgctagttaagaaggtcgaggaggatgaggctggtgggagattcgtcgctttttctggggagggccaatctctcaggaaaaaaggacggaagccgtag

SEQ ID NO: 158281 - DNA, 891 bp, Artificial Sequence
  derived and/or modified sequence
atgtttagcttcaacatgttcgaccatcctattccaagggtttttcagaacagattttccacccagtatcgatgcttttcagtgagcatgctggccggaccaaacgacagatctgacgtggaaaaaggcggaaagtcccgccttaatatcacatacccaatgctgttcaagctgaccaataagaattcggatcgcatgactcactgcggagtcctggaattcgtggccgacgaaggaatctgttacctgccgcattggatgatgcaaaatctactcctggaagagggagggctcgtccaggtagagagcgtgaacctgcaggtagccacttattccaagttccaaccgcagtctcccgactttctggatattactaatccaaaggctgtgttggagaatgcgctccgaaatttcgcctgtcttaccacaggtgacgttatcgccattaattacaatgagaaaatctacgaactgcgcgtgatggagacaaaacccgacaaggcagtgagtattatcgaatgtgatatgaacgtcgattttgatgcacctctcggatacaaggagccagaacggcaggtgcagcatgaagaatctactgagggtgaggccgaccacagcgggtacgccggagaacttgggtttcgagccttctccggtagtgggaatcgactcgatggtaaaaaaaagggcgtcgagccgtcccctagtcccataaagcctggggatatcaagcgcggaatccctaactacgagttcaagcttggaaaaattaccttcataagaaatagccggccactcgttaagaaggtggaggaagatgaagcaggcggacgcttcgtcgcattctctggcgagggccaatcacttcgaaagaaagggaggaaaccctag

SEQ ID NO: 158282 - DNA, 1032 bp, Artificial Sequence
  derived and/or modified sequence
atgttttcgttcaatatgttcgatcatcctattcctagggtattccaaaaccgattttctacacaatatcgatgcttcagtgttagcatgctcgctggtcccaatgatcgctcagacgtggagaagggcggtaagattattatgccaccatccgctctggaccagttgagcagacttaacatcacctatcccatgctctttaaattaactaataaaaatagcgaccgtatgacccattgcggggttctggagttcgtcgctgacgagggtatttgttatcttccacattgggtcgtgtaccgcctgtctctcgagagggatggccttaaatctctcgaagtggcagaggtgtcaggtagtgactactttccaagtccattctgcggcttagaagtatggatgatgcaaaacctgttgcttgaggagggcggtctggtgcaggtggagtctgtgaacctccaggtggcaacttattctaaattccagccccagagtcccgacttcctggatatcacgaatccaaaggcagtgctcgagaacgccttgcgtaattttgcgtgtctgactactggggatgtaatcgccatcaattacaatgagaagatttacgaacttcgggttatggagactaaaccggacaaagcagtctcaatcatcgaatgtgatatgaacgtcgacttcgatgcaccacttggatataaggaacctgaacggcaagttcagcacgaagagtcgaccgaaggcgaggccgaccatagcggctacgcaggagagcttgggttcagagcatttagcggctccgggaacagactggatgggaagaagaagggcgtcgagccgtccccctcaccgataaagcctggagatatcaagaggggcatacctaactacgaattcaaactcgggaaaatcaccttcatcaggaactcacggccactggtcaagaaggtggaagaggatgaagccggagggagattcgtagcattcagtggcgagggacagtcactgcggaagaagggacggaagccatag

SEQ ID NO: 158283 - DNA, 1783 bp, Artificial Sequence
  derived and/or modified sequence
acttccggtgagcctctggggcgtaccggcttggcgcggcggcagcggcagcggcggctgggagagcggtcggcggggtttcttcgttgcattgcctgagaggagcggagtctgccaggtggtgtccatcatgttctctttcaacatgttcgaccaccctattcccagggtcttccaaaaccgcttctccacacagtaccgctgcttctctgtgtccatgctagcagggcctaatgacaggtcagatgtggagaaaggagggaagataattatgccaccctcggccctggaccaactcagccgacttaacattacctatcccatgctgttcaaactgaccaataagaattcggaccgcatgacgcattgtggcgtgctggagtttgtggctgatgagggcatctgctacctcccacactggatgatgcagaacttactcttggaagaaggcggcctggtccaggtggagagcgtcaaccttcaagtggccacctactccaaattccaacctcagagccctgacttcctggacatcaccaaccccaaagccgtattagaaaacgcacttaggaactttgcctgtctgaccaccggggatgtgattgccatcaactataatgaaaagatctacgaactgcgtgtgatggagaccaaacccgacaaggcagtgtccatcattgagtgtgacatgaacgtggactttgatgctcccctgggctacaaagaacccgaaagacaagtccagcatgaggagtcgacagaaggtgaagccgaccacagtggctatgctggagagctgggcttccgcgctttctctggatctggcaatagactggatggaaagaagaaaggggtagagcccagcccctccccaatcaagcctggagatattaaaagaggaattcccaattatgaatttaaacttggtaagataactttcatcagaaattcacgtccccttgtcaaaaaggttgaagaggatgaagctggaggcagattcgtcgctttctctggagaaggacagtcattgcgtaaaaagggaagaaagccctaagtgaggactgttggctgattggaaaataataaaagaatcatttgcaacatcttggcttttagttactggcactgacagggacgagcctcatcagagaatactctgttacttaagatttatttagagttacctaagaattattaagtttgacttggaagtggagcagcaggactttgtagttgtatgcttgatttggggaaagacaaagagctgtccctgagggcctgtagatagctgcctcctcacctcttcacgctttcagcttgaggggagctcccactgcctcagcaggagcaattctgcatccctaattctgtcaaaacctatgaaggtgactaaattgtctaacatgaagtgttctttctttttcttcatttatcctttcttttcctacatcaattgcataggtgtcagtctttggcctaaaaaaaggctttaaatagacatgtgttctataagtagtggctgtcccactactgtggctgcaatttaagtatttgacaaagaatgtttctatttttattttacatatttttttcaaaaacaccactcagaagaacctgatctgaatgagtttgcacttttattctcatttcatatggacataactggctccttagtgaacctgttcatagtgaaacaactccatggagaagcaaacatgtgaatgttagaatgaacaaatgctaaagagatgttcctctccttcttccctactccccaactccc

SEQ ID NO: 158284 - DNA, 1750 bp, Artificial Sequence
  derived and/or modified sequence
acttccggtgagcctctggggcgtaccggcttggcgcggcggcagcggcagcggcggctgggagagcggtcggcggggtttcttcgttgcattgcctgagaggagcggagtctgccaggtggtgtccatcatgttctctttcaacatgttcgaccaccctattcccagggtcttccaaaaccgcttctccacacagtaccgctgcttctctgtgtccatgctagcagggcctaatgacaggtcagatgtggagaaaggagggaagagccgacttaacattacctatcccatgctgttcaaactgaccaataagaattcggaccgcatgacgcattgtggcgtgctggagtttgtggctgatgagggcatctgctacctcccacactggatgatgcagaacttactcttggaagaaggcggcctggtccaggtggagagcgtcaaccttcaagtggccacctactccaaattccaacctcagagccctgacttcctggacatcaccaaccccaaagccgtattagaaaacgcacttaggaactttgcctgtctgaccaccggggatgtgattgccatcaactataatgaaaagatctacgaactgcgtgtgatggagaccaaacccgacaaggcagtgtccatcattgagtgtgacatgaacgtggactttgatgctcccctgggctacaaagaacccgaaagacaagtccagcatgaggagtcgacagaaggtgaagccgaccacagtggctatgctggagagctgggcttccgcgctttctctggatctggcaatagactggatggaaagaagaaaggggtagagcccagcccctccccaatcaagcctggagatattaaaagaggaattcccaattatgaatttaaacttggtaagataactttcatcagaaattcacgtccccttgtcaaaaaggttgaagaggatgaagctggaggcagattcgtcgctttctctggagaaggacagtcattgcgtaaaaagggaagaaagccctaagtgaggactgttggctgattggaaaataataaaagaatcatttgcaacatcttggcttttagttactggcactgacagggacgagcctcatcagagaatactctgttacttaagatttatttagagttacctaagaattattaagtttgacttggaagtggagcagcaggactttgtagttgtatgcttgatttggggaaagacaaagagctgtccctgagggcctgtagatagctgcctcctcacctcttcacgctttcagcttgaggggagctcccactgcctcagcaggagcaattctgcatccctaattctgtcaaaacctatgaaggtgactaaattgtctaacatgaagtgttctttctttttcttcatttatcctttcttttcctacatcaattgcataggtgtcagtctttggcctaaaaaaaggctttaaatagacatgtgttctataagtagtggctgtcccactactgtggctgcaatttaagtatttgacaaagaatgtttctatttttattttacatatttttttcaaaaacaccactcagaagaacctgatctgaatgagtttgcacttttattctcatttcatatggacataactggctccttagtgaacctgttcatagtgaaacaactccatggagaagcaaacatgtgaatgttagaatgaacaaatgctaaagagatgttcctctccttcttccctactccccaactccc

SEQ ID NO: 158285 - DNA, 1164 bp, Artificial Sequence
  derived and/or modified sequence
agcggcagcggcggctgggagagcggtcggcggggtttcttcgttgcattgcctgagaggagcggagtctgccaggtggtgtccatcatgttctctttcaacatgttcgaccaccctattcccagggtcttccaaaaccgcttctccacacagtaccgctgcttctctgtgtccatgctagcagggcctaatgacaggtcagatgtggagaaaggagggaagataattatgccaccctcggccctggaccaactcagccgacttaacattacctatcccatgctgttcaaactgaccaataagaattcggaccgcatgacgcattgtggcgtgctggagtttgtggctgatgagggcatctgctacctcccacactgggtggtctacaggctctctttggaaagggatggccttaaatcacttgaggtagctgaagtgtcaggcagtgactacttccccagtcccttctgtggacttgaagtttggatgatgcagaacttactcttggaagaaggcggcctggtccaggtggagagcgtcaaccttcaagtggccacctactccaaattccaacctcagagccctgacttcctggacatcaccaaccccaaagccgtattagaaaacgcacttaggaactttgcctgtctgaccaccggggatgtgattgccatcaactataatgaaaagatctacgaactgcgtgtgatggagaccaaacccgacaaggcagtgtccatcattgagtgtgacatgaacgtggactttgatgctcccctgggctacaaagaacccgaaagacaagtccagcatgaggagtcgacagaaggtgaagccgaccacagtggctatgctggagagctgggcttccgcgctttctctggatctggcaatagactggatggaaagaagaaaggggtagagcccagcccctccccaatcaagcctggagatattaaaagaggaattcccaattatgaatttaaacttggtaagataactttcatcagaaattcacgtccccttgtcaaaaaggttgaagaggatgaagctggaggcagattcgtcgctttctctggagaaggacagtcattgcgtaaaaagggaagaaagccctaagtgaggactgttggctgattggaaaataataaaagaatcatttgc

SEQ ID NO: 158286 - protein, 396 aa, Artificial Sequence
  derived and/or modified sequence
MAAVGAGGSTAAPGPGAVSAGALEPGTASAAHRRLKYISLAVLVVQNASLILSIRYARTLPGDRFFATTAVVMAEVLKGLTCLLLLFAQKRGNVKHLVLFLHEAVLVQYVDTLKLAVPSLIYTLQNNLQYVAISNLPAATFQVTYQLKILTTALFSVLMLNRSLSRLQWASLLLLFTGVAIVQAQQAGGGGPRPLDQNPGAGLAAVVASCLSSGFAGVYFEKILKGSSGSVWLRNLQLGLFGTALGLVGLWWAEGTAVATRGFFFGYTPAVWGVVLNQAFGGLLVAVVVKYADNILKGFATSLSIVLSTVASIRLFGFHVDPLFALGAGLVIGAVYLYSLPRGAAKAIASASASASGPCVHQQPPGQPPPPQLSSHRGDLITEPFLPKLLTKVKGS

SEQ ID NO: 158287 - protein, 163 aa, Artificial Sequence
  derived and/or modified sequence
MAAVGAGGSTAAPGPGAVSAGALEPGTASAAHRRLKYISLAVLVVQNASLILSIRYARTLPGDRFFATTAVVMAEVLKGLTCLLLLFAQKRGNVKHLVLFLHEAVLVQYVDTLKLAVPSLIYTLQNNLQYVAISNLPAATFQVSPKPSMAPEELTGLGTGVWE

SEQ ID NO: 158288 - DNA, 1191 bp, Artificial Sequence
  derived and/or modified sequence
atggctgcggtgggggccgggggatcaacagcggccccaggtcccggggcggtttctgcgggcgcacttgaacccgggaccgcatccgctgcccaccggcggttgaaatatatctcactggctgtcctggtagttcagaatgcctctctcatcctgtcaatccgttatgcccgtactttacctggggaccggttctttgcaactacggcagtggtgatggcagaggtactgaaggggctgacttgtctcctgctgctgtttgctcagaagagaggtaacgtcaagcatctggtgctattcttgcatgaggccgtgctggtgcagtacgtcgacacactgaagctcgccgtgcctagtctgatttacacccttcagaacaacctgcagtacgtggctatctcaaaccttcccgctgccacgtttcaggtcacttaccaactcaagatactgacaacggcattattctccgtgcttatgctgaacagatccttgagtcgtttacagtgggcctccctccttttgcttttcacgggcgtggctatagtgcaggctcaacaggccggtggggggggtcctagacccctcgaccagaatccgggggcaggacttgctgccgttgtggccagttgtctctcatcaggattcgccggagtttacttcgaaaagatcctaaaaggctcctcggggagtgtatggttgcgaaatttgcagttgggactcttcgggaccgcactcggcctggtcgggctatggtgggcagagggtaccgcagtggccacacgaggattttttttcgggtatacacccgctgtgtggggagttgttctgaatcaagcctttggcggcctgttggtagccgtcgtagtaaagtatgccgataatattctaaagggcttcgctactagcctgagcattgttttaagcaccgtggcttccatccggctgtttgggttccatgtagacccgctctttgccctcggggccggcttagtaattggggctgtttatctatactccttgcctagaggagcagcaaaggctattgctagcgcgagcgcaagcgctagtggaccttgtgtacaccagcagcctccggggcagcccccccccccccaactcagcagtcatcgcggcgacttgatcaccgaaccatttctgccaaagcttctcaccaaagtcaagggctcgtag

SEQ ID NO: 158289 - DNA, 1191 bp, Artificial Sequence
  derived and/or modified sequence
atggctgctgtgggcgctgggggcagcacagctgcccctggccctggagctgtgtctgctggggccctggagcctggaacagccagcgctgcccaccggcggctgaagtacatcagcctggccgtgctggtggtgcagaatgccagcctcatcctgagcatccgctatgcccggaccctgcccggggaccgcttctttgccaccacagctgtggtgatggccgaggtgctgaagggcctgacctgcctgctgctgctgtttgcccagaagagaggaaatgtgaagcacctggtgctcttcctgcacgaggccgtgctggtgcagtatgtggacaccctgaagctggccgtgcccagcctcatctacaccctgcagaacaacctgcagtatgtggccatcagcaacctgcctgctgccaccttccaggtgacctaccagctgaagatcctgaccacagccctcttctctgtgctgatgctgaacagaagcctgagccggctgcagtgggccagcctgctgctgctcttcaccggggtggccatcgtgcaggcccagcaggccggcggcggcggcccccggcccctggaccagaaccctggagctggcctggccgctgtggtggccagctgcctgagcagcggctttgctggggtgtactttgagaagatcctgaagggcagcagcggctctgtgtggctgaggaacctgcagctgggcctgtttggaacagccctgggcctggtgggcctgtggtgggccgagggcacagctgtggccacccggggcttcttcttcggctacaccccagctgtgtggggcgtggtgctgaaccaggccttcggcggcctgctggtggccgtggtggtgaagtatgctgacaacatcctgaagggctttgccaccagcctgagcatcgtgctgagcacagtggccagcatccggctgtttggcttccacgtggaccccctgtttgccctgggcgccggcctggtgattggagctgtgtacctgtacagcctgcccaggggggccgccaaggccatcgccagcgccagcgccagcgccagcggcccctgtgtgcaccagcagcccccaggccagcccccaccaccccagctgagcagccacagaggagacctgatcacagagcccttcctgcccaagctgctgaccaaggtgaagggcagctag

SEQ ID NO: 158290 - DNA, 1191 bp, Artificial Sequence
  derived and/or modified sequence
atggccgccgtgggcgccggcggcagcaccgccgcccccggccccggagccgtctctgccggtgcgttggagcccggcactgcttcagcagctcataggagacttaagtacatctcgctagcggtgttggtcgtgcagaacgcctctctgattctgagcatccgatacgcgcgcaccctccctggcgaccgcttctttgctactacggcagtggtaatggcagaagtcctgaagggcctgacttgcctgctcctactattcgcccaaaaacgaggcaatgtgaagcatttggtgctgtttctgcacgaagcagttctcgtccagtatgtggacaccctcaagctggcagtgccgagcttgatttacacacttcaaaataacctgcagtacgtcgcaatctctaacctgcccgcagcaacttttcaagtgacctatcagctcaaaatccttacgactgcattgttctctgtgctgatgttaaatagatccctgtctcgactgcagtgggcttccctcctgctgctgtttactggggtggccattgtgcaggcccagcaggctggcgggggggggccgaggccattagaccagaatcctggcgccggacttgctgctgtagtggcctcatgtctgtcaagcggctttgctggggtgtatttcgagaagattctgaagggatcatccggatcagtctggctgaggaatctccaactggggcttttcggcaccgccctcggacttgtggggctgtggtgggccgaggggaccgccgtggccacaagaggtttctttttcggctatacgccggcggtctggggagttgttctaaatcaggcttttggtgggctgttggtcgcggtggtggtcaagtacgccgacaatatcctcaaaggctttgccacctcactctcaatcgtgctcagtacagtagctagtattagactcttcggatttcatgtggatcctctgttcgccctgggggcaggcctcgtgatcggcgctgtctatctctactcccttccacgaggtgccgccaaggccatcgcctctgcgtcagcttccgctagcggcccttgtgtgcaccagcagcctcccggacagcccccacctccacagctgagctctcatcggggagacttaataacggaacctttccttccaaagttgctgacaaaggtgaagggctcttag

SEQ ID NO: 158291 - DNA, 1191 bp, Artificial Sequence
  derived and/or modified sequence
atggccgcagtgggcgctggcggttccaccgctgctcctgggcctggtgccgtgtccgctggtgccttagaacccggaactgcctctgccgcacaccgcagactgaaatatatctctctggccgtgctagtggtccaaaatgcctcacttatcctgtctattagatacgcacggaccctcccaggcgaccggtttttcgccacaaccgcagttgttatggctgaagtgctgaaagggttgacctgcctactgctcctgtttgcgcagaaacgaggtaacgtgaagcacctggtcctcttcctgcacgaggcggtgctggtgcaatatgtggacacattgaaattagcagtgcccagtttaatttatacgctacaaaataacctccagtacgtggccatatctaatctccctgcagctactttccaggtgacgtaccagctcaaaatcctgacaactgccctgttcagtgtgctgatgctaaatcgttccctttcccgcctccaatgggcatcccttcttctgctgttcacaggcgtcgctatcgtgcaggcccagcaggcaggcggaggcggacccaggcccctggatcagaatcctggtgctggtcttgccgctgtggttgcttcctgcttgagctccggcttcgccggtgtatattttgagaagatcttgaagggttcatccggtagcgtgtggctgcggaatctccagctggggttgttcggcacggccttaggacttgttgggttgtggtgggcagagggaaccgctgtcgctacaagggggttcttcttcggatacacaccggcagtgtggggagtggtcctcaatcaagcatttgggggactattggtcgccgtggtggtgaaatatgctgataacatcttgaagggctttgccactagccttagcatcgtgctgtccaccgtcgcgagtataagattgtttggatttcacgttgacccccttttcgccttgggtgcaggcctggtgattggcgcagtgtacttgtattctcttcctcgcggtgccgctaaggcaatcgccagtgcttccgcatctgcatctggcccttgcgtgcaccagcagcccccaggccagccaccccctccacagctttccagccaccgaggtgatcttatcacagagcccttcctgccaaagctgctgacaaaggtgaagggttcctag

SEQ ID NO: 158292 - DNA, 1451 bp, Artificial Sequence
  derived and/or modified sequence
caacatggcagcggttggggctggtggttccaccgcggcgcccgggccaggggcggtttccgcgggtgcattggagccggggaccgccagtgcggctcacaggcgcctgaagtacatatccctagctgtgctggtggtccagaatgcctccctcatcctcagcatccgctacgcccgcacgttgccaggggaccgcttctttgccaccactgctgtggtcatggcggaagtgctcaaaggtctcacctgcctgctgctgctcttcgcacagaagaggggtaacgtgaagcacctggttctcttcctccatgaggctgtcctggtgcagtatgtggacacgctcaagctcgcagtgccctctctcatctacaccttgcagaataacctccagtatgttgccatctctaacctaccagctgccactttccaggtgacataccagctgaagatcctgaccacagcgctgttctccgtgctcatgctgaatcgcagcctttcccggctgcagtgggcctccctgctgctcctcttcactggcgtcgccattgtccaggcacagcaagccggtgggggaggcccacggccactggatcagaaccctggggcaggcctggcagccgtcgtggcctcctgtctctcctccggcttcgcaggtgtctactttgagaagatcctcaaaggcagctcaggctccgtgtggctgcgcaacctgcaactgggcctcttcggcacagcactgggcctggtggggctctggtgggctgagggtaccgccgtggccacccgtggtttcttttttgggtacacacctgctgtctggggcgtggtgctcaaccaggccttcggcgggctactggtggctgtggttgtcaagtacgctgacaatatcctcaagggctttgccacctccctgtccattgtgctgtccactgttgcctccattcgcctctttggcttccacgtggacccattatttgcccttggcgctggactcgtcattggtgctgtctacctctacagccttccccgaggtgcagccaaagccatagcctctgcctctgcctccgcctccgggccctgcgttcaccagcagcctcccgggcagccaccaccaccgcagctgtcttcccaccgtggagacctcatcacggagccctttctgccaaagttgctcaccaaggtgaagggttcctagccgctgggattgaagacattggcctggcctcgttctctcttcttgcccttggcccagctgggaccaaactctgatcagtattaggggtagagtgaggtagacactggactccctgtccccaccacccctgccccacccagggccaacatgactaagctctctcatgacccacctcagctcagccccccagcccctgccagctccacactatctcttagctgagtttttgcaaataaaatgtgttgtgtatcttgcc

SEQ ID NO: 158293 - DNA, 1191 bp, Artificial Sequence
  derived and/or modified sequence
atggccgccgtgggcgccggcggcagcaccgccgcccccggccccggcgccgtgagcgccggcgccctggagcccggcaccgccagcgccgcccacagaagactgaagtacatcagcctggccgtgctggtggtgcagaacgccagcctgatcctgagcatcagatacgccagaaccctgcccggcgacagattcttcgccaccaccgccgtggtgatggccgaggtgctgaagggcctgacctgcctgctgctgctgttcgcccagaagagaggcaacgtgaagcacctggtgctgttcctgcacgaggccgtgctggtgcagtacgtggacaccctgaagctggccgtgcccagcctgatctacaccctgcagaacaacctgcagtacgtggccatcagcaacctgcccgccgccaccttccaggtgacctaccagctgaagatcctgaccaccgccctgttcagcgtgctgatgctgaacagaagcctgagcagactgcagtgggccagcctgctgctgctgttcaccggcgtggccatcgtgcaggcccagcaggccggcggcggcggccccagacccctggaccagaaccccggcgccggcctggccgccgtggtggccagctgcctgagcagcggcttcgccggcgtgtacttcgagaagatcctgaagggcagcagcggcagcgtgtggctgagaaacctgcagctgggcctgttcggcaccgccctgggcctggtgggcctgtggtgggccgagggcaccgccgtggccaccagaggcttcttcttcggctacacccccgccgtgtggggcgtggtgctgaaccaggccttcggcggcctgctggtggccgtggtggtgaagtacgccgacaacatcctgaagggcttcgccaccagcctgagcatcgtgctgagcaccgtggccagcatcagactgttcggcttccacgtggaccccctgttcgccctgggcgccggcctggtgatcggcgccgtgtacctgtacagcctgcccagaggcgccgccaaggccatcgccagcgccagcgccagcgccagcggcccctgcgtgcaccagcagccccccggccagcccccccccccccagctgagcagccacagaggcgacctgatcaccgagcccttcctgcccaagctgctgaccaaggtgaagggcagctag

SEQ ID NO: 158294 - protein, 539 aa, Artificial Sequence
  derived and/or modified sequence
MPGQRRALSPKMASMRESDTGLWLHNKLGATDELWAPPSIASLLTAAVIDNIRLCFHGLSSAVKLKLLLGTLHLPRRTVDEMKGALMEIIQLASLDSDPWVLMVADILKSFPDTGSLNLELEEQNPNVQDILGELREKVGECEASAMLPLECQYLNKNALTTLAGPLTPPVKHFQLKRKPKSATLRAELLQKSTETAQQLKRSAGVPFHAKGRGLLRKMDTTTPLKGIPKQAPFRSPTAPSVFSPTGNRTPIPPSRTLLRKERGVKLLDISELDMVGAGREAKRRRKTLDAEVVEKPAKEETVVENATPDYAAGLVSTQKLGSLNNEPALPSTSYLPSTPSVVPASSYIPSSETPPAPSSREASRPPEEPSAPSPTLPAQFKQRAPMYNSGLSPATPTPAAPTSPLTPTTPPAVAPTTQTPPVAMVAPQTQAPAQQQPKKNLSLTREQMFAAQEMFKTANKVTRPEKALILGFMAGSRENPCQEQGDVIQIKLSEHTEDLPKADGQGSTTMLVDTVFEMNYATGQWTRFKKYKPMTNVS

SEQ ID NO: 158295 - protein, 528 aa, Artificial Sequence
  derived and/or modified sequence
MASMRESDTGLWLHNKLGATDELWAPPSIASLLTAAVIDNIRLCFHGLSSAVKLKLLLGTLHLPRRTVDEMKGALMEIIQLASLDSDPWVLMVADILKSFPDTGSLNLELEEQNPNVQDILGELREKVGECEASAMLPLECQYLNKNALTTLAGPLTPPVKHFQLKRKPKSATLRAELLQKSTETAQQLKRSAGVPFHAKGRGLLRKMDTTTPLKGIPKQAPFRSPTAPSVFSPTGNRTPIPPSRTLLRKERGVKLLDISELDMVGAGREAKRRRKTLDAEVVEKPAKEETVVENATPDYAAGLVSTQKLGSLNNEPALPSTSYLPSTPSVVPASSYIPSSETPPAPSSREASRPPEEPSAPSPTLPAQFKQRAPMYNSGLSPATPTPAAPTSPLTPTTPPAVAPTTQTPPVAMVAPQTQAPAQQQPKKNLSLTREQMFAAQEMFKTANKVTRPEKALILGFMAGSRENPCQEQGDVIQIKLSEHTEDLPKADGQGSTTMLVDTVFEMNYATGQWTRFKKYKPMTNVS

SEQ ID NO: 158296 - DNA, 1620 bp, Artificial Sequence
  derived and/or modified sequence
atgcccggccagagaagagccctgagccccaagatggccagcatgagagagagcgacaccggcctgtggctgcacaacaagctgggcgccaccgacgagctgtgggccccccccagcatcgccagcctgctgaccgccgccgtgatcgacaacatcagactgtgcttccacggcctgagcagcgccgtgaagctgaagctgctgctgggcaccctgcacctgcccagaagaaccgtggacgagatgaagggcgccctgatggagatcatccagctggccagcctggacagcgacccctgggtgctgatggtggccgacatcctgaagagcttccccgacaccggcagcctgaacctggagctggaggagcagaaccccaacgtgcaggacatcctgggcgagctgagagagaaggtgggcgagtgcgaggccagcgccatgctgcccctggagtgccagtacctgaacaagaacgccctgaccaccctggccggccccctgaccccccccgtgaagcacttccagctgaagagaaagcccaagagcgccaccctgagagccgagctgctgcagaagagcaccgagaccgcccagcagctgaagagaagcgccggcgtgcccttccacgccaagggcagaggcctgctgagaaagatggacaccaccacccccctgaagggcatccccaagcaggcccccttcagaagccccaccgcccccagcgtgttcagccccaccggcaacagaacccccatcccccccagcagaaccctgctgagaaaggagagaggcgtgaagctgctggacatcagcgagctggacatggtgggcgccggcagagaggccaagagaagaagaaagaccctggacgccgaggtggtggagaagcccgccaaggaggagaccgtggtggagaacgccacccccgactacgccgccggcctggtgagcacccagaagctgggcagcctgaacaacgagcccgccctgcccagcaccagctacctgcccagcacccccagcgtggtgcccgccagcagctacatccccagcagcgagaccccccccgcccccagcagcagagaggccagcagaccccccgaggagcccagcgcccccagccccaccctgcccgcccagttcaagcagagagcccccatgtacaacagcggcctgagccccgccacccccacccccgccgcccccaccagccccctgacccccaccaccccccccgccgtggcccccaccacccagaccccccccgtggccatggtggccccccagacccaggcccccgcccagcagcagcccaagaagaacctgagcctgaccagagagcagatgttcgccgcccaggagatgttcaagaccgccaacaaggtgaccagacccgagaaggccctgatcctgggcttcatggccggcagcagagagaacccctgccaggagcagggcgacgtgatccagatcaagctgagcgagcacaccgaggacctgcccaaggccgacggccagggcagcaccaccatgctggtggacaccgtgttcgagatgaactacgccaccggccagtggaccagattcaagaagtacaagcccatgaccaacgtgagctag

SEQ ID NO: 158297 - DNA, 1587 bp, Artificial Sequence
  derived and/or modified sequence
atggccagcatgagagagagcgacaccggcctgtggctgcacaacaagctgggcgccaccgacgagctgtgggccccccccagcatcgccagcctgctgaccgccgccgtgatcgacaacatcagactgtgcttccacggcctgagcagcgccgtgaagctgaagctgctgctgggcaccctgcacctgcccagaagaaccgtggacgagatgaagggcgccctgatggagatcatccagctggccagcctggacagcgacccctgggtgctgatggtggccgacatcctgaagagcttccccgacaccggcagcctgaacctggagctggaggagcagaaccccaacgtgcaggacatcctgggcgagctgagagagaaggtgggcgagtgcgaggccagcgccatgctgcccctggagtgccagtacctgaacaagaacgccctgaccaccctggccggccccctgaccccccccgtgaagcacttccagctgaagagaaagcccaagagcgccaccctgagagccgagctgctgcagaagagcaccgagaccgcccagcagctgaagagaagcgccggcgtgcccttccacgccaagggcagaggcctgctgagaaagatggacaccaccacccccctgaagggcatccccaagcaggcccccttcagaagccccaccgcccccagcgtgttcagccccaccggcaacagaacccccatcccccccagcagaaccctgctgagaaaggagagaggcgtgaagctgctggacatcagcgagctggacatggtgggcgccggcagagaggccaagagaagaagaaagaccctggacgccgaggtggtggagaagcccgccaaggaggagaccgtggtggagaacgccacccccgactacgccgccggcctggtgagcacccagaagctgggcagcctgaacaacgagcccgccctgcccagcaccagctacctgcccagcacccccagcgtggtgcccgccagcagctacatccccagcagcgagaccccccccgcccccagcagcagagaggccagcagaccccccgaggagcccagcgcccccagccccaccctgcccgcccagttcaagcagagagcccccatgtacaacagcggcctgagccccgccacccccacccccgccgcccccaccagccccctgacccccaccaccccccccgccgtggcccccaccacccagaccccccccgtggccatggtggccccccagacccaggcccccgcccagcagcagcccaagaagaacctgagcctgaccagagagcagatgttcgccgcccaggagatgttcaagaccgccaacaaggtgaccagacccgagaaggccctgatcctgggcttcatggccggcagcagagagaacccctgccaggagcagggcgacgtgatccagatcaagctgagcgagcacaccgaggacctgcccaaggccgacggccagggcagcaccaccatgctggtggacaccgtgttcgagatgaactacgccaccggccagtggaccagattcaagaagtacaagcccatgaccaacgtgagctag

SEQ ID NO: 158298 - DNA, 1182 bp, Artificial Sequence
  derived and/or modified sequence
atgctgcccctggagtgccagtacctgaacaagaacgccctgaccaccctggccggccccctgaccccccccgtgaagcacttccagctgaagagaaagcccaagagcgccaccctgagagccgagctgctgcagaagagcaccgagaccgcccagcagctgaagagaagcgccggcgtgcccttccacgccaagggcagaggcctgctgagaaagatggacaccaccacccccctgaagggcatccccaagcaggcccccttcagaagccccaccgcccccagcgtgttcagccccaccggcaacagaacccccatcccccccagcagaaccctgctgagaaaggagagaggcgtgaagctgctggacatcagcgagctggacatggtgggcgccggcagagaggccaagagaagaagaaagaccctggacgccgaggtggtggagaagcccgccaaggaggagaccgtggtggagaacgccacccccgactacgccgccggcctggtgagcacccagaagctgggcagcctgaacaacgagcccgccctgcccagcaccagctacctgcccagcacccccagcgtggtgcccgccagcagctacatccccagcagcgagaccccccccgcccccagcagcagagaggccagcagaccccccgaggagcccagcgcccccagccccaccctgcccgcccagttcaagcagagagcccccatgtacaacagcggcctgagccccgccacccccacccccgccgcccccaccagccccctgacccccaccaccccccccgccgtggcccccaccacccagaccccccccgtggccatggtggccccccagacccaggcccccgcccagcagcagcccaagaagaacctgagcctgaccagagagcagatgttcgccgcccaggagatgttcaagaccgccaacaaggtgaccagacccgagaaggccctgatcctgggcttcatggccggcagcagagagaacccctgccaggagcagggcgacgtgatccagatcaagctgagcgagcacaccgaggacctgcccaaggccgacggccagggcagcaccaccatgctggtggacaccgtgttcgagatgaactacgccaccggccagtggaccagattcaagaagtacaagcccatgaccaacgtgagctag

SEQ ID NO: 158299 - DNA, 1620 bp, Artificial Sequence
  derived and/or modified sequence
atgcctggccagcgccgcgccctgagccccaaaatggccagcatgagggaaagcgatacaggactgtggttacacaataaactaggagcaaccgatgagctttgggcgcctccttctattgcttctctccttacggcagcggtgattgataacataaggctgtgcttccatgggctttcctcggcggtgaagctcaagctgctgctggggacacttcatctgccgagaagaactgtcgacgagatgaagggtgcattgatggagatcatacaactggcatcattagattccgatccttgggtgctgatggtggccgacatcctgaagagctttcctgacaccggctcccttaacctggagctggaagaacagaacccaaacgtgcaggatatcctaggggagctgagagagaaagtgggcgagtgcgaggcctcagccatgttgccactggaatgccagtacctcaataagaatgccctcactaccctggccggtccactaaccccccctgtgaaacatttccagcttaagaggaaacctaagagcgcaactctacgggccgagctcctgcagaagtcaactgaaaccgcccagcaattgaaacggtcagcaggtgtgccattccacgctaagggccgcggactccttcgaaagatggacactaccaccccacttaagggaatccctaaacaggctcctttccgtagccctactgcgccatcagtctttagtccaaccggcaatcgcaccccgataccaccttcgaggaccctgctgcgtaaggagaggggggtaaagctgctggatatttcagaattggacatggtaggggcggggcgcgaggcaaagaggcgccgaaagaccttagatgcagaagtggttgagaagcccgctaaagaagaaaccgtagtggaaaatgcaacacccgactacgccgcagggctcgtcagcacccagaaattgggtagtctgaacaatgaaccagcccttccctcaacgagctatctacctagtactccgtcagtggtgcccgcttcttcctacattccttctagcgagacacccccagctccatcctcccgcgaagcgagtagacctccagaagaacccagcgcgccctcgccaacactacctgctcagtttaagcagcgggcaccgatgtacaattcgggactgtctcccgccacgccgacccctgctgcccctaccagtcccctgacccctaccaccccccctgctgtggcccccacgacccaaaccccacccgtggccatggtcgctccacagacccaagccccggctcagcagcagcccaaaaagaacttgtccctaactcgcgaacagatgttcgcagcccaggaaatgttcaaaacggccaacaaagtcaccaggccggagaaggcgctgattctgggcttcatggctgggtctagagagaacccatgtcaggagcaaggggacgtcattcagatcaagttgtcagagcacaccgaagatttgccaaaagcggacggacagggttctaccacaatgctggtggacacagtgtttgagatgaactacgcgactggacagtggactcgtttcaaaaaatataaacccatgacaaatgtcagctag

SEQ ID NO: 158300 - DNA, 1587 bp, Artificial Sequence
  derived and/or modified sequence
atggcctctatgcgggagtcagacactgggttgtggttgcacaataagcttggtgcaactgacgagctgtgggcaccgccctctattgctagcctgctgacagctgcggtaatcgataacattaggctgtgttttcacggcttgagttccgccgtgaaactgaagctgcttctcggtactttgcaccttcctcgaaggaccgtagatgagatgaagggagccctaatggaaattattcagctcgctagcctggatagcgacccctgggtccttatggtggccgatattctcaaaagcttccccgacacaggttccctcaatctggagcttgaagaacagaatccaaatgtgcaagatattctgggagagctgcgcgaaaaggtgggcgaatgtgaagcctcagctatgctgccacttgagtgccagtacctaaataagaacgccttaaccactttagccggcccccttaccccaccggttaagcatttccagttgaagcggaagcctaagtcagctacactgcgtgccgaattgctccagaagtcaaccgaaactgcacagcagttgaagcgctctgccggagtgccttttcatgccaaaggccggggattgctgcggaagatggacaccaccaccccccttaaagggatcccaaaacaagctccattccggtcccccaccgcgccaagcgtgttttcacctactggtaaccgcaccccaattcctccatctagaacattgcttaggaaggaacgtggcgtgaaactgctggatatttcagagcttgacatggttggtgcagggagagaagcaaagagaaggcgtaagaccctcgacgcagaggttgttgagaaaccagcgaaagaagagacagtagtggagaacgccactccagactacgccgctggacttgtatctacccagaagcttgggagcttgaataacgaacctgctctcccctcaacctcatacctcccatcgaccccaagtgtggtgccagcttcttcttatattccgagttctgagacaccgcccgcaccatcatcgagggaagcatcccgtccccctgaagagccgtccgcaccatcaccaaccttgcctgcccagtttaagcagagggcaccaatgtataactcaggactcagtcctgccacccctactcccgcagctcccactagccctctcacaccaaccactccacccgctgttgcccccactacccagacacctccagtggccatggtggctcctcagactcaggcgcccgctcagcagcagccgaagaaaaacctatcactcacccgcgaacagatgttcgcggcacaggagatgttcaagactgccaacaaagtcacccgaccggagaaagccttgatcctgggctttatggccgggtcccgggagaacccttgtcaggagcagggggatgtcatccagatcaaactgtctgaacacaccgaggacctaccaaaggccgatggacaaggaagtacaactatgctggtggacactgttttcgagatgaattacgccaccggccagtggacccgatttaagaaatacaagccaatgacaaacgtgtcgtag

SEQ ID NO: 158301 - DNA, 1182 bp, Artificial Sequence
  derived and/or modified sequence
atgcttccattggaatgtcagtaccttaataagaacgctctgaccacgctcgcaggtccgctcactccaccagtaaagcatttccagttaaagcgcaagcccaagagcgccacactgcgagccgagctactgcagaaaagcacagagactgcacaacagctgaagagatccgctggcgttcctttccatgccaaggggcgcggtctgctgcggaagatggacaccaccacacctctcaagggtatccccaagcaggcgccattcaggagcccaacggcccccagcgtctttagtcccacgggcaacagaacccccataccaccttcaagaactctgcttaggaaggagcgaggcgtcaagctgctggacatctcggagctggacatggtcggggccggtagagaagccaagagacgtcggaaaacattggacgcagaggtcgttgagaagcctgctaaggaagagaccgttgttgagaacgccacaccagattatgcagccggattggtatctacccaaaagttaggttcattgaataatgagcccgcactgcctagcacctcctaccttcccagtactccatcggtggtgccagcgagttcatacattcccagctcagaaaccccgcctgcaccttctagccgcgaagcgagtcggcccccggaggagccctcagcacctagccctaccctgcccgcacagtttaaacagcgagcgccaatgtacaactccggactctccccggccaccccaaccccagcagccccaactagcccactgactccgactacaccgcccgcagtggcccccactacgcagaccccgcctgtagccatggtggcgccccagacccaagcgcctgcccagcagcaacccaaaaaaaacctgtctctcacgagggaacagatgtttgctgcacaggagatgttcaagaccgccaataaagtcactcgcccagaaaaggccttaatcctcggctttatggccgggtcaagggagaatccatgccaagagcagggtgatgtgattcagatcaaattgagtgaacacaccgaggacctgcccaaggccgatggccagggcagcacgactatgcttgttgatactgtctttgaaatgaattatgctactgggcagtggacccggttcaagaagtacaagccaatgaccaatgttagctag

SEQ ID NO: 158302 - DNA, 1620 bp, Artificial Sequence
  derived and/or modified sequence
atgcctggccagaggcgggccctgagccccaagatggcctccatgagggagagtgacaccggcctgtggctgcacaacaagctgggcgccacagatgagctgtgggcccctccttccatcgccagcctgctgacagctgctgtgattgacaacatccggctgtgcttccacggcctgagcagcgctgtgaagctgaagctgctgctgggcaccctgcacctgcccaggagaacagtggatgagatgaagggggccctgatggagatcatccagctggccagcctggacagcgacccctgggtgctgatggtggccgacatcctgaagagcttcccagacaccggcagcctgaacctggagctggaggagcagaaccccaacgtgcaggacatcctgggggagctgcgggagaaggtgggagaatgtgaggccagcgccatgctgcccctggagtgccagtacctgaacaagaatgccctgaccaccctggccggccccctgaccccacctgtgaagcacttccagctgaagaggaagcccaagagcgccaccctgcgggcagagctgctgcagaagagcacagaaacagcccagcagctgaagaggtctgctggggtgcccttccacgccaagggccggggcctgctgaggaagatggacaccaccacccccctgaagggcatccccaagcaggcccccttccgcagccccacagcccccagcgtcttcagccccaccggcaacagaacacccatcccccccagcaggaccctgctgaggaaggagcggggcgtgaagctgctggacatcagcgagctggacatggtgggcgccggccgggaggccaagagaagaaggaagaccctggatgctgaggtggtggagaagccagccaaggaggagaccgtggtggagaatgccaccccagactatgctgctggcctggtgtccacccagaagctgggcagcctgaacaatgagcccgccctgcccagcaccagctacctgcccagcaccccatctgtggtgcctgccagcagctacatccccagcagcgagaccccaccagcccccagcagccgggaggccagccggcccccagaggagcccagcgcccccagccccaccctgcctgcccagttcaagcagagggcccccatgtacaacagcggcctgagccctgccacccccaccccagctgcccccaccagccccctgacccccaccaccccacctgctgtggcccccaccacccagaccccacctgtggccatggtggccccccagacccaggccccagcccagcagcagcccaagaagaacctgagcctgacccgggagcagatgtttgctgcccaggagatgttcaagacagccaacaaggtgaccaggcctgagaaggccctgatcctgggcttcatggccggcagccgggagaacccctgccaggagcagggagatgtgatccagatcaagctgtctgagcacacagaggacctgcccaaggcagatggccagggcagcaccaccatgctggtggacacagtgtttgagatgaactatgccaccggccagtggacccgcttcaagaagtacaagcccatgaccaacgtgtcctag

SEQ ID NO: 158303 - DNA, 1587 bp, Artificial Sequence
  derived and/or modified sequence
atggcctccatgagggagagtgacaccggcctgtggctgcacaacaagctgggcgccacagatgagctgtgggccccacccagcatcgccagcctgctgacagctgctgtgattgacaacatccggctgtgcttccacggcctgagcagcgctgtgaagctgaagctgctgctgggcaccctgcacctgcccaggagaacagtggatgagatgaagggggccctgatggagatcatccagctggccagcctggacagcgacccctgggtgctgatggtggccgacatcctgaagagcttcccagacaccggcagcctgaacctggagctggaggagcagaaccccaacgtgcaggacatcctgggggagctgcgggagaaggtgggggagtgtgaggccagcgccatgctgcccctggagtgccagtacctgaacaagaatgccctgaccaccctggccggccccctgaccccacctgtgaagcacttccagctgaagaggaagcccaagagcgccaccctgcgggcagagctgctgcagaagagcacagaaacagcccagcagctgaagaggtctgctggggtgcccttccacgccaagggccggggcctgctgaggaagatggacaccaccacccccctgaagggcatccccaagcaggcccccttccgcagccccacagcccccagcgtcttcagccccactggaaacagaacacccatcccccccagcaggaccctgctgaggaaggagcggggcgtgaagctgctggacatcagcgagctggacatggtgggcgccggccgggaggccaagagaagaaggaagaccctggatgctgaggtggtggagaagccagccaaggaggagaccgtggtggagaatgccaccccagactatgctgctggcctggtgtccacccagaagctgggcagcctgaacaatgaaccagccctgcccagcaccagctacctgcccagcacccccagcgtggtgcctgccagcagctacatccccagcagcgagaccccaccagcccccagcagccgggaggccagcaggcctcctgaggagcccagcgcccccagccccaccctgcctgcccagttcaagcagagggcccccatgtacaacagcggcctgagccctgccacccccaccccagctgcccccaccagccccctgacccccaccaccccacctgctgtggcccccaccacccagaccccacctgtggccatggtggccccccagacccaggccccagcccagcagcagcccaagaagaacctgagcctgacccgggagcagatgtttgctgcccaggagatgttcaagacagccaacaaggtgaccaggcctgagaaggccctgatcctgggcttcatggccggcagccgggagaacccctgccaggagcagggagatgtgatccagatcaagctgtctgagcacacagaggacctgcccaaggcagatggccagggcagcaccaccatgctggtggacacagtgtttgagatgaactatgccaccggccagtggacccgcttcaagaagtacaagcccatgaccaacgtgtcctag

SEQ ID NO: 158304 - DNA, 1182 bp, Artificial Sequence
  derived and/or modified sequence
atgctgcccctggagtgccagtacctgaacaagaatgccctgaccaccctggccggccccctgaccccacctgtgaagcacttccagctgaagaggaagcccaagagcgccaccctgcgggcagagctgctgcagaagagcacagaaacagcccagcagctgaagaggtctgctggggtgcccttccacgccaagggccggggcctgctgaggaagatggacaccaccacccccctgaagggcatccccaagcaggcccccttccgcagccccacagcccccagcgtcttcagccccaccggcaacagaacacccatcccccccagcaggaccctgctgaggaaggagcggggcgtgaagctgctggacatcagcgagctggacatggtgggcgccggccgggaggccaagagaagaaggaagaccctggatgctgaggtggtggagaagccagccaaggaggagaccgtggtggagaatgccaccccagactatgctgctggcctggtgtccacccagaagctgggcagcctgaacaatgagcccgccctgcccagcaccagctacctgcccagcaccccatctgtggtgcctgccagcagctacatccccagcagcgagaccccaccagcccccagcagccgggaggccagccggcccccagaggagcccagcgcccccagccccaccctgcctgcccagttcaagcagagggcccccatgtacaacagcggcctgagccctgccacccccaccccagctgcccccaccagccccctgacccccaccaccccacctgctgtggcccccaccacccagaccccacctgtggccatggtggccccccagacccaggccccagcccagcagcagcccaagaagaacctgagcctgacccgggagcagatgtttgctgcccaggagatgttcaagacagccaacaaggtgaccaggcctgagaaggccctgatcctgggcttcatggccggcagccgggagaacccctgccaggagcagggagatgtgatccagatcaagctgtctgagcacacagaggacctgcccaaggcagatggccagggcagcaccaccatgctggtggacacagtgtttgagatgaactatgccaccggccagtggacccgcttcaagaagtacaagcccatgaccaacgtgtcctag

SEQ ID NO: 158305 - DNA, 1620 bp, Artificial Sequence
  derived and/or modified sequence
atgcccggccagcggcgggccctgagccccaagatggccagcatgagagaatcggacactgggttatggctgcataacaagctcggtgctacggatgagctatgggctccaccatccatcgcgagtctgctgacggccgccgtgatcgacaacatccggttgtgtttccacggactttcgtctgcagtcaaactgaagttacttttaggcacactccatctcccaaggaggacagttgatgagatgaagggagcactgatggaaattatccagcttgcttcactcgactcagatccctgggttctgatggtggctgatattctgaagtctttccccgatacaggctccctaaatcttgagttagaggaacaaaatccaaatgttcaggacattctaggtgaattacgcgagaaggtaggggagtgcgaagcctctgccatgctgccgctggagtgccagtatctcaacaagaacgcactgactaccctggctggacccctgacaccgcccgtcaagcacttccagctcaagcggaaacccaagtccgctacgcttcgtgccgaattattacaaaaatctaccgaaacagcacagcagctcaagcgaagcgccggggtccctttccatgccaaaggcaggggcttgctccgcaaaatggacaccaccacacccctgaaaggcattcctaagcaggccccatttcgcagtcctacggccccaagtgtcttcagcccaaccgggaataggacacccattcctcctagtcgcactctgctgcggaaagaaagaggcgttaagctgctggatatctcggagttggatatggtgggggccggtagagaagccaaaagaaggaggaagacactcgacgctgaagtggtggagaaacccgcaaaggaagagaccgtggtggagaatgcgactcccgattacgctgcggggctggttagtacccagaaacttgggtcattgaacaatgaacctgctctcccctccacttcctatctcccgagcacaccgtcagttgttcccgccagttcctacattccctcttcagagacgcctccggcaccttcaagccgggaggcgtcacggcctccagaggaaccgtccgctccttctcctacattacccgctcagttcaagcagagggcccccatgtataacagtggtctgtcccccgccacaccaacacctgcagctccaacaagtcccctgacccccactaccccaccagcagtcgctccgaccactcagacccctcctgtcgctatggtagccccacagacccaggctccagctcaacagcagccaaagaagaacttgtccctgactagggaacagatgttcgccgcccaggagatgtttaaaacagctaacaaggtgacgcggccggaaaaagccctgattctgggttttatggcgggcagtagagaaaacccctgccaggaacagggagacgtgattcagataaagttgtcagaacacaccgaggacctccccaaggcggacgggcaaggctccaccaccatgcttgtcgatactgtgttcgaaatgaactacgctacaggccagtggaccagatttaagaaatacaagcctatgacaaacgttagttag

SEQ ID NO: 158306 - DNA, 1587 bp, Artificial Sequence
  derived and/or modified sequence
atggccagcatgcgggagagcgacaccggcctgtggctgcacaacaaattgggcgcgaccgatgaactgtgggcgccacctagcatcgcttccttgctgaccgctgcggtcattgacaatatacgcttatgcttccatggcctttccagtgcagtaaaactgaagctcctgcttggtacactgcacctccctaggcggaccgtggacgaaatgaaaggggccctaatggagatcatccagttggcctccctggattcggacccctgggtgctgatggtggctgacatccttaagtcatttcccgacaccggttctctgaacctcgagctcgaggagcagaaccccaatgtccaagatatcctcggcgaactgagagaaaaggtcggagagtgtgaagcgtccgcaatgttgccactcgagtgccagtacctgaataagaatgccttaactacattggctggtcccctgacaccaccagtgaagcactttcagctgaaaaggaagcctaagagcgccacactgcgcgccgagctgctgcaaaaatctaccgagactgcgcagcaattgaaaaggtctgcaggtgtacccttccatgccaaaggacggggcttgctgagaaaaatggacactaccactcccctaaaagggatccccaagcaggctccattccgatctcccacggccccctctgtgttctcaccaactggtaaccggaccccaattccacctagcagaaccctcctaaggaaagaacgcggcgtaaagctcttggatatttcagaactggatatggtgggagccggtcgcgaagccaagaggcggaggaagaccttggacgccgaggttgttgaaaaacctgccaaagaagagacggtggtggagaacgctacaccggactatgcagctggcctggtgagcacccagaagttggggagccttaataacgaacccgccctgccgtcgacttcctacctgcctagcacaccatcagtcgtacccgcatcctcatacattcctagctcagagacgccaccagcaccctcgagcagagaagcatcgcggccccctgaagaaccctctgctccaagtccaaccctgcccgcccagtttaagcagagagccccaatgtacaattccggcttgagcccggcaaccccaacaccagctgcccccacaagtccactgacgcctaccaccccacccgcagtggctccaaccacccagaccccacccgtcgccatggtggccccacaaacacaggcccccgcccagcagcagcctaagaagaatctcagcctcactcgagagcagatgttcgccgctcaggagatgttcaaaaccgccaataaggttacgaggcctgagaaggctctcattctgggttttatggccggcagcagagagaacccctgtcaggaacagggagacgtgatccaaatcaagctgtctgagcataccgaggacctccctaaggcggatggccaaggtagcaccactatgctggtagatacagtgttcgagatgaattatgccaccgggcagtggactcggtttaaaaaatataaaccaatgactaacgtgtcctag

SEQ ID NO: 158307 - DNA, 1182 bp, Artificial Sequence
  derived and/or modified sequence
atgctgcccctggagtgccagtacctgaacaagaacgccctgaccactctcgctggaccactcactccgccagttaagcactttcagttaaagaggaagcctaaaagcgcaacccttcgagcggagctgcttcagaagagtacagagacggctcagcagctaaaacggtcagcgggagtcccatttcacgcaaaggggcgcggactcctgcgaaaaatggatacgacaacacccttgaagggaatcccaaagcaggccccctttaggtctcctactgccccaagcgtgttcagccctacaggtaatcggactccaatccccccaagccgcacactccttcgcaaggaacgaggggtgaaactcctggatatctccgagctcgacatggttggcgctggacgcgaagccaagcggcgccgcaagactctggatgcagaagtggtcgagaagccagccaaagaggaaaccgtggtggaaaatgccacccccgactatgcagcggggctggtgagcacacagaagctgggctctttaaacaacgagccagcactgccgagcacctcctatctaccttcaacgccttcagtcgtacctgcctcaagctacattccttcctccgagaccccacccgcccctagcagccgggaggcctctcggccccctgaagagccatctgcaccctctcccactctaccagcacagttcaaacaacgggcacccatgtacaactccggcctgagcccggccacacctacgccagcagcccctaccagcccacttaccccaacaacaccccctgccgtggctcccaccactcagaccccgcctgtcgcaatggtggcaccccagactcaggctcctgcgcagcagcagccaaagaaaaatttatcgcttacccgggagcaaatgttcgctgcccaggagatgttcaagacagctaacaaagtgacaagacctgaaaaggccttgatactcggatttatggcaggcagccgggagaatccgtgccaggagcagggggacgtgattcagattaaactcagtgaacacaccgaagatctacctaaggctgatggacaaggatccaccaccatgcttgtggataccgtctttgagatgaactatgccacgggccagtggacgcgcttcaaaaagtacaagccaatgactaacgtctcttag

SEQ ID NO: 158308 - DNA, 1620 bp, Artificial Sequence
  derived and/or modified sequence
atgccgggacagaggagagcactgtcaccaaaaatggcttctatgcgagagagcgacactgggctgtggctgcataacaaattgggggcaaccgatgagctgtgggccccaccttccatcgcgtcactccttaccgccgctgtgatcgataatattaggctgtgctttcacggtctgtcctcggccgtcaaattaaagctgctgctaggaaccctccatctgccacgtcggactgtggacgaaatgaaaggtgccctcatggagattattcaactggcatccctagattcagatccatgggtgctgatggtggccgacatcctgaaaagcttcccagacacaggctctctgaacctcgagctggaggaacagaacccgaacgtccaagacattctcggtgagctacgagagaaggtcggagagtgtgaggcctcagcaatgctgccactggagtgtcagtacttaaataaaaacgctctgacgacactggctggtccgttaacccctccggtgaagcacttccagttgaaacggaaacctaagagtgccacacttcgggcagaactgctccagaagtctactgaaactgcccagcagcttaaaaggagcgcaggcgttccatttcatgcaaaggggcgaggcctactgagaaaaatggataccaccactcctctcaaggggattcccaagcaggccccttttagatcccccacagccccatctgtttttagtcctaccggtaaccgcacacctatacctccttctagaacgctgctccgcaaagaaaggggggtgaaactcctcgatattagcgagctagacatggtgggggctgggagagaagccaagcgacgcaggaagactctcgacgctgaagttgttgagaagccagccaaggaggagactgtggtggagaacgccacacccgattatgcagcaggtctcgtcagtacacagaagcttggatccctgaataatgagccggctctgccaagtacgtcttatctccccagcacgcccagcgtagttcccgcaagttcctatatccctagttcagagactcccccagcccctagctcacgcgaagcttcacgccctccagaggaacccagcgcacctagccctacactgcccgctcagttcaaacagcgggcacctatgtacaactcggggctttctcccgcaactccaacccctgctgctccaaccagtcctctgacccctacaacgccccctgccgtcgctcctactacccagaccccacctgtcgcaatggttgcccctcagacccaggctcctgcgcaacagcagcccaaaaaaaacctctcattgacgagagagcaaatgttcgcagcccaggaaatgtttaagaccgcgaataaagtcactcgccctgagaaagcactgatacttgggtttatggccggttcacgggaaaatccttgccaagagcagggtgatgtcattcagattaagctgagcgagcatacagaggacctccccaaggcagacggacagggcagtacaactatgctggttgacacagtgttcgagatgaattacgccaccgggcagtggaccaggttcaagaagtacaagcccatgacgaacgtgtcttag

SEQ ID NO: 158309 - DNA, 1587 bp, Artificial Sequence
  derived and/or modified sequence
atggcctctatgagagagagtgatactggcttgtggcttcacaataagctgggagccacagatgaactctgggcgccaccgagtatagccagtttgctgaccgccgctgtcatcgataacattcggctctgcttccatggattgtccagcgcagtcaaactgaaacttcttctcggcaccctgcatctgcctcgcagaaccgtggacgagatgaaaggagcgttgatggagataattcaacttgcatccctggactccgatccatgggtgctcatggtggcggacatcctgaaatcctttcccgataccggctccctgaacctcgaacttgaggaacagaacccgaacgtccaggacattcttggcgagttgcgggagaaggtcggagagtgcgaggcttccgcgatgctgccactagagtgccaatatctcaataagaacgcgctaaccactctcgccggacccctcacaccccctgttaagcacttccagctgaagcgcaaaccgaagagtgccacactgcgcgcagaattgctgcagaagagcaccgagactgcccagcagttgaagcgctccgccggtgtcccctttcacgccaaagggagaggactcctgcgcaagatggatactacaacaccactcaaaggcataccgaagcaagctccctttaggagtcctacggctcccagtgttttctccccaacaggaaatagaacaccgatcccccctagcagaacgttactaagaaaggagcgcggagtgaagttgctggatatttctgagctcgatatggtgggcgcaggcagggaagctaagcggagacgaaaaacattagacgctgaggttgttgaaaaacctgccaaagaggagactgttgtggagaatgccactcccgactatgccgctgggctagtctcaacacagaaactcggctctttaaataacgagccggctttgccctctacgtcctatctgccaagcacccccagcgtagtgcctgcttcttcatacatcccgtcaagcgagacacccccagccccttcttctcgggaggcgagtagacctcctgaagaaccttctgcaccttctcctactttgccagctcagttcaagcagcgcgcacctatgtacaactcaggactctcaccagcaacccctactcccgcagcccctacctcacccttaaccccaactacaccgcctgctgtggccccaacaacccagacccctcctgtagcgatggtggcacctcagactcaggctcctgcccagcaacagcccaaaaaaaatctgagccttacgcgcgagcagatgttcgccgcacaggagatgttcaagacggctaataaggttacaaggccagagaaagcccttatcctgggctttatggcagggtccagagagaacccttgccaggagcaaggcgatgttattcagatcaagctcagcgaacacacggaggatctccccaaagctgatgggcaggggagcactaccatgctggtcgacactgtgtttgaaatgaattatgctaccggccagtggacaagattcaagaaatacaagcccatgacaaacgtcagttag

SEQ ID NO: 158310 - DNA, 1182 bp, Artificial Sequence
  derived and/or modified sequence
atgctccccctagagtgtcagtacttaaacaagaacgcacttactaccctggcgggtccactcacgccccctgtcaaacattttcagctcaagaggaaacctaaatcagccaccttgagggccgagctgctgcaaaaaagcaccgaaactgcccagcaattgaagcggagcgctggggttcccttccacgccaagggcaggggcctcctgaggaagatggatacaacgaccccacttaaggggattcctaagcaggccccttttaggagccctaccgctccttccgtcttttcacccaccgggaaccggacgcctatcccaccctccagaaccttactcaggaaggaaaggggtgtgaagctactcgatattagcgagctggacatggtgggagccggaagagaggccaaaaggaggagaaaaacactcgacgctgaggtggtggaaaaacccgcaaaagaagaaactgtcgttgagaatgcgacccccgattacgcagctgggcttgtctcaacccagaagctgggctcactaaacaacgagcctgcactgcctagcaccagctacctccccagcactccctcagtagttcctgcgtcctcgtatatcccctcaagcgaaacccccccagccccttcatcccgcgaggcatcacggcctcccgaggaaccgtcagcaccatctcctacactgccagcacagtttaagcagcgcgctccgatgtataacagtggcctttctccagccacccccactccggctgcacccacctctcccctgaccccgaccacaccacccgctgtcgcccctaccacccagacaccaccagttgctatggtggcaccacagacgcaagctcccgcacagcaacagcccaagaagaacctttctctgacaagagaacagatgtttgctgcacaggaaatgttcaaaacagccaataaagttacacgcccagagaaggcactgatcctgggatttatggcgggatcacgtgagaacccctgtcaggaacagggcgacgtgatacaaatcaaactctctgagcatacagaggatttacccaaggccgacggccaaggcagtaccacaatgttggtggacacagtgttcgagatgaactacgccactggacagtggacgagattcaagaagtataaacctatgacaaatgtatcatag

SEQ ID NO: 158311 - DNA, 3343 bp, Artificial Sequence
  derived and/or modified sequence
gtgacttccgcaggactgccaagttcaagccgccagggccagggcactgctagcagctgggctgagccctgttctcccggcgttcccaccgcccagtggcaatagctgtgaacggcggcaggagcatggcagtggaacaataaggaaaagatcttttaaaaaaaagatataatacagaagccaagcaaggcggccccgacctgtaaccccagcactctgggaggcagaggcgggcgggcggatcgcttgagcccaggagtttgagaccagcctggccaacataggaaggcctcgtcaaaaagacaaaagggtaaaacgaatttaataaaatgaagtttaacttttactcatgtttgtatctaatgacaagcttttaaaactgaaaagttcactactggctcctgcctggcggctccagcccgactgggggccggggcctccctgcactgtggggtcacgagtgcccctggacagctcccgagcgccctccgacccgcatgctcagcgcagccccgtcggcggcgcgccacgggcagagcgggctcagcgggggacggaagctcagcgctgcgaccgggatcccgcaggctcgctccgcagggccgcggctcctctccgtgcaggtgctgggcccgcgggggcggggcgtccacacggtccgcgccgagacccaagcggggaaaaagcgaagagcggacagcggggcaggtgccacagggagcctccgccccaccgcgcgagcagcaagtctgcggcgcttgacacctgcactgcgaatgccaggccgcagcccgggctcccaagacgcgaatacgcgcgcctgctcgtgacgtcattttttgcggtcttcccgagagccagcagagggcgccgccatgatgttttacggaagccgatagtccttgctcagcggcaccccgtccttccggctctcggctttgccacaaagcttcccgaagacgcggccgctacccggagacgcggtcgccacccagaagcgctctcccgggaagccccgctcgtgggaccgcgccacctgcgccgcctctgcggcccgcagcccgacgggcgccgccatgttggggtcctagcgagggacgcgtaggtgtcttcataagatgccggggcagcggcgcgcgctttcccccaagatggcgtccatgcgggagagcgacacgggcctgtggctgcacaacaagctgggggccacggacgagctgtgggcgccgcccagcatcgcgtccctgctcacggccgcggtcatcgacaacatccgtctctgcttccatggcctctcgtcggcagtgaagctcaagttgctactcgggacgctgcacctcccgcgccgcacggtggacgagatgaagggcgccctaatggagatcatccagctcgccagcctcgactcggacccctgggtgctcatggtcgccgacatcttgaagtcctttccggacacaggctcgcttaacctggagctggaggagcagaatcccaacgttcaggatattttgggagaacttagagaaaaggtgggtgagtgtgaagcgtctgccatgctgccactggagtgccagtacttgaacaaaaacgccctgacgaccctcgcgggacccctcactcccccggtgaagcattttcagttaaagcggaaacccaagagcgccacgctgcgggcggagctgctgcagaagtccacggagaccgcccagcagttgaagcggagcgccggggtgcccttccacgccaagggccgggggctgctgcggaagatggacaccaccaccccactcaaaggcatcccgaagcaggcgcccttcagaagccccacggcgcccagcgtcttcagccccacagggaaccggacccccatcccgccttccaggacgctgctgcggaaggaacgaggtgtgaagctgctggacatctctgagctggatatggttggcgctggccgagaggcgaagcggagaaggaagactctcgatgcggaggtggtggagaagccggccaaggaggaaacggtggtggagaacgccaccccggactacgcagccggcctggtgtccacgcagaaacttgggtccctgaacaatgagcctgcgctgccctccacgagctaccttccctccacgcccagcgtggttcccgcctcctcctacatccccagctccgagacgcccccagccccatcttcccgggaagccagccgcccaccagaggagcccagcgccccgagccccacgttgccagcgcagttcaagcagcgggcgcccatgtacaacagcggcctgagccctgccacacccacgcctgcggcgcccacctcgcctctgacacccaccacacctccggctgtcgcccctaccactcagacacccccggttgccatggtggccccgcagacccaggcccctgctcagcagcagcctaagaagaacctgtccctcacgagagagcagatgttcgctgcccaggagatgttcaagacggccaacaaagtcacgcggcccgagaaggccctcatcctgggcttcatggccggctcccgagagaacccgtgccaggagcagggggacgtgatccagatcaagctgagcgagcacacggaggacctgcccaaggcggacggccagggtagcacaaccatgctggtggacacagtgtttgagatgaactatgccacgggccagtggacgcgcttcaagaagtacaagcccatgaccaatgtgtcctagaaccacctgcctcacagctggccgtcacttgtgggggtccacgggacgatggctttgccagcttaaagtaaccggatggcggacacctggcccccgaggtcccccggccgccgccctgctgctgacccagcctgttttaagttctggatgcatttctctggggtatttggggcttatttttaaaattttaatatgggttcttttttgtgtgatttaagacactttttggactcaacgttacatttttgaatgtagtaagtaaattaaccaaaaaagttacaacttcctaattttagtgacagctctgcctgttagactcttactttttaaaatcttttctattttccctcgctggggcagtgccctcctacccccagggttgaggggaccaaggtggcacggtggtactgggggtgcggcagggacacccgaccacaccagagcgtgggagacggtgggccttgtcccctgcctgtgcctgcctgggagttttgtattcatcttttgtatagttgtggacatttaagacagtctttgggtacctattttcattgtaaaactatctgaaccattaaagtcgagcttttctaaagaaagccaccata

SEQ ID NO: 158312 - DNA, 3038 bp, Artificial Sequence
  derived and/or modified sequence
gtgacttccgcaggactgccaagttcaagccgccagggccagggcactgctagcagctgggctgagccctgttctcccggcgttcccaccgcccagtggcaatagctgtgaacggcggcaggagcatggcagtggaacaataaggaaaagatcttttaaaaaaaagatataatacagaagccaagcaaggcggccccgacctgtaaccccagcactctgggaggcagaggcgggcgggcggatcgcttgagcccaggagtttgagaccagcctggccaacataggaaggcctcgtcaaaaagacaaaagggtaaaacgaatttaataaaatgaagtttaacttttactcatgtttgtatctaatgacaagcttttaaaactgaaaagttcactactggctcctgcctggcggctccagcccgactgggggccggggcctccctgcactgtggggtcacgagtgcccctggacagctcccgagcgccctccgacccgcatgctcagcgcagccccgtcggcggcgcgccacgggcagagcgggctcagcgggggacggaagctcagcgctgcgaccgggatcccgcaggctcgctccgcagggccgcggctcctctccgtgcaggtgctgggcccgcgggggcggggcgtccacacggtccgcgccgagacccaagcggggaaaaagcgaagagcggacagcggggcaggtgccacagggagcctccgccccaccgcgcgagcagcaagtctgcggcgcttgacacctgcactgcgaatgccaggccgcagcccgggctcccaagacgcgaatacgcgcgcctgctcgtgacgtcattttttgcggtcttcccgagagccagcagagggcgccgccatgatgttttacggaagccgatagtccttgctcagcggcaccccgtccttccggctctcggctttgccacaaagcttcccgaagacgcggccgctacccggagacgcggtcgccacccagaagcgctctcccgggaagccccgctcgtgggaccgcgccacctgcgccgcctctgcggcccgcagcccgacgggcgccgccatgttggggtcctagcgagggacgcgtaggtgtcttcataagatgccggggcagcggcgcgcgctttcccccaagatggcgtccatgcgggagagcgacacgggcctgtggctgcacaacaagctgggggccacggacgagctgtgggcgccgcccagcatcgcgtccctgctcacggccgcggtcatcgacaacatccgtctctgcttccatggcctctcgtcggcagtgaagctcaagttgctactcgggacgctgcacctcccgcgccgcacggtggacgagatgaagggcgccctaatggagatcatccagctcgccagcctcgactcggacccctgggtgctcatggtcgccgacatcttgaagtcctttccggacacaggctcgcttaacctggagctggaggagcagaatcccaacgttcaggatattttgggagaacttagagaaaaggtgggtgagtgtgaagcgtctgccatgctgccactggagtgccagtacttgaacaaaaacgccctgacgaccctcgcgggacccctcactcccccggtgaagcattttcagttaaagcggaaacccaagagcgccacgctgcgggcggagctgctgcagaagtccacggagaccgcccagcagttgaagcggagcgccggggtgcccttccacgccaagggccgggggctgctgcggaagatggacaccaccaccccactcaaaggcatcccgaagcaggcgcccttcagaagccccacggcgcccagcgtcttcagccccacagggaaccggacccccatcccgccttccaggacgctgctgcggaaggaacgaggtgtgaagctgctggacatctctgagctggatatggttggcgctggccgagaggcgaagcggagaaggaagactctcgatgcggaggtggtggagaagccggccaaggaggaaacggtggtggagaacgccaccccggactacgcagccggcctggtgtccacgcagaaacttgggtccctgaacaatgagcctgcgctgccctccacgagctaccttccctccacgcccagcgtggttcccgcctcctcctacatccccagctccgagacgcccccagccccatcttcccgggaagccagccgcccaccagaggagcccagcgccccgagccccacgttgccagcgcagttcaagcagcgggcgcccatgtacaacagcggcctgagccctgccacacccacgcctgcggcgcccacctcgcctctgacacccaccacacctccggctgtcgcccctaccactcagacacccccggttgccatggtggccccgcagacccaggcccctgctcagcagcagcctaagaagaacctgtccctcacgagagagcagatgttcgctgcccaggagatgttcaagacggccaacaaagtcacgcggcccgagaaggccctcatcctgggcttcatggccggctcccgagagaacccgtgccaggagcagggggacgtgatccagatcaagctgagcgagcacacggaggacctgcccaaggcggacggccagggtagcacaaccatgctggtggacacagtgtttgagatgaactatgccacgggccagtggacgcgcttcaagaagtacaagcccatgaccaatgtgtcctagaaccacctgcctcacagctggccgtcacttgtgggggtccacgggacgatggctttgccagcttaaagtaaccggatggcggacacctggcccccgaggtcccccggccgccgccctgctgctgacccagcctgttttaagttctggatgcatttctctggggtatttggggcttatttttaaaattttaatatgggttcttttttgtgtgatttaagacactttttggactcaacgttacatttttgaatgtagtaagtaaattaaccaaaaaagttacaacttcctaattttagtgac

SEQ ID NO: 158313 - DNA, 2012 bp, Artificial Sequence
  derived and/or modified sequence
cccccaagatggcgtccatgcgggagagcgacacgggcctgtggctgcacaacaagctgggggccacggacgagctgtgggcgccgcccagcatcgcgtccctgctcacggccgcggtcatcgacaacatccgtctctgcttccatggcctctcgtcggcagtgaagctcaagttgctactcgggacgctgcacctcccgcgccgcacggtggacgagtgggtgagtgtgaagcgtctgccatgctgccactggagtgccagtacttgaacaaaaacgccctgacgaccctcgcgggacccctcactcccccggtgaagcattttcagttaaagcggaaacccaagagcgccacgctgcgggcggagctgctgcagaagtccacggagaccgcccagcagttgaagcggagcgccggggtgcccttccacgccaagggccgggggctgctgcggaagatggacaccaccaccccactcaaaggcatcccgaagcaggcgcccttcagaagccccacggcgcccagcgtcttcagccccacagggaaccggacccccatcccgccttccaggacgctgctgcggaaggaacgaggtgtgaagctgctggacatctctgagctggatatggttggcgctggccgagaggcgaagcggagaaggaagactctcgatgcggaggtggtggagaagccggccaaggaggaaacggtggtggagaacgccaccccggactacgcagccggcctggtgtccacgcagaaacttgggtccctgaacaatgagcctgcgctgccctccacgagctaccttccctccacgcccagcgtggttcccgcctcctcctacatccccagctccgagacgcccccagccccatcttcccgggaagccagccgcccaccagaggagcccagcgccccgagccccacgttgccagcgcagttcaagcagcgggcgcccatgtacaacagcggcctgagccctgccacacccacgcctgcggcgcccacctcgcctctgacacccaccacacctccggctgtcgcccctaccactcagacacccccggttgccatggtggccccgcagacccaggcccctgctcagcagcagcctaagaagaacctgtccctcacgagagagcagatgttcgctgcccaggagatgttcaagacggccaacaaagtcacgcggcccgagaaggccctcatcctgggcttcatggccggctcccgagagaacccgtgccaggagcagggggacgtgatccagatcaagctgagcgagcacacggaggacctgcccaaggcggacggccagggtagcacaaccatgctggtggacacagtgtttgagatgaactatgccacgggccagtggacgcgcttcaagaagtacaagcccatgaccaatgtgtcctagaaccacctgcctcacagctggccgtcacttgtgggggtccacgggacgatggctttgccagcttaaagtaaccggatggcggacacctggcccccgaggtcccccggccgccgccctgctgctgacccagcctgttttaagttctggatgcatttctctggggtatttggggcttatttttaaaattttaatatgggttcttttttgtgtgatttaagacactttttggactcaacgttacatttttgaatgtagtaagtaaattaaccaaaaaagttacaacttcctaattttagtgacagctctgcctgttagactcttactttttaaaatcttttctattttccctcgctggggcagtgccctcctacccccagggttgaggggaccaaggtggcacggtggtactgggggtgcggcagggacacccgaccacaccagagcgtgggagacggtgggccttgtcccctgcctgtgcctgcctgggagttttgtattcatcttttgtatagttgtggacatttaagacagtctttgggtacctattttcattgtaaaactatctgaaccattaaagtcgagcttttct

SEQ ID NO: 158314 - protein, 507 aa, Artificial Sequence
  derived and/or modified sequence
MEEPAAPSEAHEAAGAQAGAEAAREGVSGPDLPVCEPSGESAAPDSALPHAARGWAPFPVAPVPAHLRRGGLRPAPASGGGAWPSPLPSRSSGIWTKQIICRYYIHGQCKEGENCRYSHDLSGRKMATEGGVSPPGASAGGGPSTAAHIEPPTQEVAEAPPAASSLSLPVIGSAAERGFFEAERDNADRGAAGGAGVESWADAIEFVPGQPYRGRWVASAPEAPLQSSETERKQMAVGSGLRFCYYASRGVCFRGESCMYLHGDICDMCGLQTLHPMDAAQREEHMRACIEAHEKDMELSFAVQRGMDKVCGICMEVVYEKANPNDRRFGILSNCNHSFCIRCIRRWRSARQFENRIVKSCPQCRVTSELVIPSEFWVEEEEEKQKLIQQYKEAMSNKACRYFAEGRGNCPFGDTCFYKHEYPEGWGDEPPGPGGGSFSAYWHQLVEPVRMGEGNMLYKSIKKELVVLRLASLLFKRFLSLRDELPFSEDQWDLLHYELEEYFNLIL

SEQ ID NO: 158315 - DNA, 1524 bp, Artificial Sequence
  derived and/or modified sequence
atggaggagcccgctgccccctccgaggcacacgaggctgctggagcccaggccggtgctgaagcggccagggaaggtgtgtcaggtcctgatctgcctgtctgtgagcccagcggggagagcgccgctcctgacagtgcactcccacacgctgcaagagggtgggcgcccttccccgtcgcaccagtgcccgcccacttgagacgtgggggcctacgaccagcaccagcaagtggcggcggggcttggccctccccgctgccgtccaggagcagcgggatctggacaaaacagattatctgccggtattatatccatggacagtgcaaggaaggtgaaaactgtagatatagtcacgatttgtccggccgcaagatggccaccgagggtggagtgagcccccctggtgccagtgctggtggaggcccttctaccgccgcccatattgagcccccaactcaggaggtggccgaagctccaccagccgcttccagcctgagtctgccagtgattgggtctgccgctgagcgggggttctttgaggccgaaagggataacgctgatcggggcgccgcagggggggcaggcgttgagtcctgggccgacgctatcgagtttgttcctgggcagccctatagaggtcggtgggtggcctcagccccggaggcaccgctccagtcctctgagaccgagaggaaacaaatggctgtaggtagtggccttaggttctgttactacgcaagtcgcggcgtctgcttcagaggcgagtcgtgtatgtatcttcacggcgatatctgtgatatgtgcggacttcagacactgcaccccatggacgctgctcagcgggaggagcatatgcgtgcttgtatagaggctcacgagaaagatatggagctcagttttgctgtacagcgcgggatggataaagtgtgtggtatttgcatggaagtggtatatgagaaagcaaacccaaatgaccgtagattcggcatcctctcaaattgtaaccattccttctgcatcaggtgcatccgccggtggaggtcagccaggcaatttgagaatcgcattgtaaagagctgtccacagtgccgtgtaacaagtgaactggtcatcccatctgaattttgggtcgaggaagaggaggagaagcaaaagctgattcagcaatataaagaagccatgtcgaacaaggcatgtcgttacttcgccgaaggaagagggaactgcccatttggtgatacatgcttttataaacacgaataccccgaaggctggggagacgagcctccaggccccggtgggggttcattctctgcctactggcaccagcttgtcgaaccagtccggatgggcgagggcaacatgctgtacaaaagtattaagaaagaactggtggtgctgcgcctggcttctcttctgtttaaacggtttctgagcctacgcgatgagcttcccttttctgaggaccagtgggacctgttacactacgaactggaagaatacttcaaccttatcctgtag

SEQ ID NO: 158316 - DNA, 1524 bp, Artificial Sequence
  derived and/or modified sequence
atggaggagcctgctgcccccagcgaggcccatgaagctgctggggcccaggccggggctgaggccgcccgggagggcgtgtctggccctgacctgcctgtgtgtgagcccagcggggagagcgctgccccagacagcgccctgccccatgctgcccggggctgggcccccttccctgtggcccctgtgcctgcccacctgcggcggggcggcctgcggcctgccccagccagcggcggcggggcctggcccagccccctgcccagccgcagcagcggcatctggaccaagcagatcatctgccgctactacatccacggccagtgcaaggagggggagaactgccgctacagccatgacctgagcggcaggaagatggccacagagggcggcgtgagccccccaggggccagcgctgggggcggccccagcacagctgcccacatcgagccccccacccaggaggtggccgaggcccccccagctgccagcagcctgagcctgcctgtgattggcagcgctgctgagcggggcttctttgaggccgagcgggacaatgctgacagaggagctgctgggggcgccggcgtggagagctgggcagatgccatcgagtttgtgcccggccagccctaccggggccgctgggtggccagcgcccctgaggcccccctgcagagcagcgagacagagaggaagcagatggctgtgggcagcggcctgcgcttctgctactatgccagccggggcgtgtgcttccggggggagagctgcatgtacctgcacggggacatctgtgacatgtgtggcctgcagaccctgcaccccatggatgctgcccagcgggaggagcacatgagggcctgcatcgaggcccacgagaaggacatggagctgagctttgctgtgcagaggggcatggacaaggtgtgtggcatctgcatggaggtggtgtatgagaaggccaaccccaatgacagaagatttggcatcctgagcaactgcaaccacagcttctgcatccgctgcatccgccgctggaggtctgcccggcagtttgagaacagaattgtgaagagctgcccccagtgccgggtgaccagcgagctggtgatccccagcgagttctgggtggaggaggaggaggagaagcagaagctgatccagcagtacaaggaggccatgagcaacaaggcctgccgctactttgctgagggccggggcaactgcccctttggagacacctgcttctacaagcatgagtacccagagggctggggagatgagcccccaggccctgggggcggcagcttcagcgcctactggcaccagctggtggagcctgtgaggatgggagagggcaacatgctgtacaagagcatcaagaaggagctggtggtgctgcggctggccagcctgctcttcaagcgcttcctgagcctgagagatgagctgcccttcagcgaggaccagtgggacctgctgcactatgagctggaggagtacttcaacctgatcctgtag

SEQ ID NO: 158317 - DNA, 2711 bp, Artificial Sequence
  derived and/or modified sequence
tgtttcagaatctataggattatattttttttaaggcagacagatacgaaaatacaacgaagcgtgcatgaccgaaaccagaagagattaaagtaaaacctcattctcctgaggaaatcgtgtgagaagggacttagggactgccggaacacagcgaagcagaggcagaaggcagacaaaaggggctgggttggtccccgcctgtgtgaacgaaaaaatatgtcagattggaaaattgcggtaaaaaccaggcagagcacgtacgttgcccccacaggaagtgtccgccatgctgcctgtgcccggaagtaggtaggaacacacagtcagagggacccaaaagcaggggggaaggaaaaagagatgcacacttcccccagagaagcctccgagcgcggccgccattccgggcctcaagcccataaagaaaaaataccggagaggttctggcaccatttcggggtgccaaagcagccatggaagagcctgcagctccctcagaagcccacgaggcagccggggcccaggcaggtgctgaggcagcaagggagggtgtgtctgggccggaccttcccgtctgtgagccctccggggaatctgctgctccagattcagccctgccacatgcggcaaggggctgggcccccttccctgtagctccagtccctgcccacctccgcagaggaggcctgaggcctgccccagcctcaggaggaggagcctggcccagtccgttgccaagccgaagcagcggcatttggacaaagcagatcatctgcaggtattatatacatgggcagtgcaaggagggggagaactgtcgctattcgcacgacctttctggtcggaagatggccactgagggtggcgtttcgccgcctggggcctctgcaggtggaggccctagcacggctgcgcacatcgagcccccgactcaggaagtggcggaagcccccccggctgcatcctccctttccttgcctgtgattggctcggctgctgaaaggggtttctttgaagccgagagagacaatgcagaccgtggagctgctggaggagcaggtgtagaaagctgggcggatgccattgagtttgttccagggcagccctaccggggccgctgggttgcatctgcccccgaggctcctctacagagctcagagactgagaggaagcagatggctgtgggcagtgggttgcggttttgctattatgcttccaggggagtttgctttcgtggggagagctgtatgtacctccatggagacatatgcgacatgtgtgggctgcagaccttgcaccccatggatgctgcccagagggaagaacatatgagggcctgcattgaagcacacgagaaagatatggaactctcgtttgctgtgcagcgtggtatggacaaggtgtgtggcatctgcatggaggttgtctatgagaaggccaaccccaatgaccgccgctttggcattctttccaattgcaaccattccttctgtattaggtgtatccgcaggtggagaagtgccagacagtttgagaacaggatcgtcaagtcttgcccacagtgcagggtcacctctgaattggtcattcccagtgagttctgggtggaggaggaggaagagaagcagaaacttattcagcaatacaaggaggcaatgagcaacaaggcctgcaggtattttgcggaaggcaggggtaactgcccatttggagacacatgcttttacaagcatgaataccctgagggctggggagatgagcctcctgggccaggtggtgggtcattcagcgcatactggcatcaacttgtggagcctgtgcgaatgggagagggcaacatgctctataaaagcattaagaaggagcttgtcgtgcttcggctggccagtctgttgtttaagcggtttctttcactgagagatgagttacccttctctgaggaccagtgggacttgcttcattatgagctggaagaatatttcaatttgattctgtagcatcgtgctgtggcatgtggtctagtctgctgaggttctgtcgtctgctattgcctgttttccctgtgttgacactcttactgctttcaggggctgttgaggcagtgcttctgttttcttgtctattctgcatatctttccccctaggattatggtgattatctgtgttaaaaaataagtccttaaagttactgttttggtgaaattaatattaatgtcagcttatggcttttttttgtcatctctgttgtcaacaggattaactcagttctagtgtagtgtttactgaatttccacacttattttgaagaccctcaagagtaaatgtggcagagtgaaaggagaagttttaattgaactagtagctttgtgctataatagccttaacaaatggacccttgcagggctttgcagctgctcatctgtttgtttacagtttgttctttccctccttccccttcaagtgcacttgttaaactgtgatgaacttgtgattttgtgttttacttgaccaaaaccaagtgtatatgtttacatgtttttatcctgtttagcttgacatgaaataatttatatttggaaatatatatttaagaattatatatataaaaatatatatgtataagagttatgtatttgaaaaaaatatataaaagaatatacatcacaatataatatttatgtttatgtaataaagtaaatacagagctg

SEQ ID NO: 158318 - DNA, 1524 bp, Artificial Sequence
  derived and/or modified sequence
atggaggagcccgccgcccccagcgaggcccacgaggccgccggcgcacaggcgggcgccgaagccgcaagagagggagtgtcgggccccgaccttcctgtgtgtgaacccagtggggagtcagcagcacccgactcagctcttccacatgccgctagaggctgggccccgtttcccgttgctcccgttcccgctcatttgcggcgaggcggactgcggccggcacctgctagcggtgggggggcatggcctagtcccctgccatcacgatcctccggtatctggactaaacagattatttgtcgctattatattcacgggcagtgcaaggaaggggagaattgtcgctactcccatgatctgtctggccgaaagatggccacagagggcggagtgagtccacccggcgcctccgcaggcggcggcccctctaccgccgcccatatcgagcctccaacacaggaagtcgccgaagcgccaccggctgccagtagcttgtcattacccgttatcggctccgccgctgagcggggcttctttgaagccgagagggataacgccgaccgcggagccgcagggggcgccggtgttgaatcctgggcggacgcgatagaattcgttccaggacagccataccgggggagatgggttgcctcggccccagaggctccgcttcagagttcggagactgagcgcaagcagatggctgtgggaagtggcctcagattttgctactacgcgagccggggagtgtgttttagaggagaatcctgcatgtacttgcacggcgatatttgcgacatgtgtggcttacagactctacatcctatggacgctgctcaacgggaagaacacatgcgggcgtgcattgaggcccacgaaaaagatatggaactgagcttcgccgtgcaacgcggaatggacaaggtctgcggtatctgtatggaggtcgtctacgaaaaggctaatcctaatgatcgcagattcggaattttgagtaattgtaatcattccttttgtattcgctgcattcgtaggtggagatctgcgaggcaattcgagaatcgaatcgtgaagtcatgcccacagtgtcgggttacctctgagcttgttattccatcggaattttgggtcgaggaggaagaggagaagcagaagctcatccagcagtacaaggaggccatgtctaataaggcctgtcggtatttcgctgaagggaggggtaactgtccattcggtgatacatgtttctataagcacgagtatcctgagggctggggcgatgaaccccctggccccggcgggggcagctttagcgcctactggcatcagctggtcgagcctgttaggatgggagagggcaacatgctgtacaaaagcatcaagaaagagctcgttgtcctacgtttggcctcactgctgttcaagcggttcctgagcctgcgcgacgaacttccgttctccgaggatcagtgggaccttctccactacgagctggaggagtattttaacctgattctctag

SEQ ID NO: 158319 - DNA, 1524 bp, Artificial Sequence
  derived and/or modified sequence
atggaggaaccagctgcgccttctgaagcacacgaggctgcgggagcacaggccggtgccgaggcagcgagggagggagtcagcggcccagacctaccagtttgcgaaccctctggagagagtgctgctcctgactcagcattgcctcatgcagcccgtggttgggcaccgttccccgtggctccagtccccgctcatctccggaggggaggtttacgcccagcacccgcatctggtgggggtgcctggcccagccctctgccttcccggtcctcggggatttggactaaacagattatctgtcgttactacatccacgggcagtgtaaagagggagagaactgccgctacagtcatgatctctcaggacggaagatggccacagagggaggcgtatctccccctggagcttctgccggtggcggaccctctaccgccgctcatatcgaacctcccacccaggaagttgcagaggcaccacccgctgcgtcctcgctctccttgcctgtgattggtagtgcggctgagaggggattttttgaggcagaacgagacaacgctgacaggggcgctgcagggggtgcaggagtggagtcttgggctgatgccatagagtttgtgcctggtcaaccgtatagaggcagatgggtggcctcggctcccgaagcacccctacaatctagcgaaacagagagaaagcaaatggctgtgggctcaggactccggttctgctactatgccagccgcggagtgtgtttccgcggagaatcatgcatgtaccttcatggcgacatttgcgacatgtgtgggctgcagacactgcatcctatggatgctgcccagagggaggagcacatgcgggcatgtatcgaagctcacgagaaggatatggaactgagtttcgccgttcagagaggcatggataaggtatgtggtatctgcatggaggtggtgtacgagaaggctaaccctaacgaccggaggtttggaatcttaagcaactgcaaccatagcttctgtatacgatgcatccgccgttggaggagcgctagacagttcgagaatagaattgtcaaatcatgcccgcagtgtagagttacatcagagctggtcatcccctcagagttctgggtcgaggaggaggaggagaagcagaaactaattcagcaatacaaggaggccatgtctaacaaagcctgccgctatttcgctgaaggtagagggaattgcccgttcggtgacacttgtttttataagcacgagtatcccgagggctggggagatgagccgcctgggccaggtggcggatcttttagcgcatactggcatcaactggtggagccagtgcgtatgggagagggaaacatgctttacaagtccataaagaaggagctcgttgtcctgcgactggctagcctgctctttaaacgcttcctgtcactcagagatgaactacccttctcagaggaccagtgggatctcctgcattatgagctggaagaatacttcaacttgatactctag

SEQ ID NO: 158320 - DNA, 1524 bp, Artificial Sequence
  derived and/or modified sequence
atggaggagcccgccgcccccagcgaggcccacgaggccgccggcgcccaggccggcgccgaggccgccagagagggcgtgagcggccccgacctgcccgtgtgcgagcccagcggcgagagcgccgcccccgacagcgccctgccccacgccgccagaggctgggcccccttccccgtggcccccgtgcccgcccacctgagaagaggcggcctgagacccgcccccgccagcggcggcggcgcctggcccagccccctgcccagcagaagcagcggcatctggaccaagcagatcatctgcagatactacatccacggccagtgcaaggagggcgagaactgcagatacagccacgacctgagcggcagaaagatggccaccgagggcggcgtgagcccccccggcgccagcgccggcggcggccccagcaccgccgcccacatcgagccccccacccaggaggtggccgaggccccccccgccgccagcagcctgagcctgcccgtgatcggcagcgccgccgagagaggcttcttcgaggccgagagagacaacgccgacagaggcgccgccggcggcgccggcgtggagagctgggccgacgccatcgagttcgtgcccggccagccctacagaggcagatgggtggccagcgcccccgaggcccccctgcagagcagcgagaccgagagaaagcagatggccgtgggcagcggcctgagattctgctactacgccagcagaggcgtgtgcttcagaggcgagagctgcatgtacctgcacggcgacatctgcgacatgtgcggcctgcagaccctgcaccccatggacgccgcccagagagaggagcacatgagagcctgcatcgaggcccacgagaaggacatggagctgagcttcgccgtgcagagaggcatggacaaggtgtgcggcatctgcatggaggtggtgtacgagaaggccaaccccaacgacagaagattcggcatcctgagcaactgcaaccacagcttctgcatcagatgcatcagaagatggagaagcgccagacagttcgagaacagaatcgtgaagagctgcccccagtgcagagtgaccagcgagctggtgatccccagcgagttctgggtggaggaggaggaggagaagcagaagctgatccagcagtacaaggaggccatgagcaacaaggcctgcagatacttcgccgagggcagaggcaactgccccttcggcgacacctgcttctacaagcacgagtaccccgagggctggggcgacgagccccccggccccggcggcggcagcttcagcgcctactggcaccagctggtggagcccgtgagaatgggcgagggcaacatgctgtacaagagcatcaagaaggagctggtggtgctgagactggccagcctgctgttcaagagattcctgagcctgagagacgagctgcccttcagcgaggaccagtgggacctgctgcactacgagctggaggagtacttcaacctgatcctgtag

SEQ ID NO: 158321 - protein, 270 aa, Artificial Sequence
  derived and/or modified sequence
MWLLVSVILISRISSVGGEAMFCDFPKINHGILYDEEKYKPFSQVPTGEVFYYSCEYNFVSPSKSFWTRITCAEEGWSPTPKCLRLCFFPFVENGHSESSGQTHLEGDTVQIICNTGYRLQNNENNISCVERGWSTPPKCRSTISAEKCGPPPPIDNGDITSFLLSVYAPGSSVEYQCQNLYQLEGNNQITCRNGQWSEPPKCLDPCVISQEIMEKYNIKLKWTNQQKLYSRTGDIVEFVCKSGYHPTKSHSFRAMCQNGKLVYPSCEEK

SEQ ID NO: 158322 - DNA, 813 bp, Artificial Sequence
  derived and/or modified sequence
atgtggctactggtgagtgtgattctaataagccggattagctcggtgggcggagaagccatgttctgtgacttccccaaaatcaaccatggaattctgtatgatgaggaaaaatacaaacctttcagccaagtgcccactggagaggtgttttactacagttgtgagtacaactttgttagcccctctaagagtttttggacccgcattacttgcgctgaggaaggatggtcacccacccccaaatgcctgcgcctttgcttttttcccttcgttgaaaacggccactcggagtccagtgggcagacacatctggagggcgacactgtgcagatcatttgcaatacaggctataggctgcagaataacgagaacaacatttcctgtgtggagcgcggatggtccacccctcctaagtgtcggtccacaatatcagctgagaaatgtggccccccgccacctattgacaatggtgacattaccagctttctcctcagtgtctacgcaccgggctccagcgttgaataccaatgtcaaaatctctaccagctggagggcaataatcaaatcacatgtaggaacggacaatggtcagaaccacccaagtgtctcgatccttgtgtgatttcccaggaaatcatggagaagtacaacatcaaactgaagtggactaatcagcagaagctctacagtcgcacaggcgatatagtggaattcgtttgcaagagtggctaccacccaacaaagtcccattctttcagagctatgtgccagaatgggaaactggtttatccttcttgtgaggagaagtag

SEQ ID NO: 158323 - DNA, 813 bp, Artificial Sequence
  derived and/or modified sequence
atgtggctgctggtcagcgtaatcctgattagcagaataagcagcgtggggggcgaggccatgttctgcgattttcctaagattaatcacgggatcctgtacgacgaagaaaaatacaagcctttctcacaggtccctactggtgaggtgttctattacagctgcgagtataacttcgtatccccttctaagagcttttggacacgtattacatgtgccgaagaaggctggtcccccactccaaagtgcctcaggctctgtttctttccctttgtggagaacggtcactcagagtcgtcaggccagactcacctcgaaggtgatacggtgcagattatatgtaacacagggtacagacttcaaaataacgaaaacaacatatcctgcgtggagcggggatggagcacaccccctaagtgccggtctacaatttcggctgagaagtgtggaccccccccaccaatcgacaacggtgatattacatctttcctgctgagcgtgtacgcaccaggaagttcagtagagtatcaatgccagaacctgtaccaactggaaggtaacaatcaaattacatgcaggaacggccagtggtcggagcctccaaaatgtttggacccatgcgtgatatcccaggagattatggaaaaatataatatcaaactcaagtggacaaatcaacagaaactatatagtagaacaggtgacatcgtggaatttgtgtgtaagagcggataccaccccaccaaatctcactcctttcgtgccatgtgccaaaacgggaaactcgtttacccctcctgtgaagaaaagtag

SEQ ID NO: 158324 - DNA, 813 bp, Artificial Sequence
  derived and/or modified sequence
atgtggctgctggtgtctgtcatcctgatcagccgcatcagctctgtgggcggggaggccatgttctgtgacttccccaagatcaaccacggcatcctgtatgatgaggagaagtacaagcccttcagccaggtgcccactggagaggtgttctactacagctgtgagtacaactttgtgagccccagcaagagcttctggacccgcatcacctgtgccgaggagggctggagccccacccccaagtgcctgcggctgtgcttcttcccctttgtggagaatggccacagcgagagcagcggccagacccacctggagggggacacagtgcagatcatctgcaacacaggctaccgcctgcagaacaatgaaaacaacatcagctgtgtggagcggggctggagcaccccacccaagtgccgcagcaccatctctgctgagaagtgtggccccccaccacccatcgacaatggagacatcaccagcttcctgctgtctgtgtatgcccctggcagctctgtggagtaccagtgccagaacctgtaccagctggagggcaacaaccagatcacctgcagaaatggccagtggagcgagccccccaagtgcctggacccctgtgtgatcagccaggagatcatggagaagtacaacatcaagctgaagtggaccaaccagcagaagctgtacagcaggactggagacatcgtggagtttgtgtgcaagagcggctaccaccccaccaagagccacagcttccgggccatgtgccagaatggcaagctggtgtaccccagctgtgaggagaagtag

SEQ ID NO: 158325 - DNA, 813 bp, Artificial Sequence
  derived and/or modified sequence
atgtggctgctggtgagcgtgatcctgatcagccggatcagcagcgtcggaggggaggccatgttctgcgatttccccaagataaaccacggcatactgtacgatgaagagaaatacaaacctttttcccaggtgcccaccggcgaggtcttctactactcgtgcgagtacaatttcgtgtcacctagtaaatccttttggacccgcatcacttgtgctgaagagggctggtcgccaacacccaagtgtctgagactgtgcttcttccccttcgtcgaaaacggccatagcgagtctagtggccagacacacctcgaaggcgatacggtacaaatcatctgtaacacagggtataggctccaaaataatgaaaacaacatttcctgtgtagaacggggctggagtacaccccccaagtgtaggtctactatatcagccgagaagtgtgggcccccgcccccaattgataatggcgatatcacttcgtttctcctgtctgtttacgctccgggctctagcgtcgagtaccagtgccaaaatctctatcagctcgagggcaacaatcagatcacttgccgcaacggacagtggtcagaaccaccaaaatgccttgacccgtgtgtgatcagccaagaaataatggagaagtacaatatcaagctaaaatggacaaaccaacagaaactgtatagccgcaccggtgacatcgttgagttcgtttgcaagtccggctatcatcccacaaagtcacacagctttcgagccatgtgtcagaatgggaagttggtgtatccgtcatgtgaggaaaaatag

SEQ ID NO: 158326 - DNA, 813 bp, Artificial Sequence
  derived and/or modified sequence
atgtggctgctggtgagcgtgatcctgatcagccggatcagcagcgtgggaggcgaagcaatgttttgcgatttccccaagattaaccatgggatcctatacgatgaagagaagtacaaacccttctcacaggtgcccactggcgaggtgttctattatagctgcgagtacaacttcgtatcaccttccaagtccttctggactcgaatcacctgcgccgaggaagggtggagccccacacccaagtgtcttcgcttgtgcttctttccgtttgtggagaatggccattccgagtcaagcgggcaaacccaccttgaaggcgacacagtccagataatctgcaacacgggctaccgcctgcagaataatgagaacaatatcagctgcgtagagaggggctggtctacacctcccaaatgccgctcaaccatctcagccgaaaagtgcggcccgccacctcccatcgataacggggatattacaagctttttactgtctgtctacgccccgggctcatctgtggaataccagtgccagaacctctaccagctggagggaaacaaccaaataacttgcagaaacggccagtggagcgaacccccaaagtgcctcgacccctgcgttatttcacaagagatcatggagaaatataacattaagctgaaatggacaaaccaacagaaactgtacagtagaaccggcgatatcgtagagttcgtgtgtaaatcagggtaccatcccaccaagagccatagcttccgggcgatgtgtcagaatggaaagctggtttatcctagctgtgaagagaaatag

SEQ ID NO: 158327 - DNA, 813 bp, Artificial Sequence
  derived and/or modified sequence
atgtggttactcgtgtccgtgatcttaatatctcggatcagctcagtcggcggagaggccatgttctgcgatttcccaaagatcaaccatgggattctgtacgacgaggaaaagtacaaacccttctcccaggttccaactggcgaagtgttttactactcttgcgaatacaattttgtgagcccaagtaagtccttttggacaagaattacgtgcgccgaggagggatggtcacccactcccaagtgcctgcggttgtgtttttttccattcgtggagaatggccactccgagagcagcggtcagacccatctggagggggacactgtgcagatcatctgcaataccggctatcgactgcagaacaatgaaaacaatatttcctgcgtggaacggggatggtctactccacccaagtgcaggtcaactataagcgcggagaagtgcgggcctcccccaccaattgacaatggggacataacatcttttctgttatccgtgtacgcccctgggtcctcagtggagtaccagtgtcaaaatctgtaccagctggaaggaaataaccagattacatgtaggaacggccagtggagcgagcccccaaagtgtttggatccatgcgtcatctctcaggagattatggaaaaatacaacatcaagttgaaatggaccaatcagcaaaagctgtacagcaggacgggcgacatcgtggaattcgtgtgcaaatcagggtaccatccaactaagagtcactctttccgcgcaatgtgtcagaatggcaagctagtgtatcccagctgtgaagaaaaatag

SEQ ID NO: 158328 - DNA, 813 bp, Artificial Sequence
  derived and/or modified sequence
atgtggctgttagtatctgtgatactgatctcacgcatttcttccgttggaggggaggccatgttttgtgactttccaaagattaaccatggaatactgtatgatgaggagaagtataagcccttctcgcaggttcctaccggcgaagtgttttattactcctgcgaatataattttgtgtcgccttctaaatccttttggacccgtatcacctgcgctgaggagggatggtcccctacaccaaagtgtctccgcctctgcttttttcccttcgtcgagaatggccacagtgagagctcaggccaaacgcacctagagggcgacacagtccaaattatctgcaataccgggtatcgtctgcagaacaacgagaataacatcagctgtgtggagagaggctggtcaacaccccctaaatgtaggtccactatctcagccgagaaatgtggccctccacctcccatcgataatggcgacatcacatctttcttgctgtccgtttatgctccagggtcttcagtcgagtaccaatgccaaaatctataccagctcgagggcaacaaccaaatcacatgccgaaatggacagtggagcgaaccccctaagtgtcttgacccgtgtgtcatctctcaggagattatggagaaatacaacattaagttaaaatggaccaatcagcagaagctctactcacggactggggacattgtggaatttgtgtgtaaaagcggctaccacccaaccaagagccattcattcagggccatgtgtcagaatgggaagctcgtctatccaagctgtgaagaaaagtag

SEQ ID NO: 158329 - DNA, 1062 bp, Artificial Sequence
  derived and/or modified sequence
cagttagtacactgaaattcaaagtcatgctcataactgttaatgaaagcagattcaaagcaacaccaccaccactgaagtatttttagttatataagattggaactaccaagcatgtggctcctggtcagtgtaattctaatctcacggatatcctctgttgggggagaagcaatgttctgtgattttccaaaaataaaccatggaattctatatgatgaagaaaaatataagccattttcccaagttcctacaggggaagttttctattactcctgtgaatataattttgtgtctccttcaaaatccttttggactcgcataacgtgcgcagaagaaggatggtcaccaacaccaaagtgtctcagactgtgtttctttccttttgtggaaaatggtcattctgaatcttcaggacaaacacatctggaaggtgatactgtacaaattatttgcaacacaggatacagacttcaaaacaatgagaacaacatttcatgtgtagaacggggctggtccactcctcccaaatgcaggtccactatttctgcagaaaaatgtgggccccctccacctattgacaatggagacattacttcattcctgttgtcagtatatgctccaggttcatcagttgagtaccagtgccagaacttgtatcaacttgagggtaacaatcaaataacatgtagaaacggacaatggtcagaaccaccaaaatgcttagatccatgtgtaatatcacaagaaattatggaaaaatataacataaaattaaagtggacaaaccaacaaaagctttattcaagaacaggtgacatagttgaatttgtttgtaaatctggatatcatccaacaaaatctcattcatttcgagcaatgtgtcagaatgggaaactggtatatcccagttgtgaagaaaaatagaatcaatggcattactattagtaaaatgcacacctttttctgaatttactattatatttgttttcaatttcatttttcaagtactgttttactcatttttattcataaataaagttttgtgttgatttgtgaaaa

SEQ ID NO: 158330 - DNA, 1036 bp, Artificial Sequence
  derived and/or modified sequence
tgttaatgaaagcagattcaaagcaacaccaccaccactgaagtatttttagttatataagattggaactaccaagcatgtggctcctggtcagtgtaattctaatctcacggatatcctctgttgggggagaagcaatgttctgtgattttccaaaaataaaccatggaattctatatgatgaagaaaaatataagccattttcccaagttcctacaggggaagttttctattactcctgtgaatataattttgtgtctccttcaaaatccttttggactcgcataacgtgcgcagaagaaggatggtcaccaacaccaaagtgtctcagactgtgtttctttccttttgtggaaaatggtcattctgaatcttcaggacaaacacatctggaaggtgatactgtacaaattatttgcaacacaggatacagacttcaaaacaatgagaacaacatttcatgtgtagaacggggctggtccactcctcccaaatgcaggtccactatttctgcagaaaaatgtgggccccctccacctattgacaatggagacattacttcattcctgttgtcagtatatgctccaggttcatcagttgagtaccagtgccagaacttgtatcaacttgagggtaacaatcaaataacatgtagaaacggacaatggtcagaaccaccaaaatgcttagatccatgtgtaatatcacaagaaattatggaaaaatataacataaaattaaagtggacaaaccaacaaaagctttattcaagaacaggtgacatagttgaatttgtttgtaaatctggatatcatccaacaaaatctcattcatttcgagcaatgtgtcagaatgggaaactggtatatcccagttgtgaagaaaaatagaatcaatggcattactattagtaaaatgcacacctttttctgaatttactattatatttgttttcaatttcatttttcaagtactgttttactcatttttattcataaataaagttttgtgttgatttgtgaaaatgcaattacaa

SEQ ID NO: 158331 - DNA, 813 bp, Artificial Sequence
  derived and/or modified sequence
atgtggctgctggtgagcgtgatcctgatcagcagaatcagcagcgtgggcggcgaggccatgttctgcgacttccccaagatcaaccacggcatcctgtacgacgaggagaagtacaagcccttcagccaggtgcccaccggcgaggtgttctactacagctgcgagtacaacttcgtgagccccagcaagagcttctggaccagaatcacctgcgccgaggagggctggagccccacccccaagtgcctgagactgtgcttcttccccttcgtggagaacggccacagcgagagcagcggccagacccacctggagggcgacaccgtgcagatcatctgcaacaccggctacagactgcagaacaacgagaacaacatcagctgcgtggagagaggctggagcaccccccccaagtgcagaagcaccatcagcgccgagaagtgcggcccccccccccccatcgacaacggcgacatcaccagcttcctgctgagcgtgtacgcccccggcagcagcgtggagtaccagtgccagaacctgtaccagctggagggcaacaaccagatcacctgcagaaacggccagtggagcgagccccccaagtgcctggacccctgcgtgatcagccaggagatcatggagaagtacaacatcaagctgaagtggaccaaccagcagaagctgtacagcagaaccggcgacatcgtggagttcgtgtgcaagagcggctaccaccccaccaagagccacagcttcagagccatgtgccagaacggcaagctggtgtaccccagctgcgaggagaagtag

SEQ ID NO: 158332 - protein, 685 aa, Artificial Sequence
  derived and/or modified sequence
MWLKLFFLLLYFLVLFVLARFFEAIVWYETGIFATQLVDPVALSFKKLKTILECRGLGYSGLPEKKDVRELVEKSGDLMEGELYSALKEEEASESVSSTNFSGEMHFYELVEDTKDGIWLVQVIANDRSPLVGKIHWEKMVKKVSRFGIRTGTFNCSSDPRYCRRRGWVRSTLIMSVPQTSTSKGKVMLKEYSGRKIEVEHIFKWITAHAASRIKTIYNAEHLKEEWNKSDQYWLKIYLFANLDQPPAFFSALSIKFTGRVEFIFVNVENWDNKSYMTDIGIYNMPSYILRTPEGIYRYGNHTGEFISLQAMDSFLRSLQPEVNDLFVLSLVLVNLMAWMDLFITQGATIKRFVVLISTLGTYNSLLIISWLPVLGFLQLPYLDSFYEYSLKLLRYSNTTTLASWVRADWMFYSSHPALFLSTYLGHGLLIDYFEKKRRRNNNNDEVNANNLEWLSSLWDWYTSYLFHPIASFQNFPVESDWDEDPDLFLERLAFPDLWLHPLIPTDYIKNLPMWRFKCLGVQSEEEMSEGSQDTENDSESENTDTLSSEKEVFEDKQSVLHNSPGTASHCDAEACSCANKYCQTSPCERKGRSYGSYNTNEDMEPDWLTWPADMLHCTECVVCLENFENGCLLMGLPCGHVFHQNCIVMWLAGGRHCCPVCRWPSYKKKQPYAQHQPLSNDVPS

SEQ ID NO: 158333 - protein, 359 aa, Artificial Sequence
  derived and/or modified sequence
MRSIRKRWTICTISLLLIFYKTKEIARTEEHQETQLIGDGELSLSRSLVNSSDKIIRKAGSSIFQHNVEGWKINSSLVLEIRKNILRFLDAERDVSVVKSSFKPGDVIHYVLDRRRTLNISHDLHSLLPEVSPMKNRRFKTCAVVGNSGILLDSECGKEIDSHNFVIRCNLAPVVEFAADVGTKSDFITMNPSVVQRAFGGFRNESDREKFVHRLSMLNDSVLWIPAFMVKGGEKHVEWVNALILKNKLKVRTAYPSLRLIHAVRGYWLTNKVPIKRPSTGLLMYTLATRFCDEIHLYGFWPFPKDLNGKAVKYHYYDDLKYRYFSNASPHRMPLEFKTLNVLHNRGALKLTTGKCVKQ

SEQ ID NO: 158334 - protein, 168 aa, Artificial Sequence
  derived and/or modified sequence
MRSIRKRWTICTISLLLIFYKTKEIARTEEHQETQLIGDGELSLSRSLVNSSDKIIRKAGSSIFQHNVEGWKINSSLVLEIRKNILRFLDAERDVSVVKSSFKPGDVIHYVLDRRRTLNISHDLHSLLPEVSPMKNRRFKTCAVVGNSGILLDSECGKEIDSHNFVIR

SEQ ID NO: 158335 - DNA, 3585 bp, Artificial Sequence
  derived and/or modified sequence
gctgcagaagctgccgccacctccaatgcacaaggtgtctcatctgaaaagaaacctgagccccagggaggcggcgcggagcgaccctggcagagctggcgcaaacagggcgagaggtcgctgggcagcgttcgaggaccagagggagctcggccacagaagaccccagtgatctgatcccgggatcccggctccaagctctcctcgcattttacagatttcacccccgcgactatctccccaaaacggagcctttatatcaagagaaggtgcgggagctggggcaaccaggactttctcgggcacccaagatgcgctccattaggaagaggtggacgatctgcacaataagtctgctcctgatcttttataagacaaaagaaatagcaagaactgaggagcaccaggagacgcaactcatcggagatggtgaattgtctttgagtcggtcacttgtcaatagctctgataaaatcattcgaaaggctggctcttcaatcttccagcacaatgtagaaggttggaaaatcaattcctctttggtcctagagataaggaagaacatacttcgtttcttagatgcagaacgagatgtgtcagtggtcaagagcagttttaagcctggtgatgtcatacactatgtgcttgacaggcgccggacactaaacatttctcatgatctacatagcctcctacctgaagtttcaccaatgaagaatcgcaggtttaagacctgtgcagttgttggaaattctggcattctgttagacagtgaatgtggaaaggagattgacagtcacaattttgtaataaggtgtaatctagctcctgtggtggagtttgctgcagatgtgggaactaaatcagattttattaccatgaatccatcagttgtacaaagagcatttggaggctttcgaaatgagagtgacagagaaaaatttgtgcatagactttccatgctgaatgacagtgtcctttggattcctgctttcatggtcaaaggaggagagaagcacgtggagtgggttaatgcattaatccttaagaataaactgaaagtgcgaactgcctatccgtcattgagacttattcatgctgtcagaggttactggctgaccaacaaagttcctatcaaaagacccagcacaggtcttctcatgtatacacttgccacaagattctgtgatgaaattcacctgtatggattctggcccttccctaaggatttaaatggaaaagcggtcaaatatcattattatgatgacttaaaatataggtacttttccaatgcaagccctcacagaatgccattagaattcaaaacattaaatgtgctacataatagaggagctctaaaactgacaacaggaaagtgtgtaaagcaataaagcacattttgaaacaaacaatatgcacttcttttctgaagatgcttccgaagatttgaaaataggatccaaaacacggctgggtttcagcatccaccaatgaactgaaaggtgaataaaggacgttcatgagaaatcgactaccagctgatgaaatacctgcaaagtgctctaaaaattaaatattttgactttaagggtcctagtaagtgccacttccactaagaatacagtttgaatgtataatcagtagtgtttacaagatccaacagtgcactcatcattagttaacaaagcaaatatgttcatcactgtcaggctgcccacagcaacaccaagcatattagaagaggaaccccaggaacgcaactcagaccttgggaaattaaaccatccttgtcagcagaagccaagatggaagcagtttgagcaatgaaatccgtaagattaaacaactcaagtaaatgcttcagtcaggactctgagtctgatcatgaattttatgttttaatttatgttttttttttgtcttctggaatctcttttggtttggatattgggatgcttagaaatcctttctgagatgcatatgagtgaggaaataaactttaagtaattatttttaaagttcttatactttttaaaagctatcacacaaagacttttttttttttttttgtctcgctctgttgcccaggctggagtacagtggcgcgatctcagctcactgcaagctccgcctcccaagttcactccattctcctgcctcagcctccggagtagctgggactgcaggcgcctgccaccacgcctggctaattttttgtatttttagtggagacggattttcaccgtgttagccaggatggtctcaatctcctgacctcgtgatccacccgccttggcctcccaaagtgctgggattacaggcgtgagccaccgtgcctggccgacatttttaaaaaagttttattttgcacggctctaaacctccatgttattttccagtggtgtagaaggtaccagctaaagtgaaccactatgtaatattaggccattctaaaggaaagatgttccatgtcatcagagatggtaaaataggccgggaaaaaaaaatctttggtaccaaagattacacttgtgtttctacacagcaaaccatttttctttcatgaaaataatatattattaacatgaatatattattttgctattaatgtgaaagttgtctctaaatattttttaattttcaaactcatactttattttcatttgaaatgtttttcacaccttttgcattacataataattttgtggaagcattttgccctttagaataaatattagattgatatagctgaaatgtgacttccagttctttgatattccccttgttattcaaatagaaatatggaaatgctttatatattactgttaaatttcttagtgcagaaataacattattaatagagtattgttttcaaaacagagatgattaatttcaagaggtttaacagtgaaattgtgtcaatattttgcatttaaaatgaatttaattgaccgatattttctgtagttaaatttagtcacaatatcacatatgttcttcaagaaacacatgaaattattaataaagtaattaaaaaatttttaatgtataacagaattgaccaataggccagttttctggtaacttatgatagtagattgtttctttagaaactgggcagaagctctgcattctcacttgtactttgatttcttatttcttgggcaggcaatttgaggaaagaagaaatggcatggggaatatatatgttttgtttcttagggaaaacagtctgagaaatgaataaaaagcatgaagtacgtgtgtgtgtgtgtgtgttaccatggaaaaggatattcacagtagtacagttctcaatatttttaattagatgtcatatttttttaatatagtaaaaccttgggatatagaatattacatcttttgagaatgtatgtgtctctaagtaagtaaaatctaatgcgtataggagactgatagctaaaaatgaatggaacattaatgtacttttataattaaacctcttatctatcagaaattgtaagagaatagatacatgttttgaatgtaaagttgaaaagtctggtttacttaataaattgaaagtgatttataaaatctaaa

SEQ ID NO: 158336 - DNA, 1080 bp, Artificial Sequence
  derived and/or modified sequence
atgcgaagtattaggaaaaggtggacaatctgtacaatctctctgctactgattttctataagacgaaagagatcgccaggaccgaagagcaccaggagactcagttgataggtgacggcgagctgagcctctctcgctcacttgtcaacagctctgataagatcatcagaaaagcagggtcttccattttccagcacaatgtggagggctggaagattaatagcagcttggtcctcgaaattaggaagaacatcctcagattcctggatgccgaaagagatgtgtctgtcgtgaaatcctcctttaagcccggcgacgtgatccactacgttctggatcgcagaagaactctgaatatttcacacgatctccactcccttctgccggaagtgtccccaatgaagaatcggcggttcaagacgtgtgccgtcgtggggaatagtgggatccttctcgacagtgagtgcggaaaagagattgattctcacaactttgtgatcaggtgtaacttggctccggtagtggaatttgccgcggacgtgggaacaaaatcagatttcatcaccatgaacccaagtgtggtacagagagcctttggggggttccggaatgagtcagatagggagaagtttgtacaccggctgtcaatgctaaatgactcagtcctctggattcccgcttttatggtcaaggggggggagaagcatgtggagtgggtgaacgctctcatcctcaaaaacaagcttaaggtcaggactgcatatccgagtctgaggttaatacatgctgtgcgtggctattggctcacaaataaggttcccatcaagcggccttcaaccggcctccttatgtacactctggccaccaggttttgtgatgaaattcatctgtacggattttggccgttccccaaggacctgaacggcaaggcagtcaaataccattattatgacgatctgaagtaccgatacttctcaaacgcgagtcctcatcgtatgcctctagagtttaaaaccttaaatgttctccacaaccgaggggcattaaagcttactaccggtaaatgcgtgaagcaatag

SEQ ID NO: 158337 - DNA, 1080 bp, Artificial Sequence
  derived and/or modified sequence
atgaggagcatcaggaagcgctggaccatctgcaccatcagcctgctgctgatcttctacaagaccaaggagatcgccaggacagaggagcaccaggagacccagctgattggagatggagagctgagcctgagccgcagcctggtgaacagcagtgacaagatcatcaggaaggccggcagcagcatcttccagcacaacgtggagggctggaagatcaacagcagcctggtgctggagatcaggaagaacatcctgcgcttcctggatgctgagagagatgtgtctgtggtgaagagcagcttcaagccaggagatgtgatccactacgtgctggacagaagaaggaccctgaacatcagccatgacctgcacagcctgctgcctgaggtgagccccatgaagaacagacgcttcaagacctgtgctgtggtgggcaacagcggcatcctgctggacagtgaatgtgggaaggagattgacagccacaactttgtgatccgctgcaacctggcccctgtggtggagtttgctgctgatgtgggcaccaagagtgacttcatcaccatgaaccccagcgtggtgcagagggcctttggaggcttcagaaatgaaagtgaccgggagaagtttgtgcaccggctgtccatgctgaatgattctgtgctgtggatcccagccttcatggtgaagggcggggagaagcacgtggagtgggtgaatgccctgatcctgaagaacaagctgaaggtgaggacagcctaccccagcctgcggctcatccatgctgtgcggggctactggctgaccaacaaggtgcccatcaagaggcccagcacaggcctgctgatgtacaccctggccacccgcttctgtgatgagatccacctgtatggcttctggcccttccccaaggacctgaatggcaaggctgtgaagtaccactactatgatgacctgaagtaccgctacttcagcaatgccagcccccacaggatgcccctggagttcaagaccctgaatgtgctgcacaacagaggagccctgaagctgaccactggaaaatgtgtgaagcagtag

SEQ ID NO: 158338 - DNA, 1080 bp, Artificial Sequence
  derived and/or modified sequence
atgcggagcatccggaagcggtggaccatctgcaccatcagcctgctgttgattttctacaagactaaagagattgcccggacggaagagcatcaggagacacaattaatcggcgatggagagctctcactgagtagaagtctagtcaactcttctgacaagatcatccgaaaggcaggatcttctatctttcagcataatgtggagggctggaaaatcaactcatcgctggtgctcgagattcgaaaaaatatcctacgctttttagacgcagagcgtgacgtgtccgttgtgaagtcttcctttaaaccaggggacgtcatccactacgtattggaccggcgcaggaccctgaatatcagccatgacctgcacagccttctgccagaggtgtcccctatgaagaatcgcagatttaaaacatgtgcagtggtcggaaattccggtatcctgttggacagtgagtgcggcaaggagatcgattcccataacttcgtgatcaggtgtaacctggcaccagtcgtggagtttgctgccgatgttggcactaaatctgattttattactatgaatccatccgttgtgcaacgtgccttcggcggcttcaggaacgagagcgatcgggaaaagtttgtccaccggttatcgatgttaaatgattcggtcctttggatccctgcgttcatggtaaaggggggagaaaaacacgtggagtgggtgaatgcactgatcctcaaaaataaattgaaagtaaggacagcttacccatcactgcgactgattcatgcggtccggggctactggctgactaataaggtcccaatcaaacgcccaagcactggcctgctgatgtacactctggctacgcggttctgcgacgagatccacctgtacgggttttggccattcccaaaggacctaaacggaaaagccgtgaagtatcactactatgacgacttgaaatacaggtactttagtaatgcctctcctcaccgaatgccgttggagtttaagactcttaatgtcctccataacagaggggcccttaagctaacaaccggaaaatgtgtgaaacagtag

SEQ ID NO: 158339 - DNA, 1080 bp, Artificial Sequence
  derived and/or modified sequence
atgagatcaataaggaaaagatggacaatttgcaccatatcactcctacttatcttctacaaaaccaaagaaatcgccaggaccgaggagcaccaggaaactcagctgattggcgatggggagctctctctgtccagatccttagtcaacagctctgataagatcatccgaaaagccggatcgagtatattccaacacaatgtggaaggctggaaaatcaactcctccctagtattggaaatccgaaaaaatatcttgcgatttcttgatgcagaaagggatgtgagcgtagtgaagtcatcctttaagcctggggacgtaatacactacgttctggaccggaggcggactttaaacatctcgcatgatctgcacagccttctccccgaggtgagccctatgaaaaaccgaagatttaagacatgtgcagtcgtgggcaattcgggcatcttactcgattctgagtgtgggaaggagatcgattctcacaactttgtaattcgatgcaatctcgccccagtggttgaattcgctgccgacgtcgggacgaagtctgatttcattactatgaatccctcggtggtgcagagggccttcggaggattccgaaatgaaagtgatcgagagaagttcgtgcacaggttatccatgctgaacgattccgtactgtggatccctgccttcatggtcaaaggcggagaaaagcacgtggaatgggttaacgccctaatcctgaaaaacaagctgaaggtcaggaccgcttatccctcccttagactgatccacgccgttaggggctactggcttaccaacaaagtccctataaaaaggccttcgactggccttttaatgtatactctcgcgacacggttttgcgacgagatccatttgtacgggttttggccttttcccaaagatctgaatggcaaggctgtcaagtatcactactacgatgatctaaagtatagatacttcagcaacgctagccctcatcggatgccgctggagtttaaaactctaaatgtcctgcacaacagaggcgcactcaagctgaccactggcaagtgtgttaaacagtag

SEQ ID NO: 158340 - DNA, 1080 bp, Artificial Sequence
  derived and/or modified sequence
atgagaagcatcagaaagagatggaccatctgcaccatcagcctgctgctgatcttctacaagaccaaggagatcgccagaaccgaggagcaccaggagacccagctgatcggcgacggcgagctgagcctgagcagaagcctggtgaacagcagcgacaagatcatcagaaaggccggcagcagcatcttccagcacaacgtggagggctggaagatcaacagcagcctggtgctggagatcagaaagaacatcctgagattcctggacgccgagagagacgtgagcgtggtgaagagcagcttcaagcccggcgacgtgatccactacgtgctggacagaagaagaaccctgaacatcagccacgacctgcacagcctgctgcccgaggtgagccccatgaagaacagaagattcaagacctgcgccgtggtgggcaacagcggcatcctgctggacagcgagtgcggcaaggagatcgacagccacaacttcgtgatcagatgcaacctggcccccgtggtggagttcgccgccgacgtgggcaccaagagcgacttcatcaccatgaaccccagcgtggtgcagagagccttcggcggcttcagaaacgagagcgacagagagaagttcgtgcacagactgagcatgctgaacgacagcgtgctgtggatccccgccttcatggtgaagggcggcgagaagcacgtggagtgggtgaacgccctgatcctgaagaacaagctgaaggtgagaaccgcctaccccagcctgagactgatccacgccgtgagaggctactggctgaccaacaaggtgcccatcaagagacccagcaccggcctgctgatgtacaccctggccaccagattctgcgacgagatccacctgtacggcttctggcccttccccaaggacctgaacggcaaggccgtgaagtaccactactacgacgacctgaagtacagatacttcagcaacgccagcccccacagaatgcccctggagttcaagaccctgaacgtgctgcacaacagaggcgccctgaagctgaccaccggcaagtgcgtgaagcagtag

SEQ ID NO: 158341 - protein, 189 aa, Artificial Sequence
  derived and/or modified sequence
MSAAMRERFDRFLHEKNCMTDLLAKLEAKTGVNRSFIALGVIGLVALYLVFGYGASLLCNLIGFGYPAYISIKAIESPNKEDDTQWLTYWVVYGVFSIAEFFSDIFLSWFPFYYMLKCGFLLWCMAPSPSNGAELLYKRIIRPFFLKHESQMDSVVKDLKDKAKETADAITKEAKKATVNLLGEEKKST

SEQ ID NO: 158342 - protein, 131 aa, Artificial Sequence
  derived and/or modified sequence
MSAAMRERFDRFLHEKNCMTDLLAKLEAKTGVNRSFIALGVIGLVALYLVFGYGASLLCNLIGFGYPAYISIKAIESPNKEDDTQWLTYWVVYGVFSIAEFFSDIFLSWFPFYYMLKVWSGLGFLLPRCLL

SEQ ID NO: 158343 - DNA, 570 bp, Artificial Sequence
  derived and/or modified sequence
atgtcagccgctatgagagaacgctttgacaggttcctccatgaaaagaattgtatgaccgatctcctcgccaagctggaggctaagacaggggtcaacagaagttttattgccctaggcgtcatcgggcttgtggcgctgtatctggtgttcggatatggagcgagcctcttgtgcaaccttatcgggtttggctaccctgcttatatctccataaaagcaatcgagagtcctaataaggaggacgatacacagtggctgacttattgggttgtctacggcgtattttcaatcgcagaatttttcagtgacatttttctgtcatggttccccttttattacatgttgaaatgtgggttcttactgtggtgcatggccccatcaccgtccaatggagctgaacttctctacaagaggattatccggcctttttttctgaagcatgaaagtcagatggattcagtcgtgaaggaccttaaggacaaggcaaaagagacagccgacgcaattacaaaggaagccaaaaaagctacagtgaacttgctcggagaagagaaaaaatctacatag

SEQ ID NO: 158344 - DNA, 396 bp, Artificial Sequence
  derived and/or modified sequence
atgtccgccgctatgcgcgagcggtttgaccggttcttgcacgaaaaaaactgtatgacggacctgctggctaagctcgaggcaaagacgggagtcaataggagctttatagcactgggcgtgataggacttgtggcgctttaccttgtctttggatatggggcttctctgctctgcaacctcattggtttcggctatccggcttacatctccatcaaggctattgagagtccgaataaggaggacgatacacagtggctgacctattgggtggtctatggcgtcttttccattgccgagtttttcagtgacatctttcttagttggtttcccttctactatatgctcaaggtgtggtctgggctcggattcttgctccctagatgcctgctgtag

SEQ ID NO: 158345 - DNA, 570 bp, Artificial Sequence
  derived and/or modified sequence
atgtctgctgccatgagggagagatttgaccgcttcctgcacgagaagaactgcatgacagacctgctggccaagctggaggccaagacaggagtgaacagaagcttcatcgccctgggcgtcatcggcctggtggccctgtacctggtgtttggctatggagccagcctgctgtgcaacctgattggcttcggctacccagcctacatcagcatcaaggccatcgagagccccaacaaggaggatgacacccagtggctgacctactgggtggtgtatggagtcttcagcattgctgagttcttcagtgacatcttcctgtcctggttccccttctactacatgctgaagtgtggcttcctgctgtggtgcatggcccccagccccagcaatggagctgagctgctgtacaagaggatcatccggcccttcttcctgaagcatgagagccagatggacagcgtggtgaaggacctgaaggacaaggccaaggagacagcagatgccatcaccaaggaggccaagaaggccaccgtgaacctgctgggggaggagaagaagagcacctag

SEQ ID NO: 158346 - DNA, 396 bp, Artificial Sequence
  derived and/or modified sequence
atgtctgctgccatgagggagagatttgaccgcttcctgcacgagaagaactgcatgacagacctgctggccaagctggaggccaagacaggagtgaacagaagcttcatcgccctgggcgtcatcggcctggtggccctgtacctggtgtttggctatggagccagcctgctgtgcaacctgattggcttcggctacccagcctacatcagcatcaaggccatcgagagccccaacaaggaggatgacacccagtggctgacctactgggtggtgtatggagtcttcagcattgctgagttcttcagtgacatcttcctgtcctggttccccttctactacatgctgaaggtgtggagcggcctgggcttcctgctgccccgctgcctgctgtag

SEQ ID NO: 158347 - DNA, 570 bp, Artificial Sequence
  derived and/or modified sequence
atgagcgccgccatgcgggagcggttcgaccggttcctgcacgagaagaactgcatgactgacttgctcgctaagctggaggctaaaacaggcgtcaatcgctcattcatcgccctcggtgtgatcgggctagtggcactgtacctggtcttcggatatggggcctccctcctgtgcaatcttattggctttggttaccccgcgtatataagcattaaggccatcgaatctcccaataaggaagatgacactcagtggctgacatattgggttgtttatggggtgttcagcatcgcggaatttttttccgatatttttttgagttggttccccttctattacatgctcaagtgcggtttcctgctgtggtgtatggctccatcaccctctaacggtgctgaactgctgtataaaaggattattcggccattttttctgaagcacgagtcacaaatggactcagtggtgaaggacttgaaagacaaggcaaaggaaacagctgatgccataaccaaagaagccaagaaggctacggtgaacctgctgggtgaagagaagaaatcaacatag

SEQ ID NO: 158348 - DNA, 396 bp, Artificial Sequence
  derived and/or modified sequence
atgagcgccgccatgcgggagcggttcgaccggttcctgcacgagaaaaactgcatgactgacttactagcgaaactcgaggccaaaacaggagtcaacaggtcctttatcgccttgggcgtgatcggtctggtggccctgtatttagtgttcgggtatggggcaagcctgctgtgcaacttgattgggtttggatatcctgcctatatctccattaaggccattgagtctccaaataaagaggatgacacacagtggctcacttattgggttgtgtacggagtatttagtattgctgagttttttagcgacatattcctgtcttggtttcctttctactatatgcttaaggtgtggtcagggctgggtttcctacttccacgctgcttattatag

SEQ ID NO: 158349 - DNA, 570 bp, Artificial Sequence
  derived and/or modified sequence
atgagtgccgcaatgcgtgaacggttcgaccgtttcctccatgagaaaaattgcatgacggatctcctggccaaactagaggccaagaccggcgtaaaccgatccttcattgctctgggggtcattggactcgtcgccctctacttagtcttcgggtatggggcatcacttctgtgcaatctcatcggattcggctaccccgcttatatctcaattaaggcaatcgagtcaccaaacaaagaggacgacacccagtggttgacctactgggtggtctacggcgtcttctccattgccgagttcttttcagatatctttctgagttggtttccgttttactacatgcttaaatgtggattcttgctttggtgcatggccccatcaccaagtaacggcgcagaacttttgtacaaacggattatcaggccctttttcttgaaacacgaaagccagatggacagtgtagtaaaggacttaaaagataaagccaaggagaccgccgatgcgattactaaagaggccaaaaaggccacggtaaatctactcggtgaagagaaaaagtccacatag

SEQ ID NO: 158350 - DNA, 396 bp, Artificial Sequence
  derived and/or modified sequence
atgtccgccgctatgagggagaggtttgatcgtttcttgcacgaaaaaaactgtatgacggacttgctcgccaagctggaggctaaaacaggagtcaatcgctcctttatcgctctgggcgtgatcgggctggtcgcactttatctggtttttggatatggcgcttcgctcctttgcaacttgattggtttcggttaccctgcctacatttctatcaaagctatcgaaagccctaataaggaggacgatactcagtggttgacctattgggtggtctatggcgtgttctctatcgcagaattcttctcagatattttcctcagttggtttccattctattatatgctgaaggtgtggtcaggattgggttttctcctgcccaggtgtcttctgtag

SEQ ID NO: 158351 - DNA, 3318 bp, Artificial Sequence
  derived and/or modified sequence
gtccgatttgagaaggggacccacgagagacacaaaatgcacgcccccacgccacatcctttttaccccgcaatgggttaagactgtcaacaggcaggccacctcgcagcgtccgcggagttgcaggcccgcccccgccagggtgtggcgctgtccccctggcgctgggcgggggaggaggggcgcgcggcggccgaggaggggcgcgcggcggccgggcggggcgagcggaggcgagtggaggacgcgtagacgcgccgcggtccccgcctgccgctgctccgccgcagtcgccgctccagtctatccggcactaggaacagccccgagcggcgagacggtccccgccatgtctgcggccatgagggagaggttcgaccggttcctgcacgagaagaactgcatgactgaccttctggccaagctcgaggccaaaaccggcgtgaacaggagcttcatcgctcttggtgtcatcggactggtggccttgtacctggtgttcggttatggagcctctctcctctgcaacctgataggatttggctacccagcctacatctcaattaaagctatagagagtcccaacaaagaagatgatacccagtggctgacctactgggtagtgtatggtgtgttcagcattgctgaattcttctctgatatcttcctgtcatggttccccttctactacatgctgaagtgtggcttcctgttgtggtgcatggccccgagcccttctaatggggctgaactgctctacaagcgcatcatccgtcctttcttcctgaagcacgagtcccagatggacagtgtggtcaaggaccttaaagacaaggccaaagagactgcagatgccatcactaaagaagcgaagaaagctaccgtgaatttactgggtgaagaaaagaagagcacctaaaccagactggatggaaacttcctgccctctctgtaccttcctactggagcttgatgttatattagggactgtggtataattattttaataatgttgccttggaaacatttttgagatattaaagattggaatgtgttgtaagtttctttgcttacttttactgtctatatatatagggagcactttaaacttaatgcagtgggcagtgtccacgtttttggaaaatgtattttgcctctgggtaggaaaagatgtatgttgctatcctgcaggaaatataaacttaaaataaaattatataccccacaggctgtgtactttactgggctctccctgcacgcattttctctgtagttacatttaggataatctttatggttctacttcctgtaatgtacaattttatataattctgaaatgtttttaatgtatttgtgcacatgtacatatggaaatgttactgtctgactacaacatgcatcatgctcatggggagggagcaggggaaggttgtatgtgtcatttataacttctgtacagtaagaccacctgccaaaagctggaggaaccattgtgctggtgtggtctactaaataatactttaggaaatacgtgattaatatgcaagtgaacaaagtgagaaatgaaatcgaatggagattggcctggttgtttccgtagtatatggcatatgaataccaggatagctttataaagcagttagttagttagttactcactctagtgataaatcgggaaatttacacacacacacacacacacacacacacacacacacacacagagtaacctgtaactctcaattccctgaaaaactagtaatactgtcttatctgctataaactttacatatttgtctattgtcaagatgctacaatggaaaccatttctggttttatcttcaaagcggagaaacatgttgatttagtcttctttcccaatcttcttttttaaaccagtttaaggaacttctgaagatttgtccacctctgattacatgtatgttcttgtttgtatcattagcaacaacatgctaatgacgacacctagctctaagagcaattctgggagaatgaaaggaagtataaagtaacccataatctgcttggcaatagttaagtcaatctatcttcagtttttctctggcctttaaggtcaaacacaagaggcttccctagtttacaagtcagagtcacttgtagtccatttaaatgccctcatccgtattctttgtgttgataagctgcacatgactacatagtaagtacagaacagtaaagttaaaacggatgtctccattgatctgccaaatcgttatagagagcaatttgtctggactagaaaatctgagttttacaccatactgttaagagtccttttgaattaaactcgactaaaacaagtgtataactaaactaacaagattaaatatccagccagtacagtattttttaaggcaaataaagatgattagctcaccttgagataacaatcaggtaagatcataacaatgtctcatgatgtaaaaaatattaaagatatcaatactaagtgacagtatcactctaatataatatggatcagagcatttattttggggaggaaaacagtggtgattaccggcattttattaaacttaaaactttgtagaaagcaaacaaaattgttcttgggagaaaatcaacttttagattaaaaaaattttaagtatctaggagtatttaaatccttttcccataaataaaagtacagttttcttggtggcagaatgaaaatcagcaacttctagcatatagactatataatcagattgacagcatatagaatatattatcagacaagatgaggaggtacaaaagttactattgctcataatgacttacaggctaaaattagttttaaaatactatattaaattctgaatgcaatttttttttgttcccttgagaccaaaatttaagttaactgttgctggcagtctaagtgtaaatgttaacagcaggagaagttaagaattgagcagttctgttgcatgatttcccaaatgaaatactgccttggctagagtttgaaaaactaattgagcctgtgcctggctagaaaacaagcgtttatttgaatgtgaatagtgtttcaaaggtatgtagttacagaattcctaccaaacagcttaaattcttcaagaaagaattcctgcagcagttattcccttacctgaaggcttcaatcatttggatcaacaactgctactctcgggaagactcctctactcacagctgaagaaaatgagcacacccttcacactgttatcacctatcctgaagatgtgatacactgaatggaaataaatagatgtaaataaaattgagttctcattt

SEQ ID NO: 158352 - DNA, 570 bp, Artificial Sequence
  derived and/or modified sequence
atgagcgccgccatgagagagagattcgacagattcctgcacgagaagaactgcatgaccgacctgctggccaagctggaggccaagaccggcgtgaacagaagcttcatcgccctgggcgtgatcggcctggtggccctgtacctggtgttcggctacggcgccagcctgctgtgcaacctgatcggcttcggctaccccgcctacatcagcatcaaggccatcgagagccccaacaaggaggacgacacccagtggctgacctactgggtggtgtacggcgtgttcagcatcgccgagttcttcagcgacatcttcctgagctggttccccttctactacatgctgaagtgcggcttcctgctgtggtgcatggcccccagccccagcaacggcgccgagctgctgtacaagagaatcatcagacccttcttcctgaagcacgagagccagatggacagcgtggtgaaggacctgaaggacaaggccaaggagaccgccgacgccatcaccaaggaggccaagaaggccaccgtgaacctgctgggcgaggagaagaagagcacctag

SEQ ID NO: 158353 - DNA, 396 bp, Artificial Sequence
  derived and/or modified sequence
atgagcgccgccatgagagagagattcgacagattcctgcacgagaagaactgcatgaccgacctgctggccaagctggaggccaagaccggcgtgaacagaagcttcatcgccctgggcgtgatcggcctggtggccctgtacctggtgttcggctacggcgccagcctgctgtgcaacctgatcggcttcggctaccccgcctacatcagcatcaaggccatcgagagccccaacaaggaggacgacacccagtggctgacctactgggtggtgtacggcgtgttcagcatcgccgagttcttcagcgacatcttcctgagctggttccccttctactacatgctgaaggtgtggagcggcctgggcttcctgctgcccagatgcctgctgtag

SEQ ID NO: 158354 - protein, 331 aa, Artificial Sequence
  derived and/or modified sequence
MRFRFGVVVPPAVAGARPELLVVGSRPELGRWEPRGAVRLRPAGTAAGDGALALQEPGLWLGEVELAAEEAAQDGAEIGATPKLPSTIFPWFVLRQGLILGNGPHHDRCCTYNENNLVDGVYCLPIGHWIEATGHTNEMKHTTDFYFNIAGHQAMHYSRILPNIWLGSCPRQVEHVTIKLKHELGITAVMNFQTEWDIVQNSSGCNRYPEPMTPDTMIKLYREEGLAYIWMPTPDMSTEGRVQMLPQAVCLLHALLEKGHIVYVHCNAGVGRSTAAVCGWLQYVMGWNLRKVQYFLMAKRPAVYIDEEALARAQEDFFQKFGKVRSSVCSL

SEQ ID NO: 158355 - protein, 331 aa, Artificial Sequence
  derived and/or modified sequence
MRFRFGVVVPPAVAGARPELLVVGSRPELGRWEPRGAVRLRPAGTAAGDGALALQEPGLWLGEVELAAEEAAQDGAEPGRVDTFWYKFLKREPGGELSWEGNGPHHDRCCTYNENNLVDGVYCLPIGHWIEATGHTNEMKHTTDFYFNIAGHQAMHYSRILPNIWLGSCPRQVEHVTIKLKHELGITAVMNFQTEWDIVQNSSGCNRYPEPMTPDTMIKLYREEGLAYIWMPTPDMSTEGRVQMLPQAVCLLHALLEKGHIVYVHCNAGVGRSTAAVCGWLQYVMGWNLRKVQYFLMAKRPAVYIDEEALARAQEDFFQKFGKVRSSVCSL

SEQ ID NO: 158356 - DNA, 996 bp, Artificial Sequence
  derived and/or modified sequence
atgaggttcaggtttggtgtcgtggttccaccagccgtggctggagcaagaccagaactcctggttgtgggtagcagacccgagcttggtcgatgggagcctcggggagccgtccggctgcgcccagccgggacagccgccggagatggtgcattggcgctgcaagagcccggcctttggctgggtgaggtggagctggccgccgaggaagccgctcaagacggcgctgaaattggagctaccccgaagttgccctctacaatatttccttggtttgtgctgcgacaaggcctgattctagggaacggtccacaccatgatagatgctgcacttataatgagaacaatcttgttgatggcgtgtattgcctgcctatcgggcattggatcgaggctaccggacatacaaatgagatgaaacataccactgatttctactttaacatagcagggcatcaagccatgcactactctcggatcctgccaaacatctggttggggtcctgccctaggcaggtggagcacgtgactattaagctcaagcatgagctgggtattactgcagtcatgaatttccagactgagtgggatatcgtccagaatagttccggatgcaacagataccctgagccaatgactcccgacacaatgataaagctgtatcgcgaagaaggcctggcgtacatctggatgccaactccggacatgtctacagaaggtagagttcagatgttgccccaggcggtgtgtctcttacacgctctcctagaaaaaggccatattgtctacgtccattgcaacgccggggtgggccggagcaccgccgccgtatgcggatggctccagtatgtcatggggtggaatctgaggaaagtacagtacttcctgatggccaagcgaccagccgtatacatcgatgaagaagcgctggcaagggcccaggaggatttcttccagaagttcggcaaggtcaggagctccgtgtgctcactgtag

SEQ ID NO: 158357 - DNA, 996 bp, Artificial Sequence
  derived and/or modified sequence
atgagattccggttcggcgtggttgtcccccccgctgtggccggagcacggcctgagctactcgttgtggggtcccgtccagagttggggaggtgggagccacgaggggctgtgaggctgcgccccgctgggaccgctgcaggagacggcgcactagctctacaggagcccgggctgtggctcggcgaagtcgagttagccgccgaggaggcagcccaggatggggctgagcctggcagggtagataccttttggtacaagttcctgaagcgcgaacctggtggcgaactaagctgggaggggaacggacctcatcatgacagatgttgcacctacaacgagaacaatctcgtagacggcgtctactgtctcccgatcggccactggattgaggcaaccggtcatacgaacgaaatgaagcacaccacagacttttattttaacattgccggccatcaggctatgcactattctcgcatactccccaacatttggctgggctcttgccccaggcaggtcgagcacgtgactattaagctgaagcacgagcttggcattactgccgtaatgaattttcagaccgaatgggacatcgtgcagaacagctctgggtgcaacagataccctgaaccaatgaccccagatacaatgattaagctctacagagaagagggtctggcttacatctggatgccaacccccgacatgtccactgagggacgagtgcaaatgctacctcaggccgtatgcctgcttcatgccctgctggagaaagggcatattgtctatgtccactgcaacgccggggtgggccgatcaacagctgcagtttgcggctggctgcaatacgtaatggggtggaacttgcggaaggtgcagtattttctcatggccaaaaggcctgcagtgtacatcgacgaggaagcactggctagggcccaagaagatttttttcagaagttcggaaaggttagaagttctgtgtgcagtctttag

SEQ ID NO: 158358 - DNA, 996 bp, Artificial Sequence
  derived and/or modified sequence
atgaggttccgctttggagtggtggtgcccccagctgtggccggggcccggcctgagctgctggtggtgggcagcaggcctgagctgggccgctgggagcccagaggagctgtgcggctgcggcctgctggaacagctgctggagatggagccctggccctgcaggagcccggcctgtggctgggggaggtggagctggccgctgaggaggccgcccaggatggagctgagatcggggccacccccaagctgcccagcaccatcttcccctggtttgtgctgcggcagggcctcatcctgggcaatggcccccaccacgaccgctgctgcacctacaatgaaaacaacctggtggatggagtgtactgcctgcccatcggccactggattgaggccaccggccacaccaatgagatgaagcacaccacagacttctacttcaacattgctggccaccaggccatgcactacagccgcatcctgcccaacatctggctgggcagctgcccccggcaggtggagcacgtgaccatcaagctgaagcatgagctgggcatcacagctgtgatgaacttccagacagagtgggacatcgtgcagaacagcagcggctgcaaccgctacccagagcccatgaccccagacaccatgatcaagctgtaccgggaggagggcctggcctacatctggatgcccaccccagacatgagcacagagggccgggtgcagatgctgccccaggccgtgtgcctgctgcacgccctgctggagaagggccacatcgtgtatgtgcactgcaatgctggggtgggccgcagcacagctgctgtgtgtggctggctgcagtatgtgatgggctggaacctgaggaaggtgcagtacttcctgatggccaagaggcctgctgtgtacattgatgaggaggccctggcccgggcccaggaggacttcttccagaagtttgggaaggtgcgcagctctgtgtgcagcctgtag

SEQ ID NO: 158359 - DNA, 996 bp, Artificial Sequence
  derived and/or modified sequence
atgaggttccgctttggagtggtggtgcccccagctgtggccggggcccggcctgagctgctggtggtgggcagcaggcctgagctgggccgctgggagcccagaggagctgtgcggctgcggcctgctggaacagctgctggagatggagccctggccctgcaggagcccggcctgtggctgggggaggtggagctggccgctgaggaggccgcccaggatggagctgagcccggccgggtggacaccttctggtacaagttcctgaagcgggagcctggaggagagctgtcctgggagggcaatggcccccaccacgaccgctgctgcacctacaatgaaaacaacctggtggatggagtgtactgcctgcccatcggccactggattgaggccaccggccacaccaatgagatgaagcacaccacagacttctacttcaacattgctggccaccaggccatgcactacagccgcatcctgcccaacatctggctgggcagctgcccccggcaggtggagcacgtgaccatcaagctgaagcatgagctgggcatcacagctgtgatgaacttccagacagagtgggacatcgtgcagaacagcagcggctgcaaccgctacccagagcccatgaccccagacaccatgatcaagctgtaccgggaggagggcctggcctacatctggatgcccaccccagacatgagcacagagggccgggtgcagatgctgccccaggccgtgtgcctgctgcacgccctgctggagaagggccacatcgtgtatgtgcactgcaatgctggggtgggccgcagcacagctgctgtgtgtggctggctgcagtatgtgatgggctggaacctgaggaaggtgcagtacttcctgatggccaagaggcctgctgtgtacattgatgaggaggccctggcccgggcccaggaggacttcttccagaagtttgggaaggtgcgcagctctgtgtgcagcctgtag

SEQ ID NO: 158360 - DNA, 996 bp, Artificial Sequence
  derived and/or modified sequence
atgcggttccggttcggcgtggtggtgccccccgccgtggccggcgcacggcccgagctactcgtcgtgggctcgaggcctgagctgggccgctgggaaccccggggagctgttcgcctgagacccgcaggtaccgcggccggagatggtgccctggccctgcaggaacccggactctggctgggcgaggtggagctcgctgctgaagaagctgctcaggacggcgctgagattggagctacacctaagttaccaagtactattttcccttggttcgtcctgcgccagggtcttatcctcggcaatggaccacaccatgaccgatgctgtacttataacgaaaataatttggtggacggtgtctactgtctccctattgggcactggattgaggccacgggacacaccaacgagatgaagcataccaccgatttctacttcaatatagccggacatcaagcaatgcactactcacgcatcctgccaaatatttggctcggatcgtgtccgaggcaagtcgagcacgtgactatcaagttgaagcacgagctgggaattaccgctgtgatgaatttccaaaccgaatgggacattgttcaaaactcatcaggatgcaaccgctatccagaacctatgacacccgataccatgatcaaattgtaccgcgaggaaggactggcctacatctggatgccgacacccgacatgtctaccgaaggtcgtgtccagatgctcccgcaagcggtatgcctcctccatgccctgctggaaaaagggcacatcgtatacgtccattgcaacgctggtgtgggcaggagcactgctgccgtgtgtggctggctgcagtatgtaatgggctggaatctgcggaaagtacagtattttctaatggccaagcgccccgccgtttatatcgatgaagaggcacttgccagggcgcaggaggacttctttcagaagtttggaaaagtgaggagtagcgtgtgctcgctgtag

SEQ ID NO: 158361 - DNA, 996 bp, Artificial Sequence
  derived and/or modified sequence
atgcggttccggttcggcgtggtggtgccccccgccgtggccggcgccaggcccgaactgctggtagtgggcagtagaccagaactggggagatgggagccgcgaggcgccgtccgactcaggcccgcagggaccgcagctggagacggggcccttgctctccaggagccgggactgtggctgggggaggttgaactggctgctgaggaggctgcccaggacggggctgagccaggcagagtggacacgttctggtataaattcctcaaacgggagccaggtggagagctgtcttgggagggcaacggaccccatcacgataggtgctgcacatacaatgaaaataatctggtagatggcgtgtattgcctaccgatcggacattggatcgaagcaaccgggcacactaacgagatgaagcataccacggatttctacttcaatatcgcggggcaccaggctatgcattacagtcggatcttgccaaacatatggctcggcagttgcccgcgccaagtcgagcacgtgactatcaagctgaaacacgagctgggcatcaccgccgtaatgaactttcaaactgagtgggacattgtacaaaattcaagtggctgtaaccggtacccagaacccatgacccccgatactatgatcaaactgtaccgggaggaaggtctcgcatatatttggatgcctactcccgatatgtcaaccgaaggccgggttcagatgcttccacaggctgtgtgccttctccacgctctgttggaaaagggtcacatcgtctatgtgcattgtaacgctggagtggggcgctcaacagcagccgtctgtgggtggttgcagtacgtgatgggatggaacttgcgcaaggtccagtactttctgatggctaaaagacccgccgtgtacattgacgaggaggcgctggcccgggcacaagaagacttcttccaaaagtttggaaaggtgaggtcaagtgtctgttctctctag

SEQ ID NO: 158362 - DNA, 996 bp, Artificial Sequence
  derived and/or modified sequence
atgcggttcaggttcggcgtggttgtcccccctgccgtcgccggagcacgtccagagcttctggtggtcggctctcgccctgaactaggccgatgggaaccgaggggggctgtcagattgcgccctgcgggaaccgctgcaggggacggcgcactggccttgcaggagcccggattgtggctcggggaagtggagctcgctgccgaggaggccgctcaggacggggctgagatcggggctacacctaagctgccctccacaatattcccatggttcgtgcttagacaggggctgattctcgggaatggccctcatcacgacagatgttgtacctataatgagaacaacctcgtggatggggtgtactgtctgcccatagggcactggattgaagccactggtcatacgaacgaaatgaagcacactacggacttctattttaacatcgctggccatcaggcaatgcattattcccggatcctgcctaatatttggctcgggtcctgtccaaggcaggtggaacatgtaactattaaactcaagcacgaactgggaatcacagccgtgatgaacttccaaactgaatgggacattgtgcaaaacagctcaggctgcaatcgttaccctgagccaatgacccctgatacaatgatcaaactttacagagaagaaggcctcgcctatatctggatgccaacccctgacatgtcaactgagggtagagtccagatgctgccacaggctgtgtgcttactgcatgctctgcttgagaaggggcacatcgtgtacgtgcattgtaatgccggagtcggcagaagtaccgcagccgtgtgtggatggctgcagtatgtcatgggctggaacttgagaaaggtacagtattttttaatggctaaaaggcccgctgtttacatcgatgaggaggctctggcacgcgctcaggaagacttctttcagaagttcggcaaggttcgctcatccgtttgcagcctgtag

SEQ ID NO: 158363 - DNA, 996 bp, Artificial Sequence
  derived and/or modified sequence
atgcggtttaggtttggggtagtcgtgccgccagccgtagccggtgcacggccagagcttctcgtggtgggctcccgccctgagctaggaaggtgggagcctagaggagccgtgaggctgcgacctgctggcacggccgcaggcgacggtgcgctcgccctgcaggagccagggctctggctgggggaggtagaactggccgcagaggaggcagctcaggatggtgctgaacctggacgagtcgatacattctggtacaaattcctcaaaagggagcccggtggggagctcagttgggaggggaacggaccccaccacgatcgatgttgcacatacaatgaaaacaacctggtggatggagtatactgtctgcccattggccactggatagaggctactgggcataccaatgaaatgaagcacaccacagacttctacttcaacatagctggtcatcaggccatgcattactctcgcatccttcccaatatttggttagggtcatgcccgaggcaggtggagcatgtgactatcaaactcaaacacgaactgggtattactgccgtgatgaattttcagaccgagtgggacatagtacagaattcaagcggctgcaaccgctacccggaacctatgacacctgataccatgatcaaattgtatagagaggaaggtctggcatacatttggatgcccacacccgacatgtctacagaggggcgagtacagatgctgcctcaggctgtgtgtttactccacgctctcctggagaaggggcacattgtatacgttcactgcaatgcgggagtgggccgaagcacagccgcagtttgcggatggctccagtatgtcatggggtggaatctgcgcaaggttcaatattttttgatggcaaagcgtcccgcagtttacattgatgaggaggctctggccagagcccaagaagatttttttcagaaattcgggaaagtcagaagttcggtgtgtagcttgtag

SEQ ID NO: 158364 - DNA, 996 bp, Artificial Sequence
  derived and/or modified sequence
atgagattcagattcggcgtggtggtgccccccgccgtggccggcgccagacccgagctgctggtggtgggcagcagacccgagctgggcagatgggagcccagaggcgccgtgagactgagacccgccggcaccgccgccggcgacggcgccctggccctgcaggagcccggcctgtggctgggcgaggtggagctggccgccgaggaggccgcccaggacggcgccgagatcggcgccacccccaagctgcccagcaccatcttcccctggttcgtgctgagacagggcctgatcctgggcaacggcccccaccacgacagatgctgcacctacaacgagaacaacctggtggacggcgtgtactgcctgcccatcggccactggatcgaggccaccggccacaccaacgagatgaagcacaccaccgacttctacttcaacatcgccggccaccaggccatgcactacagcagaatcctgcccaacatctggctgggcagctgccccagacaggtggagcacgtgaccatcaagctgaagcacgagctgggcatcaccgccgtgatgaacttccagaccgagtgggacatcgtgcagaacagcagcggctgcaacagataccccgagcccatgacccccgacaccatgatcaagctgtacagagaggagggcctggcctacatctggatgcccacccccgacatgagcaccgagggcagagtgcagatgctgccccaggccgtgtgcctgctgcacgccctgctggagaagggccacatcgtgtacgtgcactgcaacgccggcgtgggcagaagcaccgccgccgtgtgcggctggctgcagtacgtgatgggctggaacctgagaaaggtgcagtacttcctgatggccaagagacccgccgtgtacatcgacgaggaggccctggccagagcccaggaggacttcttccagaagttcggcaaggtgagaagcagcgtgtgcagcctgtag

SEQ ID NO: 158365 - DNA, 996 bp, Artificial Sequence
  derived and/or modified sequence
atgagattcagattcggcgtggtggtgccccccgccgtggccggcgccagacccgagctgctggtggtgggcagcagacccgagctgggcagatgggagcccagaggcgccgtgagactgagacccgccggcaccgccgccggcgacggcgccctggccctgcaggagcccggcctgtggctgggcgaggtggagctggccgccgaggaggccgcccaggacggcgccgagcccggcagagtggacaccttctggtacaagttcctgaagagagagcccggcggcgagctgagctgggagggcaacggcccccaccacgacagatgctgcacctacaacgagaacaacctggtggacggcgtgtactgcctgcccatcggccactggatcgaggccaccggccacaccaacgagatgaagcacaccaccgacttctacttcaacatcgccggccaccaggccatgcactacagcagaatcctgcccaacatctggctgggcagctgccccagacaggtggagcacgtgaccatcaagctgaagcacgagctgggcatcaccgccgtgatgaacttccagaccgagtgggacatcgtgcagaacagcagcggctgcaacagataccccgagcccatgacccccgacaccatgatcaagctgtacagagaggagggcctggcctacatctggatgcccacccccgacatgagcaccgagggcagagtgcagatgctgccccaggccgtgtgcctgctgcacgccctgctggagaagggccacatcgtgtacgtgcactgcaacgccggcgtgggcagaagcaccgccgccgtgtgcggctggctgcagtacgtgatgggctggaacctgagaaaggtgcagtacttcctgatggccaagagacccgccgtgtacatcgacgaggaggccctggccagagcccaggaggacttcttccagaagttcggcaaggtgagaagcagcgtgtgcagcctgtag

SEQ ID NO: 158366 - DNA, 3100 bp, Artificial Sequence
  derived and/or modified sequence
atgcgcttccgctttggggtggtggtgccacccgccgtggccggcgcccggccggagctgctggtggtggggtcgcggcccgagctggggcgttgggagccgcgcggtgccgtccgcctgaggccggccggcaccgcggcgggcgacggggccctggccctgcaggagccgggcctgtggctcggggaggtggagctggcggccgaggaggcggcgcaggacggggcggagattggggccacccctaagttacccagcaccatctttccttggtttgttttgagacagggtctcattctaggcaatggacctcatcatgaccgttgctgtacttacaatgaaaacaacttggtggatggtgtgtattgtctcccaataggacactggattgaggccactgggcacaccaatgaaatgaagcacacaacagacttctattttaatattgcaggccaccaagccatgcattattcaagaattctaccaaatatctggctgggtagctgccctcgtcaggtggaacatgtaaccatcaaactgaagcatgaattggggattacagctgtaatgaatttccagactgaatgggatattgtacagaattcctcaggctgtaaccgctacccagagcccatgactccagacactatgattaaactatatagggaagaaggcttggcctacatctggatgccaacaccagatatgagcaccgaaggccgagtacagatgctgccccaggcggtgtgcctgctgcatgcgctgctggagaagggacacatcgtgtacgtgcactgcaacgctggggtgggccgctccaccgcggctgtctgcggctggctccagtatgtgatgggctggaatctgaggaaggtgcagtatttcctcatggccaagaggccggctgtctacattgacgaagaggccttggcccgggcacaagaagattttttccagaaatttgggaaggttcgttcttctgtgtgtagcctgtagctggtcagcctgcttctgccccctcctgatttccctaaggagcctgggatgatgttggtcaaatgacctagaaacaaggattctacctgaactgaaaggactgtgtgacctcccccaagccaaccactttcacctgggatgactttcgattatgctttgttttggggctgtatttttgaaatactctacaagaaagctgtggctcaacacatgagaagaagcacgaagcagttaggctgtacatcagacagaagggtaatgcgtgcagttcctgctgcctgcaggcagacgaggcctttgctttacagcactgtatgtgttgcacgatggatccgtgacagcactttcctgttgcactgaaactcttggccatgtagaggaaaagatatggagttatgtggatttcatcactagtatgtgtgcgtgagctggtcagttgccaaaggaggaaataaggttagaagcctgaaccgttacaaaagaagagctcactatggtcaaaaagtgatggctttcaggacttgttttttatcctgcctcacagttgttaaagtctgttccaaggcatcaccttccttctctacccaacaaccctgtgtaacaactaaagtagaattatctctcatttgttgttgtttttcctcaaaattaccaaacaaagcaaaaaatacccttgttttttatagttgagatgtcaagaagttaaattgaggcttaatgagcataggtagcttgtccaaggtctcatgaccagtcaagggcaagctggagttaataatctatatttatttgactcagcactgttttcatcacaacttgttttcccagcatcatgtagtgcatttagttttgtctttctcagggtatagtcaatatgcctgcaggagtttctatagcgagacatagaatagtattctgatcagttgccaaagaatctaggaaattagttgtattttgtgcaagctaatttaaaaacatgatgggctgttttaagaccagagtggaaattcatgagaggaactatactaccaaaagagcccaaatgaccaaatccatggataattgcttcacagccttggccatcctggctcagctctcaatttagtataatatgcagttcctgtgcctccagactatgcagctcatcaccctaggttctacaggaaatacagagatgaacaactttgccttcaaaaatgtgctgcctagaaacagacctgcattcaaccaactgtaatgcaggattggaccatgaatgatatgctagaatagaagaaagagaagtgtttttttaattgagagcctctatgtgcaaggtgatatataatcatatccagtttaatcttcacaatatccaatgaagaaggtctcattatctccatgataaagatggggaaactaaggtcagaagggttaactcaactgtctattgtcacatgatgaataaatagatgaagtgagatacaaagctgggtttgattcaaagcccttactttcctaattaaactatgatgcgtatttatttttctgcaccttcctttcttccacaaacacatattgatagatgcaagagactcttatttagaaggcgtgggggacaagaaggatacaaggtaagtttcagtggagctcagaggacggggagatagaactgtggcacttaggggagatgacatttgctttgggcagaggcagctagccaggacacatttccactataattttacaaagttaaatttataagctagcattaagtaaagtgaagtccagctcccttgctaaaaataactagaggtaataattggtattcaggtaactcatttacagtcataatgtgttgtgaaaatttaatcttaaaaattaaatttttaaactatgtgggtctgtgaatttctttaatgtctaagaaatccagcttcataatttccatgatacaaagatcttttttcaggtggatttttacctttgttccttttgctctgatagacaaaatcagtttaggactattaaagaatgttttggaataaactgtctttttcctcaatgaatgggatgtctaatgtatttcaaaatcacccaaaacttttggcaaataaaagcattt

SEQ ID NO: 158367 - DNA, 3633 bp, Artificial Sequence
  derived and/or modified sequence
tacagacaaagaacctgagacctgctagagtaagtgacttggttaagatagggagcgctccagagaccaggtccaagatcttcccccgtttcacaattagaaggcggctgtctagaggtcattcccttccttatgatcctcataaagttaatttccagtctcttggagagagaactggacgatcgcctggcttagaagttttcctccctccccgaaccccgttttctcttccatttcttccggtcgcgtgtccccagcgcccacaggtggaaatcaaccgcccgcggggttgcggggcacaaagaggcagctagcggctccgctgaccccttcccgccggcctggacgaagtctgggctcgggagccgcgtgatgcatcccaaagaaggcgcagaacagcacgtgttctccccggtgcccggggctcccacaccaccgcccaatcgctgcggccgcctagtgctcgggccgcgcctgccggccgcggggactccgggcccgggtattcgcgccgccgccgcccgccatgcgcttccgctttggggtggtggtgccacccgccgtggccggcgcccggccggagctgctggtggtggggtcgcggcccgagctggggcgttgggagccgcgcggtgccgtccgcctgaggccggccggcaccgcggcgggcgacggggccctggccctgcaggagccgggcctgtggctcggggaggtggagctggcggccgaggaggcggcgcaggacggggcggagccgggccgcgtggacacgttctggtacaagttcctgaagcgggagccgggaggagagctctcctgggaaggcaatggacctcatcatgaccgttgctgtacttacaatgaaaacaacttggtggatggtgtgtattgtctcccaataggacactggattgaggccactgggcacaccaatgaaatgaagcacacaacagacttctattttaatattgcaggccaccaagccatgcattattcaagaattctaccaaatatctggctgggtagctgccctcgtcaggtggaacatgtaaccatcaaactgaagcatgaattggggattacagctgtaatgaatttccagactgaatgggatattgtacagaattcctcaggctgtaaccgctacccagagcccatgactccagacactatgattaaactatatagggaagaaggcttggcctacatctggatgccaacaccagatatgagcaccgaaggccgagtacagatgctgccccaggcggtgtgcctgctgcatgcgctgctggagaagggacacatcgtgtacgtgcactgcaacgctggggtgggccgctccaccgcggctgtctgcggctggctccagtatgtgatgggctggaatctgaggaaggtgcagtatttcctcatggccaagaggccggctgtctacattgacgaagaggccttggcccgggcacaagaagattttttccagaaatttgggaaggttcgttcttctgtgtgtagcctgtagctggtcagcctgcttctgccccctcctgatttccctaaggagcctgggatgatgttggtcaaatgacctagaaacaaggattctacctgaactgaaaggactgtgtgacctcccccaagccaaccactttcacctgggatgactttcgattatgctttgttttggggctgtatttttgaaatactctacaagaaagctgtggctcaacacatgagaagaagcacgaagcagttaggctgtacatcagacagaagggtaatgcgtgcagttcctgctgcctgcaggcagacgaggcctttgctttacagcactgtatgtgttgcacgatggatccgtgacagcactttcctgttgcactgaaactcttggccatgtagaggaaaagatatggagttatgtggatttcatcactagtatgtgtgcgtgagctggtcagttgccaaaggaggaaataaggttagaagcctgaaccgttacaaaagaagagctcactatggtcaaaaagtgatggctttcaggacttgttttttatcctgcctcacagttgttaaagtctgttccaaggcatcaccttccttctctacccaacaaccctgtgtaacaactaaagtagaattatctctcatttgttgttgtttttcctcaaaattaccaaacaaagcaaaaaatacccttgttttttatagttgagatgtcaagaagttaaattgaggcttaatgagcataggtagcttgtccaaggtctcatgaccagtcaagggcaagctggagttaataatctatatttatttgactcagcactgttttcatcacaacttgttttcccagcatcatgtagtgcatttagttttgtctttctcagggtatagtcaatatgcctgcaggagtttctatagcgagacatagaatagtattctgatcagttgccaaagaatctaggaaattagttgtattttgtgcaagctaatttaaaaacatgatgggctgttttaagaccagagtggaaattcatgagaggaactatactaccaaaagagcccaaatgaccaaatccatggataattgcttcacagccttggccatcctggctcagctctcaatttagtataatatgcagttcctgtgcctccagactatgcagctcatcaccctaggttctacaggaaatacagagatgaacaactttgccttcaaaaatgtgctgcctagaaacagacctgcattcaaccaactgtaatgcaggattggaccatgaatgatatgctagaatagaagaaagagaagtgtttttttaattgagagcctctatgtgcaaggtgatatataatcatatccagtttaatcttcacaatatccaatgaagaaggtctcattatctccatgataaagatggggaaactaaggtcagaagggttaactcaactgtctattgtcacatgatgaataaatagatgaagtgagatacaaagctgggtttgattcaaagcccttactttcctaattaaactatgatgcgtatttatttttctgcaccttcctttcttccacaaacacatattgatagatgcaagagactcttatttagaaggcgtgggggacaagaaggatacaaggtaagtttcagtggagctcagaggacggggagatagaactgtggcacttaggggagatgacatttgctttgggcagaggcagctagccaggacacatttccactataattttacaaagttaaatttataagctagcattaagtaaagtgaagtccagctcccttgctaaaaataactagaggtaataattggtattcaggtaactcatttacagtcataatgtgttgtgaaaatttaatcttaaaaattaaatttttaaactatgtgggtctgtgaatttctttaatgtctaagaaatccagcttcataatttccatgatacaaagatcttttttcaggtggatttttacctttgttccttttgctctgatagacaaaatcagtttaggactattaaagaatgttttggaataaactgtctttttcctcaatgaatgggatgtctaatgtatttcaaaatcacccaaaacttttggcaaataaaagcatttaaaaaga

SEQ ID NO: 158368 - protein, 114 aa, Artificial Sequence
  derived and/or modified sequence
MAGLALQPGTALLCYSCKAQVSNEDCLQVENCTQLGEQCWTARIRAVGLLTVISKGCSLNCVDDSQDYYVGKKNITCCDTDLCNASGAHALQPAAAILALLPALGLLLWGPGQL

SEQ ID NO: 158369 - DNA, 345 bp, Artificial Sequence
  derived and/or modified sequence
atggccggcctggccctgcagcccggcaccgccctgctgtgctacagctgcaaggcccaggtgagcaacgaggactgcctgcaggtggagaactgcacccagctgggcgagcagtgctggaccgccagaatcagagccgtgggcctgctgaccgtgatcagcaagggctgcagcctgaactgcgtggacgacagccaggactactacgtgggcaagaagaacatcacctgctgcgacaccgacctgtgcaacgccagcggcgcccacgccctgcagcccgccgccgccatcctggccctgctgcccgccctgggcctgctgctgtggggccccggccagctgtag

SEQ ID NO: 158370 - DNA, 345 bp, Artificial Sequence
  derived and/or modified sequence
atggccgggttggcgctgcagcctgggacagccctcctgtgttacagctgcaaagcccaggtttcaaacgaggattgtcttcaggttgagaactgcacccagctgggcgagcagtgctggacggcccgtattcgcgcagttggccttctgacggtcatcagcaaaggttgttctctgaactgcgttgatgatagtcaggactactatgttggcaaaaagaatatcacttgctgcgataccgatctgtgtaatgcctccggagcccacgccctgcaacccgccgccgctattctcgctctgctgcctgctctgggactgctcttgtggggtcccggccagttgtag

SEQ ID NO: 158371 - DNA, 378 bp, Artificial Sequence
  derived and/or modified sequence
atgcagcccgttattagtgccctgaacattcagacacagacagtccagactcacccagcgccaagaaacacctctgagcactgcacattgccagcttgcgacgcacaggaggagcatagagacactgtagacggctctattgccagaaccgaaagcgcttctggagaaatatggcgccagacacatatggatggcgagcatcatgtgaatacgaaagccgagatcagtgtgatgtccgccaatcaaggggctcctcggatcaccagtaaacctcctgaagcacgacgcgaggcccgggatcgctcactgccttccgctttcagtctcagggggctaaccgacacgctgatcttgggtttttgtcctccagagctctag

SEQ ID NO: 158372 - DNA, 345 bp, Artificial Sequence
  derived and/or modified sequence
atggccggcctggccctgcagcccggcacagccctgctgtgctacagctgcaaggcccaggtgtccaatgaagactgcctgcaggtggagaactgcacccagctgggggagcagtgctggacagcccgcatccgggctgtgggcctgctgaccgtcatcagcaagggctgcagcctgaactgtgtggatgacagccaggactactacgtgggcaagaagaacatcacctgctgtgacacagacctgtgcaatgccagcggggcccacgccctgcagcctgctgctgccatcctggccctgctgcctgccctgggcctgctgctgtggggccctggccagctgtag

SEQ ID NO: 158373 - DNA, 345 bp, Artificial Sequence
  derived and/or modified sequence
atggccggcctggccctgcagcccggcaccgccctgctgtgctactcatgcaaagcccaagtgtctaacgaggactgcctgcaggtggagaattgcacccagctgggcgaacagtgctggaccgccagaatcagagccgttggtttgctaactgtgatcagcaagggctgttccctgaattgtgtcgacgacagtcaagattactatgttgggaagaagaacattacatgctgcgataccgacctgtgcaatgcttctggtgctcatgccctgcagcccgcagcagcgatcctggcgctgttaccggcccttggtctgctactgtggggaccaggacaattgtag

SEQ ID NO: 158374 - DNA, 345 bp, Artificial Sequence
  derived and/or modified sequence
atggctggtctggccctgcagccaggcacggctcttctgtgttactcctgcaaagcccaggtgagcaacgaagattgcctacaggtagagaattgcacacaactgggcgagcaatgttggacggctcggatcagggccgttgggttgcttaccgtgatttccaaaggctgttcactgaattgcgtagatgacagtcaggattattacgtgggcaaaaaaaatattacctgttgcgataccgacttatgcaatgcaagcggggctcatgccctgcaacccgctgccgctattctcgctctgctgcctgccctcggcctgcttttatggggacccggacagctatag

SEQ ID NO: 158375 - DNA, 1020 bp, Artificial Sequence
  derived and/or modified sequence
atttgaggccatataaagtcacctgaggccctctccaccacagcccaccagtgaccacgaaggctgtgctgcttgccctgttgatggcaggcttggccctgcagccaggcactgccctgctgtgctactcctgcaaagcccaggtgagcaacgaggactgcctgcaggtggagaactgcacccagctgggggagcagtgctggaccgcgcgcatccgcgcagttggcctcctgaccgtcatcagcaaaggctgcagcttgaactgcgtggatgactcacaggactactacgtgggcaagaagaacatcacgtgctgtgacaccgacttgtgcaacgccagcggggcccatgccctgcagccggctgctgccatccttgcgctgctccctgcactcggcctgctgctctggggacccggccagctctaggctctggggggccccgctgcagcccacactgggtgtggtgccccaggcctctgtgccactcctcacacacccggcccagtgggagcctgtcctggttcctgaggcacatcctaacgcaagtctgaccatgtatgtctgcgcccctgtcccccaccctgaccctcccatggccctctccaggactcccacccggcagatcggctctattgacacagatccgcctgcagatggcccctccaaccctctctgctgctgtttccatggcccagcattctccacccttaaccctgtgctcaggcacctcttcccccaggaagccttccctgcccaccccatctatgacttgagccaggtctggtccgtggtgtcccccgcacccagcaggggacaggcactcaggagggcccggtaaaggctgagatgaagtggactgagtagaactggaggacaggagtcgacgtgagttcctgggagtctccagagatggggcctggaggcctggaggaaggggccaggcctcacattcgtggggctccctgaatggcagcctcagcacagcgtaggcccttaataaacacctgttggataagcc

SEQ ID NO: 158376 - DNA, 345 bp, Artificial Sequence
  derived and/or modified sequence
atggccggcctggcactccaacctgggaccgccctgttatgctatagctgcaaagcccaggtctcaaacgaagattgcctacaggtggaaaactgcactcagttgggtgaacagtgctggaccgctcggatacgggcagtgggcttactcactgtgatctcaaagggctgttccctgaactgcgtggatgatagccaggattattacgtaggcaaaaagaacatcacgtgttgcgacaccgacctgtgtaacgcctcaggtgcacatgctttgcagcccgcagccgcaatactcgccctactgcctgccttaggcttgctgctctgggggcctggccagttatag

SEQ ID NO: 158377 - DNA, 345 bp, Artificial Sequence
  derived and/or modified sequence
atggccggcctggccctgcagcccggcaccgccctgctgtgctactcctgcaaggcgcaggtgagtaacgaggattgcctccaagttgagaactgtacgcagctgggagaacaatgctggacagcacgcatcagagctgtcggcctgctaacggtgatctcaaagggatgcagcctgaactgcgtggacgatagccaggattactacgtaggaaaaaaaaatatcacctgctgcgacaccgatctttgtaatgcctctggggcccacgccctgcagcccgccgccgccatccttgccctgctgcccgcccttggtctcctgctctgggggccaggacagctgtag

SEQ ID NO: 158378 - DNA, 345 bp, Artificial Sequence
  derived and/or modified sequence
atggcgggattagcccttcagcccggaaccgcgctgctttgttactcttgcaaggcgcaggtgtctaatgaggactgtttgcaggttgaaaactgcacccagctgggggaacagtgttggacagcaagaattcgagctgtgggactgctgactgtgatctcgaaaggatgctcattaaattgtgttgacgacagccaggattactacgttggcaaaaaaaacattacctgttgtgacaccgacttatgtaacgcaagtggcgcacatgctttacagcccgcagctgccatactcgctcttctgccagccctgggcctgctgctgtggggccctgggcagctctag

SEQ ID NO: 158379 - protein, 930 aa, Artificial Sequence
  derived and/or modified sequence
MEYERRGGRGDRTGRYGATDRSQDDGGENRSRDHDYRDMDYRSYPREYGSQEGKHDYDDSSEEQSAEDSYEASPGSETQRRRRRRHRHSPTGPPGFPRDGDYRDQDYRTEQGEEEEEEEDEEEEEKASNIVMLRMLPQAATEDDIRGQLQSHGVQAREVRLMRNKSSGQSRGFAFVEFSHLQDATRWMEANQHSLNILGQKVSMHYSDPKPKINEDWLCNKCGVQNFKRREKCFKCGVPKSEAEQKLPLGTRLDQQTLPLGGRELSQGLLPLPQPYQAQGVLASQALSQGSEPSSENANDTIILRNLNPHSTMDSILGALAPYAVLSSSNVRVIKDKQTQLNRGFAFIQLSTIVEAAQLLQILQALHPPLTIDGKTINVEFAKGSKRDMASNEGSRISAASVASTAIAAAQWAISQASQGGEGTWATSEEPPVDYSYYQQDEGYGNSQGTESSLYAHGYLKGTKGPGITGTKGDPTGAGPEASLEPGADSVSMQAFSRAQPGAAPGIYQQSAEASSSQGTAANSQSYTIMSPAVLKSELQSPTHPSSALPPATSPTAQESYSQYPVPDVSTYQYDETSGYYYDPQTGLYYDPNSQYYYNAQSQQYLYWDGERRTYVPALEQSADGHKETGAPSKEGKEKKEKHKTKTAQQIAKDMERWARSLNKQKENFKNSFQPISSLRDDERRESATADAGYAILEKKGALAERQHTSMDLPKLASDDRPSPPRGLVAAYSGESDSEEEQERGGPEREEKLTDWQKLACLLCRRQFPSKEALIRHQQLSGLHKQNLEIHRRAHLSENELEALEKNDMEQMKYRDRAAERREKYGIPEPPEPKRRKYGGISTASVDFEQPTRDGLGSDNIGSRMLQAMGWKEGSGLGRKKQGIVTPIEAQTRVRGSGLGARGSSYGVTSTESYKETLHKTMVTRFNEAQ

SEQ ID NO: 158380 - DNA, 2793 bp, Artificial Sequence
  derived and/or modified sequence
atggagtacgagagacgcggcggtagaggagacagaaccggacggtacggcgctaccgaccgctcccaggatgatgggggggagaaccgctctcgcgaccacgactaccgggacatggactatagatcataccctcgagagtacgggtcacaggagggtaaacatgactacgacgattcatctgaagagcagtcagccgaggattcctacgaggcatcacccgggagcgaaacccagcgcagacggcggcgacgccacagacacagtcccacgggccctccaggctttccaagagatggcgattatcgggatcaggattatagaacagaacagggggaggaggaagaagaggaggaagacgaggaggaggaggagaaggcctccaatattgtcatgctgagaatgcttcctcaagccgcaacagaggacgacatccgtggccagttgcagagccatggtgtgcaagcgcgcgaggtcagacttatgagaaataagagcagcggccagtcaaggggatttgctttcgtggaattcagccaccttcaggacgccacacgttggatggaagctaatcagcacagtttaaatatactgggtcagaaggtctctatgcactattcagaccccaagcccaagattaacgaggactggttgtgtaataagtgtggcgtccaaaactttaagaggcgagagaagtgcttcaaatgcggcgtgcctaagagcgaagcagaacagaagctgcccctcgggacacggctggaccagcaaacattgcccctgggcggccgcgaactgtctcagggactcctcccacttcctcagccctaccaggcccagggcgtgctggcctctcaggcactcagccagggctccgagcccagctcggaaaatgctaatgatactattatcctcaggaacctgaatccccattctaccatggactcaatcttgggggcactcgcaccctacgctgtgttgtcttcttccaacgtgagagtaatcaaggacaagcaaacccaattaaataggggcttcgccttcattcagctgagtacgatcgtagaggccgcgcagttgctgcaaatcctccaggctctgcaccctccattgacaattgatggtaagacgatcaacgtggaattcgccaaaggtagcaaacgcgacatggcttccaacgaaggctcccggatcagtgccgccagcgtcgccagcaccgctattgctgctgcccagtgggctatcagccaggcctcccagggaggggaggggacttgggcaaccagcgaagagccgcctgtggattactcctactatcaacaggacgagggttatggcaacagccagggcaccgaatcgagcctctatgcccatgggtacctaaagggcacgaaagggcctggcatcactgggaccaagggcgatcccactggagcaggcccagaggcctcactcgagcctggtgccgacagcgtgtcaatgcaggcatttagtcgggctcagccaggggccgctcctggaatctaccaacagtctgctgaagcctcttcttcccagggaaccgctgccaatagtcaaagctataccatcatgtctcccgccgtccttaagtcggaattgcagtctcccacacaccctagttcggcccttcctcccgccactagtccgactgcccaggaaagctactcccagtaccccgtgcctgacgttagtacctaccagtacgacgagacgagtggctactactatgacccgcaaaccggtttatactatgatccaaacagccagtactactataacgctcaatctcaacaatatctgtactgggatggcgaaagacggacatacgttcccgccttggagcaaagcgccgacggtcacaaagaaaccggcgcgcctagcaaagaagggaaggagaaaaaagagaaacacaagactaagaccgcccaacagatcgcaaaagatatggagcggtgggctcggtcactaaacaagcagaaggaaaacttcaaaaacagctttcagcccatcagctctttgagagatgatgagcggcgcgaatccgcgaccgcggacgctgggtacgctatcctcgaaaagaagggggccctcgccgaaagacagcatacatccatggacctgcctaagctggctagtgacgacaggccctcgccaccacgagggctggtcgccgcgtattccggagaatccgatagtgaagaagagcaagagcgaggcggccccgagcgtgaagagaaactgactgactggcaaaaacttgcctgcctcttatgtcggaggcagtttccttcaaaggaggcgttgatcaggcaccagcaactgagtggcctacacaaacagaacctcgagatacatcgacgagcccacctctccgagaacgaattggaggcactggagaagaatgacatggagcaaatgaagtatagggatagggcagctgagcgtcgtgaaaagtacggcatcccggaaccgcctgagcccaagcggcggaaatacggcggaatctccacggccagcgttgactttgagcagcctaccagagatggcctcggcagtgacaatatcggaagtcgaatgcttcaggcgatgggttggaaggaggggagcggacttggtaggaagaaacaaggtattgtgacgcctattgaagcccagacccgcgtccgaggcagcgggctgggagccaggggatcttcctatggagttacctctacagaatcctataaagagaccctccacaaaactatggtgactcgcttcaacgaagcacagtag

SEQ ID NO: 158381 - DNA, 2793 bp, Artificial Sequence
  derived and/or modified sequence
atggagtatgaaagaagaggaggccgcggggacagaacaggccgctacggggccacagacaggagccaggatgatggaggagagaacagaagccgggaccatgactacagagacatggactaccgcagctacccccgggagtatggcagccaggagggcaagcatgactatgatgacagcagcgaggagcagagcgcagaagattcctatgaggccagccctggcagcgagacccagaggagaagaagaagaagacaccgccacagccccactggacctcctggcttccccagagatggagactacagagaccaggactacagaacagagcagggcgaggaggaggaggaggaggaggatgaggaggaggaggagaaggccagcaacatcgtgatgctgaggatgctgccccaggccgccacagaagatgacatccggggccagctgcagagccacggcgtgcaggcccgggaggtgcggctgatgaggaacaagagcagcggccagagccggggctttgcctttgtggagttcagccacctgcaggatgccacccgctggatggaggccaaccagcacagcctgaacatcctgggccagaaggtgtccatgcactacagcgaccccaagcccaagatcaatgaagactggctgtgcaacaagtgtggggtgcagaacttcaagagaagagagaagtgcttcaagtgtggggtgcccaagtctgaggccgagcagaagctgcccctgggcacccggctggaccagcagaccctgcccctgggcggccgggagctgagccagggcctgctgcccctgccccagccctaccaggcccagggcgtgctggccagccaggccctgagccagggcagcgagcccagcagtgaaaatgccaatgacaccatcatcctgaggaacctgaacccccacagcaccatggacagcatcctgggcgccctggccccctatgctgtgctgagcagcagcaatgtgcgggtcatcaaggacaagcagacccagctgaacagaggatttgccttcatccagctgagcaccatcgtggaggccgcccagctgctgcagatcctgcaggccctgcacccccccctgaccattgatggcaagaccatcaacgtggagtttgccaagggcagcaagagggacatggccagcaatgaaggcagccgcatctctgctgcctctgtggccagcacagccatcgctgctgcccagtgggccatcagccaggccagccagggcggggagggcacctgggccaccagcgaggagccccctgtggactacagctactaccagcaggatgagggctacggcaacagccagggcacagagagcagcctgtatgcccacggctacctgaagggcaccaagggccctggcatcaccggcaccaagggggaccccaccggggccggccctgaggccagcctggagcccggggctgacagcgtgtccatgcaggccttcagccgggcccagcctggagctgcccctggcatctaccagcagagcgctgaggccagcagcagccagggcacagctgccaacagccagagctacaccatcatgagccctgctgtgctgaagtctgagctgcagagccccacccaccccagcagcgccctgcccccagccaccagccccacagcccaggagagctacagccagtaccctgtgcctgatgtgtccacctaccagtatgatgagaccagcggctactactatgacccccagacaggcctgtactatgaccccaacagccagtactactacaatgcccagagccagcagtacctgtactgggatggagagaggaggacctacgtgcctgccctggagcagagcgcagatggccacaaggagactggagcccccagcaaggagggcaaggagaagaaggagaagcacaagaccaagacagcccagcagatcgccaaggacatggagcgctgggcccggagcctgaacaagcagaaggagaacttcaagaacagcttccagcccatcagcagcctgagagatgatgagcggcgggagagcgccacagcagatgctggctacgccatcctggagaagaagggggccctggccgagcggcagcacacctccatggacctgcccaagctggccagtgatgaccggcccagccccccccggggcctggtggccgcctacagcggggagagtgacagcgaggaggagcaggagcggggcggccctgagcgggaggagaagctgacagactggcagaagctggcctgcctgctgtgccggcggcagttccccagcaaggaggccctgatccgccaccagcagctgagcggcctgcacaagcagaacctggagatccaccggcgggcccacctgtctgaaaatgagctggaggccctggagaagaatgacatggagcagatgaagtacagagacagagctgctgagcggcgggagaagtatggcatccctgagcccccagagcccaagaggaggaaatatggaggcatcagcacagcctctgtggactttgagcagcccaccagagatggcctgggcagtgacaacatcggcagcaggatgctgcaggccatgggctggaaggagggcagcggcctgggcaggaagaagcagggcatcgtgacccccatcgaggcccagaccagggtgcggggcagcggcctgggcgcccggggcagcagctatggagtgaccagcacagagagctacaaggagaccctgcacaagaccatggtgacccgcttcaatgaggcccagtag

SEQ ID NO: 158382 - DNA, 2793 bp, Artificial Sequence
  derived and/or modified sequence
atggagtacgagcggcggggcggccggggcgaccggaccggccggtacggagccacagataggtcccaagacgatggcggcgagaatcggtctagagaccatgactaccgagacatggattatcggtcctatccacgcgaatacggatctcaggagggaaaacatgactacgatgattcctccgaagagcagagtgctgaggattcatacgaggctagcccgggatctgagacacagaggaggcggaggcgccgacatcggcactcacccaccggaccacccggattccctcgcgatggcgactacagagatcaggattatcgtactgagcagggcgaggaggaggaagaggaggaagacgaggaggaagaagaaaaggcgtctaatatcgtcatgctgaggatgctcccacaggccgcaacggaggatgatatcagaggacagctgcagtcacacggcgtgcaggctcgcgaggtgaggctgatgcgaaataaatctagtggtcaatccagggggtttgcttttgtggaattcagtcacctccaggacgcaacaagatggatggaagccaaccaacactcccttaacatcttggggcaaaaggtgtccatgcattactctgaccccaaacctaagatcaacgaggattggttgtgtaataaatgcggagtgcagaacttcaaacgccgagagaagtgcttcaagtgtggcgtgcccaagtcggaggctgaacagaagctgcctctcggcactaggctcgatcagcagaccctacccctcggaggcagggagctctcgcaggggctcttgccactgcctcagccgtatcaagctcagggtgtgctcgcctcacaggctctaagccagggcagtgaaccttctagcgagaatgccaacgacactatcattctcaggaacttgaatccccattcaaccatggatagtatacttggagcactggctccctatgccgtcctttccagctctaacgtcagggtgatcaaggataagcagacccagctcaaccgaggcttcgctttcattcagctcagtacaattgtggaagctgcacaactgctccagattctgcaggccctccacccgccattgacgatcgatgggaaaacgataaacgtggagtttgccaaaggctcgaagcgcgacatggcgtccaatgagggcagccggatctccgctgcttccgttgcatccacagcaattgccgcggcccagtgggctatctctcaggcttcgcagggcggggaggggacgtgggctacatcagaagaacccccggtcgattatagctactatcaacaggatgaagggtacggaaattcgcagggaactgaatcttccttgtacgctcacgggtatctcaagggcacaaagggaccagggattacaggcacgaagggggatcccacaggggccggccccgaggccagcctggagcctggcgcggactccgtgagcatgcaggcattcagccgggctcagccaggcgccgcaccgggaatttaccaacagtccgctgaggccagtagctctcagggcacagccgccaactcccagtcctacacaataatgagtcccgctgtcctgaaatcggaacttcaatcccctactcacccgtccagcgcattgccacccgcgacatctcctaccgctcaggagagctactctcaatatcccgtgccggacgtctctacatatcagtacgatgaaacaagcgggtactactacgacccccaaaccggactgtactatgacccgaactctcaatactactataatgctcaaagccagcagtacctctactgggacggcgagcggagaacctacgtgccggccctggaacagtcggcggatggtcacaaggagacaggggccccttctaaagagggaaaggaaaagaaagaaaagcataagacgaagacagctcagcaaatagcaaaagacatggaacggtgggctcggagcctcaacaaacagaaggagaactttaagaatagcttccagcccatatcctccttgagggacgacgagagacgggaatccgctactgccgacgccggatatgccattctcgaaaagaagggtgcgctggctgaacgccagcacacatcaatggatttgcccaaattagcgtctgatgatcgacctagtccccctcgcggtctggttgctgcttattcaggtgagtctgactccgaagaagagcaggagcgcggcggcccagaaagagaggagaagctgacagactggcaaaaactggcctgtttactgtgtaggcgccaattcccttctaaggaggctctgatacgccatcagcagctttctggattgcacaagcaaaacctggagatacaccggcgggctcacctgtcagagaatgaactggaagcactggagaaaaacgacatggaacagatgaaataccgtgatagagcggcggagaggagagagaagtacggaatccctgaaccacccgaaccaaaacgcagaaaatacggaggaattagcactgctagcgtcgattttgagcagccaactcgggacggcctcggatcagacaatatcgggagccgcatgctgcaggcaatggggtggaaggagggttccggcctcggacgaaagaagcagggtattgtgacacccatcgaggctcaaacaagagtgagaggctctggtctgggcgccagaggaagctcctatggagtgacgtccaccgagtcctacaaagaaacattgcacaagacgatggtgacgagatttaacgaggcgcagtag

SEQ ID NO: 158383 - DNA, 2793 bp, Artificial Sequence
  derived and/or modified sequence
atggaatacgagcgtcgcggagggcgaggcgatagaactgggaggtatggagccaccgaccgttcccaggacgatggcggagagaataggagcagggatcacgactacagggacatggactaccgatcctacccccgagaatacggaagccaggagggaaaacatgactatgatgattcgtccgaggagcagagcgccgaagacagctacgaggccagccctgggagcgagactcagcgtcggagaaggcggaggcaccggcactctccaacgggcccacctggctttccccgagacggagactacagggaccaggactaccgcacagaacaaggcgaagaagaggaagaggaagaagatgaggaggaagaggaaaaggcctccaacattgtgatgctcagaatgctaccccaggctgcgacggaggacgacattcggggtcagctgcagtctcacggggtccaggccagggaagtcaggctgatgagaaacaagtcctctggacagtcaaggggttttgcatttgttgagttcagccacctgcaagacgccacacgctggatggaggcaaaccagcattcacttaatattttgggccaaaaagtctcaatgcactatagtgaccccaagcccaaaatcaacgaggactggttgtgtaacaagtgtggggttcaaaattttaagaggagagaaaagtgttttaagtgcggtgtgccaaagtccgaggccgaacagaaacttcctctgggaacacggttagaccagcagactctcccactgggaggacgcgagctgagccaaggtctactacctctgccgcagccttatcaggcacagggcgtattggcgtcacaggcgctgtctcaaggctctgagccctccagcgagaacgctaacgatacaattattttgagaaaccttaatccccactctacaatggacagcatcctaggagccttggccccttacgcagtacttagtagctcgaacgtcagggtgattaaggacaaacagacccagttgaacaggggatttgcatttatccaactatccacaatcgtcgaagccgctcagttgctgcagatcttgcaagccttacacccccctctgactatagacggaaagaccattaatgtcgagtttgccaaaggatctaagagggacatggctagcaacgaaggcagccggatatccgccgctagcgtggcaagtaccgccattgctgctgctcaatgggcaatttcacaagcaagccagggaggagagggcacttgggccaccagtgaagagccaccagtcgactattcctactaccagcaggacgaagggtacggcaattctcaaggcacggaatcttccctgtacgcccatggctatctcaagggcacgaaggggccaggcattaccggtaccaagggtgacccgaccggcgcaggcccagaggcaagcctagaaccaggcgctgattcagtgtcaatgcaggcctttagccgcgcacagccaggcgcagcacctggcatttaccaacagtcagctgaggctagctcgtcccaagggaccgcagccaactcacagagctatactataatgagccccgcagtgttgaagtccgagctgcagagcccaacgcacccttcttccgcccttcccccagcaacttcacccacagctcaggagagctattcacaatatcccgtgcccgacgtgtcaacctaccaatatgatgaaacctcaggttactactatgatcctcaaaccggcctctactacgatcccaactcacagtactactacaacgctcagagccagcaatatctatattgggatggagaacggagaacatatgtaccagccctggagcagagcgcagacggtcacaaagaaacaggggctccaagtaaagagggcaaagagaaaaaagaaaagcacaagacgaagacagctcaacagatcgctaaggacatggagaggtgggcgagaagtttgaataagcaaaaggagaattttaagaattcattccagccaatttcaagcttgagagacgacgaaagacgggagtcagccacggctgacgctggctacgctatcctggaaaagaagggggctctggccgagaggcagcatacatcgatggatttacccaaactcgcgtcagatgatcggccttctccgccaaggggcctcgtagcggcatactctggggagtcagactcagaggaggagcaggagcggggaggccctgagagggaggaaaagttgactgattggcagaagctcgcctgtttactctgtcgcagacagttcccctctaaagaagccttaattagacaccagcagctgtcagggctccacaaacaaaacctcgagatacaccgtagagctcacctctcagagaacgagctggaagcattggaaaaaaacgacatggagcagatgaagtatagggatcgcgcagccgagagacgagaaaaatacggaatccccgagccgccagaacccaaacgcagaaaatatgggggaatctccaccgcttctgttgactttgaacaacccactagggatggtctgggcagcgataacattggaagccgcatgctgcaggctatggggtggaaagagggttccggtctgggcagaaagaaacagggcattgtcacgccaatcgaagctcaaacacgcgtgcgaggcagcggtttgggcgctcggggatcttcttatggcgttacaagcacagagagttacaaagagacacttcataaaaccatggtgacgagatttaatgaggcccagtag

SEQ ID NO: 158384 - DNA, 2793 bp, Artificial Sequence
  derived and/or modified sequence
atggagtacgagagaagaggcggcagaggcgacagaaccggcagatacggcgccaccgacagaagccaggacgacggcggcgagaacagaagcagagaccacgactacagagacatggactacagaagctaccccagagagtacggcagccaggagggcaagcacgactacgacgacagcagcgaggagcagagcgccgaggacagctacgaggccagccccggcagcgagacccagagaagaagaagaagaagacacagacacagccccaccggcccccccggcttccccagagacggcgactacagagaccaggactacagaaccgagcagggcgaggaggaggaggaggaggaggacgaggaggaggaggagaaggccagcaacatcgtgatgctgagaatgctgccccaggccgccaccgaggacgacatcagaggccagctgcagagccacggcgtgcaggccagagaggtgagactgatgagaaacaagagcagcggccagagcagaggcttcgccttcgtggagttcagccacctgcaggacgccaccagatggatggaggccaaccagcacagcctgaacatcctgggccagaaggtgagcatgcactacagcgaccccaagcccaagatcaacgaggactggctgtgcaacaagtgcggcgtgcagaacttcaagagaagagagaagtgcttcaagtgcggcgtgcccaagagcgaggccgagcagaagctgcccctgggcaccagactggaccagcagaccctgcccctgggcggcagagagctgagccagggcctgctgcccctgccccagccctaccaggcccagggcgtgctggccagccaggccctgagccagggcagcgagcccagcagcgagaacgccaacgacaccatcatcctgagaaacctgaacccccacagcaccatggacagcatcctgggcgccctggccccctacgccgtgctgagcagcagcaacgtgagagtgatcaaggacaagcagacccagctgaacagaggcttcgccttcatccagctgagcaccatcgtggaggccgcccagctgctgcagatcctgcaggccctgcacccccccctgaccatcgacggcaagaccatcaacgtggagttcgccaagggcagcaagagagacatggccagcaacgagggcagcagaatcagcgccgccagcgtggccagcaccgccatcgccgccgcccagtgggccatcagccaggccagccagggcggcgagggcacctgggccaccagcgaggagccccccgtggactacagctactaccagcaggacgagggctacggcaacagccagggcaccgagagcagcctgtacgcccacggctacctgaagggcaccaagggccccggcatcaccggcaccaagggcgaccccaccggcgccggccccgaggccagcctggagcccggcgccgacagcgtgagcatgcaggccttcagcagagcccagcccggcgccgcccccggcatctaccagcagagcgccgaggccagcagcagccagggcaccgccgccaacagccagagctacaccatcatgagccccgccgtgctgaagagcgagctgcagagccccacccaccccagcagcgccctgccccccgccaccagccccaccgcccaggagagctacagccagtaccccgtgcccgacgtgagcacctaccagtacgacgagaccagcggctactactacgacccccagaccggcctgtactacgaccccaacagccagtactactacaacgcccagagccagcagtacctgtactgggacggcgagagaagaacctacgtgcccgccctggagcagagcgccgacggccacaaggagaccggcgcccccagcaaggagggcaaggagaagaaggagaagcacaagaccaagaccgcccagcagatcgccaaggacatggagagatgggccagaagcctgaacaagcagaaggagaacttcaagaacagcttccagcccatcagcagcctgagagacgacgagagaagagagagcgccaccgccgacgccggctacgccatcctggagaagaagggcgccctggccgagagacagcacaccagcatggacctgcccaagctggccagcgacgacagacccagcccccccagaggcctggtggccgcctacagcggcgagagcgacagcgaggaggagcaggagagaggcggccccgagagagaggagaagctgaccgactggcagaagctggcctgcctgctgtgcagaagacagttccccagcaaggaggccctgatcagacaccagcagctgagcggcctgcacaagcagaacctggagatccacagaagagcccacctgagcgagaacgagctggaggccctggagaagaacgacatggagcagatgaagtacagagacagagccgccgagagaagagagaagtacggcatccccgagccccccgagcccaagagaagaaagtacggcggcatcagcaccgccagcgtggacttcgagcagcccaccagagacggcctgggcagcgacaacatcggcagcagaatgctgcaggccatgggctggaaggagggcagcggcctgggcagaaagaagcagggcatcgtgacccccatcgaggcccagaccagagtgagaggcagcggcctgggcgccagaggcagcagctacggcgtgaccagcaccgagagctacaaggagaccctgcacaagaccatggtgaccagattcaacgaggcccagtag

SEQ ID NO: 158385 - protein, 291 aa, Artificial Sequence
  derived and/or modified sequence
MVVLNPMTLGIYLQLFFLSIVSQPTFINSVLPISAALPSLDQKKRGGHKACCLLTPPPPPLFPPPFFRGGRSPLLSPDMKNLMLELETSQSPCMQGSLGSPGPPGPQGPPGLPGKTGPKGEKGELGRPGRKGRPGPPGVPGMPGPIGWPGPEGPRGEKGDLGMMGLPGSRGPMGSKGYPGSRGEKGSRGEKGDLGPKGEKGFPGFPGMLGQKGEMGPKGEPGIAGHRGPTGRPGKRGKQSSRTPCTLPRRPPVPCGQGSRSPVTVVAGKESQACLLPRFEEDYISSGTERG

SEQ ID NO: 158386 - protein, 446 aa, Artificial Sequence
  derived and/or modified sequence
MVVLNPMTLGIYLQLFFLSIVSQPTFINSVLPISAALPSLDQKKRGGHKACCLLTPPPPPLFPPPFFRGGRSPLLSPDMKNLMLELETSQSPCMQGSLGSPGPPGPQGPPGLPGKTGPKGEKGRPGPPGVPGMPGPIGWPGPEGPRGEKGDLGMMGLPGSRGPMGSKGYPGSRGEKGSRGEKGDLGPKGEKGFPGFPGMLGQKGEMGPKGEPGIAGHRGPTGRPGKRGKQGQKGDSGVMGPPGKPGPSGQPGRPGPPGPPPAGQLIMGPKGERGFPGPPGRCLCGPTMNVNNPSYGESVYGPSSPRVPVIFVVNNQEELERLNTQNAIAFRRDQRSLYFKDSLGWLPIQLTPFYPVDYTADQHGTCGDGLLQPGEECDDGNSDVGDDCIRCHRAYCGDGHRHEGVEDCDGSDFGYLTCETYLPGSYGDLQCTQYCYIDSTPCRYFT

SEQ ID NO: 158387 - protein, 455 aa, Artificial Sequence
  derived and/or modified sequence
MVVLNPMTLGIYLQLFFLSIVSQPTFINSVLPISAALPSLDQKKRGGHKACCLLTPPPPPLFPPPFFRGGRSPLLSPDMKNLMLELETSQSPCMQGSLGSPGPPGPQGPPGLPGKTGPKGEKGELGRPGRKGRPGPPGVPGMPGPIGWPGPEGPRGEKGDLGMMGLPGSRGPMGSKGYPGSRGEKGSRGEKGDLGPKGEKGFPGFPGMLGQKGEMGPKGEPGIAGHRGPTGRPGKRGKQGQKGDSGVMGPPGKPGPSGQPGRPGPPGPPPAGQLIMGPKGERGFPGPPGRCLCGPTMNVNNPSYGESVYGPSSPRVPVIFVVNNQEELERLNTQNAIAFRRDQRSLYFKDSLGWLPIQLTPFYPVDYTADQHGTCGDGLLQPGEECDDGNSDVGDDCIRCHRAYCGDGHRHEGVEDCDGSDFGYLTCETYLPGSYGDLQCTQYCYIDSTPCRYFT

SEQ ID NO: 158388 - DNA, 876 bp, Artificial Sequence
  derived and/or modified sequence
atggttgtgctgaatcctatgacacttggcatttatctgcagctgtttttcttatcgattgtcagtcaacccaccttcattaattccgtacttcccatctcggcagccctaccatccctggaccagaagaagcgcggaggccataaagcctgttgcctcctaacgcccccaccaccgccactttttcctcctccatttttccgcggcggacgatcacctctgctctctccagacatgaaaaacctgatgttggaattggagacgagccagagcccttgtatgcagggctcattgggatcaccggggccccctgggccacaaggcccaccgggcctccctggtaaaacaggacctaaaggagagaagggggagctgggtcggccaggacggaagggcagaccgggacccccaggagtgccagggatgcccgggccaatcggctggccggggccggaagggcccagaggcgagaagggcgacctcggcatgatgggtttgcctggtagccgaggccccatgggtagcaaaggctaccctggaagccgaggcgagaaggggtctagaggcgaaaagggagacttaggaccgaaaggggagaaaggcttcccggggtttcccgggatgctgggacagaaaggggagatgggaccaaaaggggagcccggtatcgctggccataggggacccaccggaagacccggaaaacggggaaaacagtccagtagaaccccttgcacactcccccggaggcccccagtgccatgcggacaggggtctcgtagtccggtcaccgtggtggccggcaaagaaagccaggcatgccttctgccgaggttcgaggaagattatataagctcaggaaccgagcgcggatag

SEQ ID NO: 158389 - DNA, 1341 bp, Artificial Sequence
  derived and/or modified sequence
atggtggtactgaatcccatgacccttggaatttatttacagctctttttcctgagtatcgtgtcacagccaacctttattaattccgtgcttccaatctctgctgccttgccctcccttgaccagaaaaagcggggcggccacaaagcctgttgtttactcaccccacctccacctccactctttcccccacccttctttcgaggcggacgaagtccacttctctccccagatatgaaaaacttaatgttagagcttgagacaagtcagagcccctgcatgcagggcagcctgggatccccaggcccgccaggaccgcaaggcccccccggactgccaggcaagactggacccaaaggagaaaaaggccgccccggccctcccggtgtcccaggcatgcctgggcccattggctggcccgggccagaggggccacgtggagagaaaggagatcttggcatgatgggactgcctgggtcacgcggccccatgggaagcaaaggttaccccggcagtagaggcgagaagggaagtcggggtgaaaagggcgatttgggacccaaaggtgagaagggtttccccgggtttccagggatgctggggcagaaaggcgagatgggccccaaaggcgaaccgggaatcgccgggcacaggggacctacgggaaggcccggcaaaagaggtaaacaggggcagaaaggcgatagtggcgtgatggggccccctggaaaaccaggaccctcaggccagcccggaagacccggtcccccaggcccccccccagccggtcaactgatcatggggcctaaaggtgagcgcggctttcccggacctcctgggcgatgcctgtgcggcccgacaatgaacgtgaacaatccatcttatggcgaatcagtttatggtccttcttcgccgagagtgccagttatctttgtggtcaataaccaagaggagctcgagagactgaacacgcaaaacgctatagcattccgacgcgatcagagatctctgtactttaaggattccctgggatggttacctatccagctgacgccgttttatcccgtcgattataccgcagaccagcacggcacatgtggtgacggtctgcttcaaccgggcgaggaatgcgacgatggtaactcagatgtgggagatgattgcatacggtgccaccgggcttattgcggagatggtcaccgccacgaaggtgtcgaggactgtgatggatctgattttggctacttgacctgcgaaacctacctcccaggctcctacggagatctgcagtgcactcagtattgctatattgattcgacaccatgtcggtattttacctag

SEQ ID NO: 158390 - DNA, 876 bp, Artificial Sequence
  derived and/or modified sequence
atggtggtgctgaaccccatgaccctgggcatctacctgcagctgttcttcctgagcatcgtgtcccagcccaccttcatcaacagcgtgctgcccatctctgctgccctgcccagcctggaccagaagaagaggggcggccacaaggcctgctgcctgctgaccccacctcctcctcctctcttccccccacccttcttccggggcggccgcagccccctgctgagcccagacatgaagaacctgatgctggagctggagaccagccagagcccctgcatgcagggcagcctgggcagccctggccccccaggcccccagggccccccaggcctgcccgggaagacaggccccaagggggagaagggggagctgggccggcccggcaggaagggccggcccggccccccaggagtgcccggcatgcctggccccatcggctggccaggccctgagggccccagaggagagaagggggacctgggcatgatgggcctgcccggcagccggggccccatgggcagcaagggctacccaggcagcagaggagagaagggcagcagaggagagaagggggacctgggccccaagggggagaagggcttccctggcttccctggcatgctgggccagaagggggagatgggccccaagggggagcccggcattgctggccaccggggccccaccggccggcctgggaagaggggcaagcagagcagcaggaccccctgcaccctgcccaggaggcctcctgtgccctgtggccagggcagccgcagccctgtgacagtggtggccggcaaggagagccaggcctgcctgctgcccaggtttgaggaggactacatcagcagcggcacagagcggggctag

SEQ ID NO: 158391 - DNA, 1341 bp, Artificial Sequence
  derived and/or modified sequence
atggtggtgctgaaccccatgaccctgggcatctacctgcagctgttcttcctgagcatcgtgtcccagcccaccttcatcaacagcgtgctgcccatctctgctgccctgcccagcctggaccagaagaagaggggcggccacaaggcctgctgcctgctgaccccacctcctcctcctctcttccccccacccttcttccggggcggccgcagccccctgctgagcccagacatgaagaacctgatgctggagctggagaccagccagagcccctgcatgcagggcagcctgggcagccctggccccccaggcccccagggccccccaggcctgcccgggaagacaggccccaagggggagaagggccggcccggccccccaggagtgcccggcatgcctggccccatcggctggccaggccctgagggccccagaggagagaagggggacctgggcatgatgggcctgcccggcagccggggccccatgggcagcaagggctacccaggcagcagaggagagaagggcagcagaggagagaagggggacctgggccccaagggggagaagggcttccctggcttccctggcatgctgggccagaagggggagatgggccccaagggggagcccggcattgctggccaccggggccccaccggccggcctgggaagaggggcaagcagggccagaagggggacagcggcgtgatgggccccccaggcaagccaggccccagcggccagcccggccggcccggccccccaggccccccacctgctggccagctgatcatgggccccaagggggagcggggcttccctggccccccaggccgctgcctgtgtggccccaccatgaatgtgaacaaccccagctatggagagagcgtgtatggccccagcagcccccgggtgcctgtgatctttgtggtgaacaaccaggaggagctggagcggctgaacacccagaatgccatcgccttcagaagagaccagaggagcctgtacttcaaggacagcctgggctggctgcccatccagctgacccccttctaccctgtggactacacagctgaccagcacggcacctgtggagatggcctgctgcagcctggagaggagtgtgatgatggcaacagtgatgtgggagatgactgcatccgctgccaccgggcctactgtggagatggccacagacatgagggcgtggaggactgtgatggcagtgactttggctacctgacctgtgagacctacctgcccggcagctatggagacctgcagtgcacccagtactgctacatcgacagcaccccctgccgctacttcacctag

SEQ ID NO: 158392 - DNA, 876 bp, Artificial Sequence
  derived and/or modified sequence
atggtggtgctgaaccccatgaccctgggcatctacctgcagctgttcttcttaagcattgtatcccagcctaccttcatcaattctgtgctgcctatttccgctgctctgcccagtctcgaccaaaaaaagaggggaggacataaggcctgttgcctgctgacacccccccccccacctctattccctcctccctttttccgcggaggacggagtccactactctctcccgacatgaagaacctgatgctggagctggaaacctcccagtccccatgtatgcaggggagtctggggtcccccggaccccctggccctcaaggcccgcccggcctgccaggcaagacaggaccaaaaggcgaaaagggagaactggggcgtcccggccggaagggtcgccctggaccgccgggagtgcctggaatgccggggcccatcggatggccgggacccgaaggcccgcggggtgagaagggggacttgggtatgatgggcttgccagggagtcgaggccccatggggtccaaaggataccccggttcccgcggtgaaaagggtagtcgtggcgaaaaaggggacttgggcccaaagggcgaaaagggatttcccgggttccctggtatgctcggccaaaagggcgaaatgggcccgaagggcgaacctggaatcgcaggccacaggggtccaaccggccggcctggcaagagaggcaagcagtcatcacgcactccttgtaccttaccccggcgacctcccgtgccatgtggccaggggagcagatctccggtcactgtcgttgccgggaaggaatctcaagcttgcctgttgccgaggtttgaggaggattacattagtagcggaaccgaacgcggctag

SEQ ID NO: 158393 - DNA, 1341 bp, Artificial Sequence
  derived and/or modified sequence
atggtggtgctgaaccccatgaccctgggcatctacctgcagctgttctttctatctatagtctcccagcccacattcataaatagcgttctgccgatatctgctgccctaccttcgctggatcagaagaagcggggtggccataaggcctgttgcctgctaacaccacctcctccccccttgttcccccctccatttttccgcggaggccgatccccgctgctttcccccgacatgaagaacttaatgctggagctggagacatcccagtctccttgtatgcaaggaagtctcggttcacctggcccacccggaccacagggtcccccgggacttccagggaaaaccggacctaagggtgaaaaggggagaccgggtccgcccggtgtgcccggcatgcctggacctattgggtggccgggacccgaaggccccaggggagaaaaaggggacctggggatgatgggtcttcctggttcccgtggcccaatggggagcaaaggatacccagggtcccgtggtgagaaagggtctcgcggggagaaaggagatttaggccctaaaggggaaaaagggttccccggcttcccagggatgctgggccagaagggcgagatgggaccgaaaggagaaccaggaattgctgggcatcgcggacccaccggccggcctggcaagagaggtaagcaggggcagaaaggcgattctggggtgatgggtcctcccgggaaaccgggccccagcgggcagccagggcgccctggcccccctggcccccctcctgccggtcagctcatcatgggccccaagggtgagcggggattccctggtccgcccggcaggtgcctgtgtggaccaacaatgaatgtcaataatccttcatatggcgagagtgtctacggacccagctcaccaagagttcccgtgatttttgtggttaataatcaggaggagttggaacgccttaacacgcaaaacgcgatcgcctttcggcgggaccagcgctcactgtactttaaggactctctgggctggctgccaattcaattaaccccattctatcctgttgactacacagcagatcagcatgggacctgtggcgacggcctactccagcctggcgaagagtgcgacgatgggaactctgatgttggtgacgactgtattcgctgtcaccgggcttactgcggcgacggacatcgacatgaaggcgtggaggattgtgacggatctgacttcgggtatctgacctgtgaaacatatttgccgggcagttacggggaccttcagtgtacacaatattgttacattgacagtaccccctgtcgatacttcacatag

SEQ ID NO: 158394 - DNA, 876 bp, Artificial Sequence
  derived and/or modified sequence
atggtggtgctgaaccccatgaccctgggcatatacctccagttgtttttcctttccatcgtctctcagcccacattcatcaattccgtgctcccaatttctgccgctcttccctccctggaccagaaaaagaggggaggacacaaggcatgctgtttgctcacaccaccgccaccgcctttgttccctcctccatttttcagagggggacggtcccctctgctgtcacctgacatgaaaaacctgatgctagaattggaaaccagccaaagcccgtgcatgcagggctccctcggtagtcccggacccccagggcctcaggggcctcccggactgcccggtaagacaggacccaaaggcgagaagggggagctgggtcgccctggtcgaaaagggaggcccggacctcctggcgtacctggaatgcctggacccataggatggccagggccagaaggacctaggggggagaaaggcgacctaggcatgatggggctgcccggtagcagaggcccaatgggcagtaagggttaccctgggtcgcgcggagaaaaggggagccgaggggagaaaggcgacctaggtccaaaaggagagaagggcttccctggcttccccggtatgctgggtcagaaaggagaaatgggacccaagggggaaccgggaattgctggccacagagggccaacgggtcgcccaggcaagaggggtaagcagagcagtagaactccctgcacactgcctcgccgacctcctgtgccatgcgggcaagggagtagaagcccggtgacagttgttgctggcaaggagtcccaggcttgccttctgccacgttttgaggaggactacataagctcagggactgaacgcggatag

SEQ ID NO: 158395 - DNA, 1341 bp, Artificial Sequence
  derived and/or modified sequence
atggtggtgctgaatcccatgacactggggatttacctccaactgttctttctatcaatcgtcagccagcccactttcattaacagcgttctgccaattagcgcagcactgcccagcttggaccagaaaaaacggggaggtcacaaagcctgttgtctcctgaccccacccccacctccgctgttccctcctccctttttcagaggcggacggtctccactcctttcacccgacatgaagaacctgatgctcgaactcgaaactagccagagtccctgcatgcagggctccctgggtagcccaggcccaccagggccacaggggcctcccggactccccggtaaaactggccctaagggagagaagggccgtccaggacctccaggggttcctggcatgccagggccaatcggatggccaggcccagaaggccctcgaggcgagaagggagacctcgggatgatgggtctgcctgggagcaggggaccgatgggctctaaaggctatcctggaagcagaggggagaagggcagtagaggagagaagggggacctcgggcctaagggagaaaaaggattccccggattccccggtatgctgggtcagaaaggcgaaatgggccctaagggcgagcccggtatcgctggtcataggggcccaactggtaggcccggaaagaggggcaagcaggggcagaagggggatagcggtgtgatggggccaccaggaaagcccggtccgtctgggcagcctggtcggcctggccctcctggcccaccaccagccggacagctgatcatgggacccaagggggagagagggttcccgggaccccctggacggtgtttgtgtggcccaactatgaacgtgaataatccttcctatggcgaatctgtgtatggtcctagcagccccagggtccctgtcattttcgtggtgaacaatcaggaagagcttgaaagactcaacacacagaacgctattgcctttcgacgcgaccagcgtagcctgtattttaaggactccctgggctggctgccaatccagctaacacccttctacccggttgactacacggccgaccagcatggcacttgtggggatggtctgcttcagccgggtgaggagtgcgacgatggcaactccgacgttggcgacgattgcattagatgtcaccgggcttattgtggtgacgggcaccgccatgaaggtgtggaagattgtgatggttccgatttcggctatttgacctgtgagacctatcttcccggtagctacggtgatttacagtgtacccagtattgttatatcgacagcactccctgtaggtactttacatag

SEQ ID NO: 158396 - DNA, 2978 bp, Artificial Sequence
  derived and/or modified sequence
cacacgcacacacacacacacaaacacacgcgcacgcaaacagcagtgaggaagagaaaagcagagataagcaaggctccgcagcagcctcctttctaacttgaccctcgccagaccctggccagcatggttgtcctgaatccaatgactttgggaatttatcttcagcttttcttcctctctatcgtgtctcagccgactttcatcaacagcgttcttccaatctcagcagcccttcccagcctggatcagaagaagcgtggtggccacaaagcatgctgcctgctgacgcctcctccaccaccactgttcccaccaccattcttcagaggtggccgaagtccgcttctctccccagacatgaagaatctcatgctggaactggagacctcgcagtccccgtgcatgcaaggctcgctaggctcccctgggcctcccggcccccagggtccaccggggcttcctggcaagacaggaccaaagggagaaaagggtagacctggccccccaggtgttcctggcatgcctgggcccatcggttggccaggccctgaaggacccaggggtgaaaaaggtgacctgggtatgatgggcttgccagggtcaagaggaccaatgggctccaagggctaccctggatccagaggggaaaagggatccagaggtgaaaagggtgacctgggtcccaaaggagaaaagggtttcccaggatttcctggaatgttggggcagaaaggtgaaatgggtccaaaaggtgaacctgggatagcaggacaccgaggacccacaggaagaccaggaaaacgaggcaagcagggacagaaaggggatagtggagttatgggcccaccaggcaagcctgggccttctggtcaacctggccgtccggggcccccaggccccccacctgcaggacaacttataatgggacccaaaggggaaagaggatttcccgggcctccaggaagatgtctttgtggacccactatgaatgtgaataacccttcctacggggaatctgtgtatgggcccagttccccgcgagttcctgtgatttttgtggtcaacaaccaggaggagcttgagaggctgaacacccaaaacgccattgccttccgcagagaccagagatctctgtacttcaaggacagccttggctggctccccatccagctgacccctttctaccctgtggattacactgcagaccagcacggcacctgtggggatgggctcctgcagcctggggaggagtgtgacgacggtaacagcgatgtgggtgacgactgcatccgctgtcaccgtgcctactgtggagatggtcaccggcatgagggtgtggaggactgtgacggctctgactttggctacctgacatgcgagacctatctccctgggtcatatggagacctgcaatgcacccagtactgctacatcgactccacgccctgccgctacttcacctgagggccgtgaggagaaggtgggctgcgccccacagaactggcagcagcttctccactgtcatcaaactggccatgtcctggccccgtctccaccaacctttgtgtgacaaaaacaaggacaaattcctgctactaagacatgctgttaactcagtctgactggaagaatttaggaccactgcatcctgtcttaatccaaggtactggaaaaccttccacatgcccaacctgagacctgttccccatcgctaccatttggccaaacaaccggctacaatgctcttcctcttctggaatgttgctgacccaggccgtggacttggctgagcactgttagacacacacagacctgcaggctgttttagaatgttttgatctctttggggaatctggagtacaggcctctccgcccctgaccaccgaaacgtgcaggcattctcactcacactgggcagcccgctgtcgggtctctctaggcctatgaaccacaaagcagggaagtgggcacgttctctcggggtggctcacagctttgaacctgccaaaggacccctcgactggccacagcccagcccagcctgacgtggatgtggctgcccaggaaaagacttaactgtgaaaaagtactgagaacccacctgacccaggcttgccccaagcagaggctagagaagaggctcctcttctcagtgtttcccaaaggggcggctcttgtggtttcaaaatctctggcaccatcttgacctcttggctctctctgcactttgccccctgtctcaaaaatgtccctcatgtccatttcctgtccaggagactcatgaggactgtgtgacctgcacaagcccacacctgggcaggctgttggtgtctccttggtccttaggcagatactcccctgagtccccgatctagggccagctgcagagggctctctctaggcagagcgttcctggccagagctctacctctttgcctcctgctgacccctgacagcgtcccgtggcatttctttcatgtctgcatattgcatagccttgtcctcctgtgtgcctgagctcctcccttttcaataagattattagtcgtgcatgtctgtgagctgcctttcatcaccatttttcctgagtagggcttagttttattctggaaagacatctccaaggtgaggtccacccccacagcagacctcaagtagaaattgcccaatttttaccagctggagggacacccttgggtttttgtacgaagctatttaatgagcctgtgtcttggggactcagcaggctggagcttggggcctggtggaccatcacctggtgtctgtaggtggacccggtctcccacaggtgacatcaacctgagggtggcgtctttagagacaggcacatgggcagccctgttcccttcgcctctactgcgaggcctggggagatgttgttttcatgctgcttccaccatcacactggggtttctggatgggaaataaaaaaataaaggcagttcatttcccca

SEQ ID NO: 158397 - DNA, 876 bp, Artificial Sequence
  derived and/or modified sequence
atggtggtgctgaaccccatgaccctgggcatctacctgcagctgttcttcctgagcatcgtgagccagcccaccttcatcaacagcgtgctgcccatcagcgccgccctgcccagcctggaccagaagaagagaggcggccacaaggcctgctgcctgctgacccccccccccccccccctgttccccccccccttcttcagaggcggcagaagccccctgctgagccccgacatgaagaacctgatgctggagctggagaccagccagagcccctgcatgcagggcagcctgggcagccccggcccccccggcccccagggcccccccggcctgcccggcaagaccggccccaagggcgagaagggcgagctgggcagacccggcagaaagggcagacccggcccccccggcgtgcccggcatgcccggccccatcggctggcccggccccgagggccccagaggcgagaagggcgacctgggcatgatgggcctgcccggcagcagaggccccatgggcagcaagggctaccccggcagcagaggcgagaagggcagcagaggcgagaagggcgacctgggccccaagggcgagaagggcttccccggcttccccggcatgctgggccagaagggcgagatgggccccaagggcgagcccggcatcgccggccacagaggccccaccggcagacccggcaagagaggcaagcagagcagcagaaccccctgcaccctgcccagaagaccccccgtgccctgcggccagggcagcagaagccccgtgaccgtggtggccggcaaggagagccaggcctgcctgctgcccagattcgaggaggactacatcagcagcggcaccgagagaggctag

SEQ ID NO: 158398 - DNA, 1341 bp, Artificial Sequence
  derived and/or modified sequence
atggtggtgctgaaccccatgaccctgggcatctacctgcagctgttcttcctgagcatcgtgagccagcccaccttcatcaacagcgtgctgcccatcagcgccgccctgcccagcctggaccagaagaagagaggcggccacaaggcctgctgcctgctgacccccccccccccccccctgttccccccccccttcttcagaggcggcagaagccccctgctgagccccgacatgaagaacctgatgctggagctggagaccagccagagcccctgcatgcagggcagcctgggcagccccggcccccccggcccccagggcccccccggcctgcccggcaagaccggccccaagggcgagaagggcagacccggcccccccggcgtgcccggcatgcccggccccatcggctggcccggccccgagggccccagaggcgagaagggcgacctgggcatgatgggcctgcccggcagcagaggccccatgggcagcaagggctaccccggcagcagaggcgagaagggcagcagaggcgagaagggcgacctgggccccaagggcgagaagggcttccccggcttccccggcatgctgggccagaagggcgagatgggccccaagggcgagcccggcatcgccggccacagaggccccaccggcagacccggcaagagaggcaagcagggccagaagggcgacagcggcgtgatgggcccccccggcaagcccggccccagcggccagcccggcagacccggcccccccggccccccccccgccggccagctgatcatgggccccaagggcgagagaggcttccccggcccccccggcagatgcctgtgcggccccaccatgaacgtgaacaaccccagctacggcgagagcgtgtacggccccagcagccccagagtgcccgtgatcttcgtggtgaacaaccaggaggagctggagagactgaacacccagaacgccatcgccttcagaagagaccagagaagcctgtacttcaaggacagcctgggctggctgcccatccagctgacccccttctaccccgtggactacaccgccgaccagcacggcacctgcggcgacggcctgctgcagcccggcgaggagtgcgacgacggcaacagcgacgtgggcgacgactgcatcagatgccacagagcctactgcggcgacggccacagacacgagggcgtggaggactgcgacggcagcgacttcggctacctgacctgcgagacctacctgcccggcagctacggcgacctgcagtgcacccagtactgctacatcgacagcaccccctgcagatacttcacctag

SEQ ID NO: 158399 - protein, 71 aa, Artificial Sequence
  derived and/or modified sequence
MERARDRLHLRRTTEQHVPEVEVQVKRRRTASLSNQECQLYPRRSQQQQVPVVDFQAELRQAFLAETPRGG

SEQ ID NO: 158400 - protein, 94 aa, Artificial Sequence
  derived and/or modified sequence
MEQARDHLHLRWTTEQHMPEVEVQVKYRTAALSNQECQLYLRHSQQQQVLVVDFQAKLRQVFITETPRCGKKPYWNNEEAESKQNPGSIYCLLL

SEQ ID NO: 158401 - DNA, 216 bp, Artificial Sequence
  derived and/or modified sequence
atggaacgagctcgggatcggctgcatctgagaaggaccacggaacagcacgtccccgaagttgaagttcaggtaaaaaggagacgaaccgcgagtctgtccaaccaggagtgccagctgtacccaaggagatcacagcagcagcaggtccctgtggttgacttccaggctgaattgcgacaagcatttctagccgaaactccgaggggcgggtag

SEQ ID NO: 158402 - DNA, 216 bp, Artificial Sequence
  derived and/or modified sequence
atggaaagagcgcgcgaccgcctgcatctccgcaggaccactgagcaacacgttccagaagtcgaagtgcaagtgaagagacggaggaccgcctctttaagtaaccaggagtgccaattgtatccgagacggtcccaacaacaacaagtgccagtggtggacttccaagcagagcttcgccaggccttcttagccgaaacacctcgcggcgggtag

SEQ ID NO: 158403 - DNA, 216 bp, Artificial Sequence
  derived and/or modified sequence
atggagcgggccagagaccggctccacttacggagaactacagagcaacacgttccagaggtagaggtgcaagttaaacgaagacgcaccgcatccctaagtaaccaggaatgccagctttacccacggcgaagccagcagcagcaagtgccagtggtagacttccaggccgagctcagacaggctttcctggccgagacgccgcggggtggctag

SEQ ID NO: 158404 - DNA, 216 bp, Artificial Sequence
  derived and/or modified sequence
atggagcgggcccgggaccggctgcacctgcggaggaccacagagcagcacgtgcctgaggtggaggtgcaggtgaagagaagaagaacagccagcctgagcaaccaggagtgccagctgtaccccaggaggagccagcagcagcaggtgcctgtggtggacttccaggccgagctgcggcaggccttcctggccgagaccccccggggcggctag

SEQ ID NO: 158405 - DNA, 216 bp, Artificial Sequence
  derived and/or modified sequence
atggagcgggcccgggaccggctgcacctgcggcggaccaccgagcagcacgtaccggaggtggaggttcaagtgaagcgcagacgtacggcatccttaagtaaccaagagtgccagttgtacccgcgccgcagccaacaacagcaggtacctgttgtagattttcaagcagaactgcgacaggcatttttggctgaaactccgcggggcggatag

SEQ ID NO: 158406 - DNA, 216 bp, Artificial Sequence
  derived and/or modified sequence
atggagcgggcccgggaccggctgcacctgcggcggaccaccgagcagcatgtgcccgaagtcgaagtgcaggtcaagcggaggcgcacagctagtcttagcaatcaagaatgccaactgtatcctaggagatctcagcagcagcaggtgcccgtggtagacttccaggcggagcttcgtcaagcatttctagccgagacgcccaggggcgggtag

SEQ ID NO: 158407 - DNA, 216 bp, Artificial Sequence
  derived and/or modified sequence
atggagcgggcccgggaccggctgcacctgcggcggaccaccgagcagcacgtgccggaggtggaggttcaggtaaagagaaggcggaccgccagtctgtcaaaccaggaatgtcagctatatccccgtcggagtcaacaacaacaggtacccgtggtggacttccaagccgaactgaggcaggcctttctggctgaaactccgcggggaggctag

SEQ ID NO: 158408 - DNA, 331 bp, Artificial Sequence
  derived and/or modified sequence
ctgacgcatctgtctgaggagcggtcagtgacgcgatggagcgggcaagggatcgcttacacctgagacgaactacagaacagcacgtaccagaggtggaagtccaagtcaaacgcagaaggactgcctcactgagcaaccaagagtgtcagttgtacccgaggcgttctcagcagcagcaagtacctgtggtggatttccaggctgaactgaggcaggcattcttagctgagacaccaagaggtggttaaagccatattggagtagcgaggaatctgattccaagcaaaaaccagacaatgtaataaaaatattattcataatttttcaa

SEQ ID NO: 158409 - DNA, 587 bp, Artificial Sequence
  derived and/or modified sequence
gcggtcagtgacgcgatggagcgggcaagggatcgcttacacctgagacgaactacagaacagcacgtaccagaggtggaagtccaagtcaaacgcagaaggactgcctcactgagcaaccaagagtaatgactccacagggaagaggcactgtagcagctgctgctgttgctgcgactgccagtattgctggagccccaacacagtacccaccaggacggggcactccgcccccacccgtcggcagagcaaccccacctccaggcattatggctcctccacctggtatgagaccacccatgggcccaccaattgggcttccccctgctcgagggacgccaataggcatgccgcctccgggaatgagaccccctccaccaggcattagaggggaagcatttctccttgcattggtttgctggtatggatggcccttagattttggcatgagtgattatgcagcctatttgaagaaaacctgttttcaggacctttttaattaaatatggcctgttacatgagttaaaggcaatcaggatgagtgaaaaattgatttgcagctgacctgcaaatggaatcatcaggaa

SEQ ID NO: 158410 - DNA, 1325 bp, Artificial Sequence
  derived and/or modified sequence
gcggtcagtgacgcgatggagcgggcaagggatcgcttacacctgagacgaactacagaacagcacgtaccagaggtggaagtccaagtcaaacgcagaaggactgcctcactgagcaaccaagagtgtcagttgtacccgaggcgttctcagcagcagcaagtacctgtggtggatttccaggctgaactgaggcaggcattcttagctgagacaccaagaggtggttaaagccatattggagtagcgaggaatctgattccaagcaaaaaccaggtggtaatcactcaaggaaaaggaattatcagagtaacaatagttcctgttactgacttgatatggtctctgccagaatagcttctcagattaatggccactctcaggggaagcatttctccttgcattggtttgctggtatggatggcccttagattttggcatgagtgattatgcagcctatttgaagaaaacctgttttcaggacctttttaattaaatatggcctgttacatgagttaaagtgtcatacgataccattttttgaccacttagttgatgcctctgaaaggaagagagaatcagatcgctaaaatttgatgtgtcgtcagtgtggatcctactcagtagtgtcacaacgaggctgaaaatcatattaagtgcttttaggacagaaacgtaaactgctcaggtaaaataaccttataaagagaaataagcatatattgcagaggccttggctaggttcatgatgacacaggaccttgtctgaacataatgatttcaaaatttgagcttaaaaatgacactctgaaatccagtcagtgtgcctcactagacttttcgatttcaagattttctgcagaaaatgttttgaaaactttgaatacttaaaaatggcaggtgtagtattgcactttgctagttgctcagatacccttttttatttgtatagatattctgagttcctttttttttctacatgttgtacgttgtcgaaagctaaaaggaaacttatccttggatcacggaaggcagaggcatttggtgagatggaaacaaggatgtgtaaaaatgagacgaccacctctcggattaaaaaaaaaaagtgccagagttctagggttctaagtgatgtccaggaaggaggaggaataatatttatggagcatatattatggaacacagcaatcaggatgagtgaaaaattgatttgcagctgacctgcaaatggaatcatcaggaacatccctttctcatggagtcccttaatttacaagttaactgcaaacataggagatgatagttccaagaaggaacattttatc

SEQ ID NO: 158411 - DNA, 216 bp, Artificial Sequence
  derived and/or modified sequence
atggaaagggcaagggatcggctgcacctaagaagaacaaccgagcagcatgtccccgaggttgaagtgcaggttaaacgcagacgaactgccagcttatctaatcaggagtgccagctttaccccagaaggtctcaacagcagcaggtaccagtcgtcgattttcaggcagaacttcggcaggccttcctcgcagaaaccccgcgtggtgggtag

SEQ ID NO: 158412 - DNA, 216 bp, Artificial Sequence
  derived and/or modified sequence
atggagcgggctcgcgatcgtctccacttacggagaacaaccgagcagcacgttccagaggtggaggtgcaggtaaagcgcaggcggaccgccagcctgagcaatcaggaatgccagctgtatcctcgacgcagccagcagcagcaagtcccagttgtagattttcaggccgagctgaggcaagcctttctggcagaaacgccaagaggagggtag

SEQ ID NO: 158413 - DNA, 216 bp, Artificial Sequence
  derived and/or modified sequence
atggagcgggctagggatcgactgcacttgcgtcgtaccacagaacagcatgtgccagaggtggaggtgcaggtcaaacggcgtcggacagcttctctctcgaaccaagaatgtcagctgtacccgagaaggtcccagcagcagcaggtgccggtggtcgatttccaggccgagctgcgacaggcatttttggccgaaaccccgaggggcggttag

SEQ ID NO: 158414 - DNA, 216 bp, Artificial Sequence
  derived and/or modified sequence
atggagagagccagagacagactgcacctgagaagaaccaccgagcagcacgtgcccgaggtggaggtgcaggtgaagagaagaagaaccgccagcctgagcaaccaggagtgccagctgtaccccagaagaagccagcagcagcaggtgcccgtggtggacttccaggccgagctgagacaggccttcctggccgagacccccagaggcggctag

SEQ ID NO: 158415 - DNA, 285 bp, Artificial Sequence
  derived and/or modified sequence
atggagcaggccagagaccacctgcacctgagatggaccaccgagcagcacatgcccgaggtggaggtgcaggtgaagtacagaaccgccgccctgagcaaccaggagtgccagctgtacctgagacacagccagcagcagcaggtgctggtggtggacttccaggccaagctgagacaggtgttcatcaccgagacccccagatgcggcaagaagccctactggaacaacgaggaggccgagagcaagcagaaccccggcagcatctactgcctgctgctgtag

SEQ ID NO: 158416 - DNA, 285 bp, Artificial Sequence
  derived and/or modified sequence
atggaacaggctcgcgatcatctccacttgaggtggactaccgaacagcacatgcctgaggtggaggtccaagtaaagtatcgcactgcggcactgtctaatcaagagtgccagttgtatctgaggcactctcagcagcagcaagtgctagtcgtggacttccaagccaaactgcgacaggtgtttatcacggagacgccaaggtgcggcaaaaagccttactggaacaatgaagaggccgaatccaagcagaatccaggctcaatttattgcctattgctctag

SEQ ID NO: 158417 - DNA, 285 bp, Artificial Sequence
  derived and/or modified sequence
atggagcaggcccgggaccacctgcacctgcgctggaccacagagcagcacatgcctgaggtggaggtgcaggtgaagtacagaacagctgccctgagcaaccaggagtgccagctgtacctgcggcacagccagcagcagcaggtgctggtggtggacttccaggccaagctgcggcaggtgttcatcacagagaccccccgctgtgggaagaagccctactggaacaatgaggaggccgagagcaagcagaaccctggcagcatctactgcctgctgctgtag

SEQ ID NO: 158418 - DNA, 285 bp, Artificial Sequence
  derived and/or modified sequence
atggagcaggcccgggaccacctgcacctgcggtggaccaccgagcaacatatgccagaggtagaagttcaggttaaataccgcaccgctgccctcagcaatcaggagtgtcaattatacctgaggcacagtcagcagcagcaagtgctggttgtggactttcaggccaagctcaggcaggtgttcattactgaaacacctcggtgtggcaagaaaccttactggaataacgaggaggcagagagcaagcagaatcccgggtcaatctattgccttctgttgtag

SEQ ID NO: 158419 - DNA, 285 bp, Artificial Sequence
  derived and/or modified sequence
atggagcaggcgagggatcacttacacctccgttggacaacagaacagcacatgcccgaggtggaagtccaagttaaatacaggaccgcagcactctccaatcaagagtgccaactgtatctccgccactcacagcaacagcaggtgttggtggtggactttcaagctaagctgcgtcaggttttcattactgaaactcctaggtgtggtaaaaagccatattggaacaacgaggaggccgaatcgaaacagaatcccggatccatctactgcctgctgttgtag

SEQ ID NO: 158420 - DNA, 343 bp, Artificial Sequence
  derived and/or modified sequence
agagtggagtggctgtcagagatgcctgatgttttggcctaaggaccagtcagtgaggcaatggagcaagcaagggatcacttacacctgagatggactacagaacagcacatgcccgaggtggaagttcaagtcaaatacagaacagctgcactgagcaaccaagagtgtcaattgtacctgaggcattctcagcagcagcaagtgcttgtggtggatttccaggccaaactgagacaggtattcataactgagacaccaagatgtggtaaaaagccgtactggaacaatgaggaagctgaatccaagcaaaatccaggctccatctactgtttgcttctgc

SEQ ID NO: 158421 - protein, 588 aa, Artificial Sequence
  derived and/or modified sequence
MDLEEAEEFKERCTQCAAVSWGLTDEGKYYCTSCHNVTERYQEVTNTDLIPNTQIKALNRGLKKKNNTEKGWDWYVCEGFQYILYQQAEALKNLGVGPELKNDVLHNFWKRYLQKSKQAYCKNPVYTTGRKPTVLEDNLSHSDWASEPELLSDVSCPPFLESGAESQSDIHTRKPFPVSKASQSETSVCSGSLDGVEYSQRKEKGIVKMTMPQTLAFCYLSLLWQREAITLSDLLRFVEEDHIPYINAFQHFPEQMKLYGRDRGIFGIESWPDYEDIYKKTVEVGTFLDLPRFPDITEDCYLHPNILCMKYLMEVNLPDEMHSLTCHVVKMTGMGEVDFLTFDPIAKMAKTVKYDVQAVAIIVVVLKLLFLLDDSFEWSLSNLAEKHNEKNKKDKPWFDFRKWYQIMKKAFDEKKQKWEEARAKYLWKSEKPLYYSFVDKPVAYKKREMVVNLQKQFSTLVESTATAGKKSPSSFQFNWTEEDTDRTCFHGHSLQGVLKEKGQSLLTKNSLYWLSTQKFCRCYCTHVTTYEESNYSLSYQFILNLFSFLLRIKTSLLHEEVSLVEKKLFEKKYSVKRKKSRSKKVRRH

SEQ ID NO: 158422 - DNA, 1703 bp, Artificial Sequence
  derived and/or modified sequence
attcccgcgtttccggccggaacggttctccagcctttcccggaagctgcgctcgctacccgggtaacggtcccggctgtggaagctcccgcggcgccgcgattggacctcgaggagtcggaagagtttaaagaacgctgtactcagtgtgctgctgtctcatggggtcttactgatgaaggcaaatattattgcacttcttgccacaatgttacagagagatatcaggaagttacaaacactgatcttattcctaatacccaaataaaagccctcaaccgggggcttaaaaaaaaaaacaatactgaaaaaggctgggattggtatgtgtgtgaaggtttccagtatattctttatcaacaagcagaagccttaaagaaccttggagtaggcccagagttaaagaacgatgttttacataatttttggaagcgctaccttcagaagagcaagcaggcatattgtaagaacccagtttataccactggaaggaaacctacggtattagaagataatctaagtcattcagactgggctagtgagcctgagctgctaagtgatgtcagctgtcctccttttcttgaaagtggagcggagtctcagtctgacatccacactcgaaaacctttccccgtcagcaaagcatcacaatcagaaacgtctgtctgctctggatctctggatggagttgaatactcacaacgaaaggagaagggaatcgtgaagatgaccatgccacagacacttgccttctgttatctgtccttactttggcagagagaagcaataacactttcagatcttttgaggtttgttgaagaggaccatattccttacataaatgcttttcagcattttccagaacagatgaaattatatggacgtgacagaggaatctttggtatagagtcttggcctgactacgaggacatctataaaaaaacaatagaagttggaacatttttagatttgcctcgttttccagacataactgaagactgctatcttcatcccaacatactgtgtatgaaatacttgatggaagtcaacctccctgatgaaatgcatagcttaacttgccacgtggtaaaaatgactggaatgggagaagtggattttctgacatttgatcctatagccaaaatggcaaaagctgttaagtacgatgtacaagctgtagctatcattgtggtggtattgaaactgctctttctaatggatgacagtttcgagtggtctttgtctaatcttgctgaaaagcataatgaaaagaacaaaaaagataagccatggtttgatttcagaaagtggtaccaaattatgaagaaagcttttgatgagaaaaaacaaaaatgggaagaagcaagggccaagtacctgtggaaaagtgaaaagccactctactactcatttgtcgacaaaccagtagcatataaaaaaagagaaatggtggtgaatctacagaaacaatttagcacactggtcgattcaacagcaactgctggaaaaaaaagcccttcaagttttcagttcaactggactgaagaggacactgatagaacgtgtttccatggacacagccttcagggagtcctgaaagagaaaggccaatcactgctgactaagaattcattatattggcttagtacacagaaattctgcagatggtaataatgcttttagaaaaagtcacatataattga

SEQ ID NO: 158423 - DNA, 1767 bp, Artificial Sequence
  derived and/or modified sequence
atggacctcgaggaagccgaagagttcaaagagcggtgtactcaatgtgccgctgttagttggggtctcaccgatgaggggaagtactactgtaccagctgccacaacgtgaccgaaagataccaggaagttacaaacaccgatctgattcccaatactcagattaaagctctcaatcgcggactcaaaaaaaagaacaacacagagaaggggtgggattggtatgtgtgcgagggcttccagtacatcttataccagcaagccgaggccctcaagaacctgggggtgggaccagaactcaaaaacgatgtcctccacaacttttggaagcgatacctgcagaagtccaaacaggcgtactgtaagaacccagtgtacactacaggccgaaagcccactgtccttgaggataacctgtcccatagtgattgggcctccgagccggagctgctgtcagatgtgtcgtgccctcccttcttggagtcaggggcagaatcccagagcgacattcacacacgcaaaccttttccggtatcaaaggcctcacagagcgagacctccgtgtgttccggttccctcgacggggtggaatactctcaacgaaaggaaaaaggaattgtcaagatgaccatgccgcagacgcttgcgttctgttatctgagccttctgtggcagcgagaggctattactcttagcgacttgctgcggttcgtcgaggaggaccacattccctacatcaatgccttccaacactttccagaacaaatgaagctctatggccgggatagaggcatctttggcatagagtcatggccagactatgaggatatttataagaaaaccgtagaagtcggcactttcctggacttgcccagatttccagatatcaccgaagattgttatctgcatcccaatatactgtgcatgaaatatctgatggaggtgaacttaccagatgagatgcactccctcacatgccatgtggttaagatgaccggcatgggagaagtcgatttcctgaccttcgatcctattgccaaaatggcaaaaaccgtgaaatacgatgtacaggccgtggcgatcatcgtggtggtcctgaaactgctatttctactggacgacagttttgagtggagcctttctaacctagcagagaagcacaatgagaaaaacaagaaggacaagccttggttcgactttagaaagtggtatcagatcatgaaaaaggccttcgatgagaagaagcaaaagtgggaggaggctcgcgctaagtatctctggaagtccgagaaacccctgtactacagctttgtggacaaacctgtggcttacaagaaacgagaaatggtcgtgaatctgcagaaacaattcagcacactggttgagtccacagctacagctggtaagaagagtccttcctctttccagtttaactggactgaagaggatactgataggacctgtttccatggccattcactccagggggtgctgaaggagaaggggcagtcactgctgactaaaaactccctgtactggctaagtacccagaagttttgccgctgttactgcacccacgtcacaacctatgaggagtcgaattactcactgtcatatcaatttattctaaacctattttctttccttttgcggattaagacatcccttctccacgaggaggtctcactcgtggagaaaaagctgttcgagaaaaaatacagcgtaaaacgcaagaaatccagatcgaagaaagtgaggcgccactag

SEQ ID NO: 158424 - DNA, 1767 bp, Artificial Sequence
  derived and/or modified sequence
atggacctggaggaggccgaggagttcaaggagcgctgcacccagtgtgccgctgtgtcctggggcctgacagatgagggcaagtactactgcaccagctgccacaacgtgacagagcgctaccaggaggtgaccaacacagacctgatccccaacacccagatcaaggccctgaacagaggcctgaagaagaagaacaacacagagaagggctgggactggtacgtgtgtgagggcttccagtacatcctgtaccagcaggccgaggccctgaagaacctgggcgtgggccctgagctgaagaatgatgtgctgcacaacttctggaagcgctacctgcagaagagcaagcaggcctactgcaagaaccctgtgtacaccaccggcaggaagcccaccgtgctggaggacaacctgagccacagcgactgggccagcgagcctgagctgctgagtgatgtgtcctgcccccccttcctggagagcggggctgagagccagagcgacatccacaccaggaagcccttccctgtgtccaaggccagccagagcgagacctctgtgtgcagcggcagcctggatggagtggagtacagccagaggaaggagaagggcatcgtgaagatgaccatgccccagaccctggccttctgctacctgagcctgctgtggcagcgggaggccatcaccctgagtgacctgctgcgctttgtggaggaggaccacatcccctacatcaatgccttccagcacttccctgagcagatgaagctgtatggccgggaccggggcatcttcggcatcgagagctggccagactatgaggacatctacaagaagacagtggaggtgggcaccttcctggacctgccccgcttcccagacatcacagaggactgctacctgcaccccaacatcctgtgcatgaagtacctgatggaggtgaacctgcctgatgagatgcacagcctgacctgccacgtggtgaagatgacaggcatgggagaggtggacttcctgacctttgaccccatcgccaagatggccaagacagtgaagtatgatgtgcaggccgtggccatcatcgtggtggtgctgaagctgctcttcctgctggatgacagctttgagtggagcctgagcaacctggccgagaagcacaatgagaagaacaagaaggacaagccctggtttgacttcaggaagtggtaccagatcatgaagaaggcctttgatgagaagaagcagaagtgggaggaggcccgggccaagtacctgtggaagtctgagaagcccctgtactacagctttgtggacaagcctgtggcctacaagaagcgggagatggtggtgaacctgcagaagcagttcagcaccctggtggagagcacagccacagctgggaagaagagccccagcagcttccagttcaactggacagaggaggacacagacaggacctgcttccacggccacagcctgcagggcgtgctgaaggagaagggccagagcctgctgaccaagaacagcctgtactggctgagcacccagaagttctgccgctgctactgcacccacgtgaccacctatgaggagagcaactacagcctgagctaccagttcatcctgaacctcttctccttcctgctgcgcatcaagaccagcctgctgcacgaggaggtgtccctggtggagaagaagctgtttgagaagaagtacagcgtgaagaggaagaagagccgcagcaagaaggtgcggcggcactag

SEQ ID NO: 158425 - DNA, 1767 bp, Artificial Sequence
  derived and/or modified sequence
atggacctggaggaggccgaggagttcaaggagcggtgcacccagtgcgctgctgtgtcttgggggctgacagacgaggggaaatactactgtacttcttgtcacaacgtgacagagaggtaccaggaagtcaccaataccgatctgatccccaatacgcagattaaagcccttaacaggggcctgaaaaaaaagaacaacaccgaaaaggggtgggattggtatgtctgcgagggttttcagtacatactctatcaacaggccgaggccctgaaaaacctgggcgttggacctgagcttaagaacgacgtccttcacaacttctggaagagatatctgcagaagtctaaacaagcctactgcaaaaacccagtgtatactaccggccggaagcctaccgtgcttgaagataaccttagccacagtgattgggcctctgaaccagagttgctcagcgatgtgtcttgccccccgtttctggaaagcggcgccgaatcacaaagtgacatacatactcgtaagccctttcctgtctctaaagcctctcagagtgaaaccagtgtgtgcagcggcagcctcgacggtgttgaatactcacagagaaaagagaagggaatagtcaaaatgaccatgccccagactctggccttttgctatcttagtctgttatggcagcgcgaggctatcacgctcagtgatcttttacgctttgtggaagaggatcacatcccctacattaacgcgtttcagcattttccagagcagatgaaactttatgggcgcgatcgcggaattttcggtatagaaagctggcctgattatgaagatatctacaagaagacagtggaagtgggaacatttcttgacctgcccagatttcctgacattactgaggattgctacctgcacccaaacatcctgtgcatgaagtaccttatggaggtcaacctgcccgatgagatgcacagtcttacctgccacgtcgttaagatgacgggcatgggtgaggttgatttcctcacttttgaccctatcgctaagatggccaagacagtgaaatacgatgtccaggcagtagccatcattgtcgtggttttaaagctgcttttcctgctcgacgactctttcgaatggtcactgagcaatctcgccgaaaagcacaatgagaagaacaaaaaagacaaaccatggttcgacttccgcaagtggtaccagattatgaagaaggcctttgacgagaaaaagcagaagtgggaagaggccagagccaaatacttatggaaaagcgaaaaacctctgtactattctttcgtagacaaaccagtggcctacaaaaagcgcgagatggtggtaaatctgcaaaagcagtttagtacattagttgaatctactgccactgcagggaaaaaatccccctcgtcgtttcaattcaattggaccgaggaggatacagataggacctgcttccacggccactcactgcagggggtcttgaaagaaaagggccagtcactccttacaaaaaactcgctgtactggctgtcgacgcagaagttttgtcgctgttattgcacccacgtgaccacttatgaagaatccaattacagtttatcatatcagtttattctaaaccttttctctttcctcctgcgtattaagactagcctgctgcatgaggaagtgagtttagtcgaaaaaaagttatttgagaaaaagtactccgttaaaagaaaaaagagccgatctaagaaggtccgccgacactag

SEQ ID NO: 158426 - DNA, 2379 bp, Artificial Sequence
  derived and/or modified sequence
gtccgcgaggggtctgcgagctttgcggagcctcgcccccgagcgcgcggtttccctgccgcgcaggcgcacggaatcctaggcgcggatctcgcgtttccggccggaagcttctccagcctttcccggaagctgcgctcgctacccgggtaacgggtcccggctgtggaagctcccgcggcgccgcgatggacctcgaggaggcggaagagtttaaagaacgctgtactcagtgtgctgctgtctcatggggtcttactgatgaaggcaaatattattgcacttcttgccacaatgttacagagagatatcaggaagttacaaacactgatcttattcctaatacccaaataaaagccctcaaccgggggcttaaaaaaaaaaacaatactgaaaaaggctgggattggtatgtgtgtgaaggtttccagtatattctttatcaacaagcagaagccttaaagaaccttggagtaggcccagagttaaagaacgatgttttacataatttttggaagcgctaccttcagaagagcaagcaggcatattgtaagaacccagtttataccactggaaggaaacctacggtattagaagataatctaagtcattcagactgggctagtgagcctgagctgctaagtgatgtcagctgtcctccttttcttgaaagtggagcggagtctcagtctgacatccacactcgaaaacctttccccgtcagcaaagcatcacaatcagaaacgtctgtctgctctggatctctggatggagttgaatactcacaacgaaaggagaagggaatcgtgaagatgaccatgccacagacacttgccttctgttatctgtccttactttggcagagagaagcaataacactttcagatcttttgaggtttgttgaagaggaccatattccttacataaatgcttttcagcattttccagaacagatgaaattatatggacgtgacagaggaatctttggtatagagtcttggcctgactacgaggacatctacaaaaaaacagtagaagttggaacatttttagatttgcctcgttttccagacataactgaagactgctatcttcatcccaacatactgtgtatgaaatacttgatggaagtcaacctccctgatgaaatgcatagcttaacttgccacgtggtaaaaatgactggaatgggagaagtggattttctgacatttgatcctatagctaaaatggcaaaaactgttaagtacgatgtacaagctgtagctatcattgtggtggtattgaaactgctctttctattggatgacagtttcgagtggtctttgtctaatcttgctgaaaagcataatgaaaagaacaaaaaagataagccatggtttgatttcagaaagtggtaccaaattatgaagaaagcttttgatgagaaaaaacaaaaatgggaagaagcaagggccaagtacctgtggaaaagtgaaaagccactctactactcatttgtcgacaaaccagtagcatataaaaaaagagaaatggtggtgaatctacagaaacaatttagcacactggtcgagtcaacagcaactgctggaaaaaaaagcccttcaagttttcagttcaactggactgaagaggacactgatagaacgtgtttccatggacacagccttcagggagtcctgaaagagaaaggccaatcactgctgactaagaattcattatattggcttagtacacagaaattctgcagatgctattgtacacatgtgacaacctatgaagaatcaaattattctctgagttatcagtttatactaaatctcttctccttcctgctcagaataaagacttcccttctccatgaagaagtgagcttagttgagaagaaactttttgagaaaaaatacagtgtaaaaagaaagaaatcaagatccaagaaagtgagacgacattgagaaaatgaaatagaaactttctggaaaaatattttaatagtgataataacatcagattttaatataacattccagagaattgtggaaaatactgcatatatatgtatagactctgacacatatttacatatatatcaagtgtgcttagaaaaatgtatattgtaaagcaggtgagcttcatttgattttatttttcagagtatgaacattctaagagaaagttaaaacaatagcaaattgtataattgtatccagaaatgtatactcatcgtattttaaagctaaatttattttttaaactagatcccttcattattctttatgccccagagtaaatcccagatggatcaaagatctaaacataatctttcatatgtaaaaatataaaagtattagtagaaaacaaatatgaatgctttgatga

SEQ ID NO: 158427 - DNA, 1767 bp, Artificial Sequence
  derived and/or modified sequence
atggacctagaggaggctgaagagttcaaagaacgatgtacgcagtgcgcagccgtctcctggggcctgaccgatgaaggaaagtactattgtacttcctgccataacgtcaccgagcgatatcaggaggttacaaatacggatttgatccccaacactcaaataaaagctctaaacagggggctgaagaagaagaataacaccgaaaagggctgggattggtacgtctgtgaggggtttcagtatatcctctaccagcaagctgaagctcttaaaaatcttggcgttggtccagaacttaaaaatgacgtgctacacaacttctggaagagatacctgcagaagtccaagcaggcatattgtaagaacccagtgtatacaaccggacggaagccaacagttctggaggacaatctctctcactccgactgggccagcgaacccgaactgctgagcgacgtgagctgccctccattcctggagagtggggcagaatcacagagcgacatccacaccagaaaaccatttccggtaagcaaggcaagccagtccgaaaccagcgtgtgctctgggagtctcgatggcgtcgagtactcccaaagaaaggaaaagggtatagtcaagatgaccatgccacagactctggcgttttgttacctatcgctgctgtggcaaagggaggccataactctatcagatttgctgcggttcgttgaagaggatcatattccgtacattaacgccttccagcattttcccgagcagatgaaattgtatggccgagataggggcatttttgggattgagagctggcccgactacgaggatatatataaaaagaccgtggaggtgggaaccttcctcgacctcccacggtttcccgacatcaccgaagactgctacctgcaccctaatattttgtgcatgaagtacctgatggaagtcaatctgcccgatgaaatgcattcactgacgtgccacgttgttaagatgactgggatgggagaggtggatttcctgacatttgatcccattgctaagatggctaaaactgtcaagtatgatgtccaagctgtcgcaattattgtggtggtacttaagcttctgtttcttttagatgactctttcgagtggagcctgtccaatttggccgaaaagcataatgagaaaaacaaaaaggacaagccttggttcgactttagaaaatggtaccagatcatgaagaaagcttttgacgagaaaaaacaaaaatgggaggaagccagagctaaatacttgtggaagtcagagaaaccactttattactcctttgttgacaagccggtggcttacaaaaaacgcgagatggtcgtaaacttgcagaagcagttctcaaccttggtggagtcaacagcaaccgccggtaagaagagcccttcgagttttcagttcaattggacagaggaagacaccgacagaacatgctttcacggccactctttgcagggagttcttaaggaaaaagggcagagcctcctcacgaaaaattctctctactggctgagcacccagaagttttgcagatgttactgtacgcacgtcacaacatacgaagaatcaaactactccttgtcttaccagttcatcctcaacttgttcagcttcctgctaagaatcaaaacaagcttgctccacgaagaggtgtccctggttgaaaagaagttattcgagaaaaaatattcggtaaagaggaagaaatccaggtcaaagaaggtccggcgacattag

SEQ ID NO: 158428 - DNA, 1767 bp, Artificial Sequence
  derived and/or modified sequence
atggacctggaggaggccgaggagttcaaggagagatgcacccagtgcgccgccgtgagctggggcctgaccgacgagggcaagtactactgcaccagctgccacaacgtgaccgagagataccaggaggtgaccaacaccgacctgatccccaacacccagatcaaggccctgaacagaggcctgaagaagaagaacaacaccgagaagggctgggactggtacgtgtgcgagggcttccagtacatcctgtaccagcaggccgaggccctgaagaacctgggcgtgggccccgagctgaagaacgacgtgctgcacaacttctggaagagatacctgcagaagagcaagcaggcctactgcaagaaccccgtgtacaccaccggcagaaagcccaccgtgctggaggacaacctgagccacagcgactgggccagcgagcccgagctgctgagcgacgtgagctgcccccccttcctggagagcggcgccgagagccagagcgacatccacaccagaaagcccttccccgtgagcaaggccagccagagcgagaccagcgtgtgcagcggcagcctggacggcgtggagtacagccagagaaaggagaagggcatcgtgaagatgaccatgccccagaccctggccttctgctacctgagcctgctgtggcagagagaggccatcaccctgagcgacctgctgagattcgtggaggaggaccacatcccctacatcaacgccttccagcacttccccgagcagatgaagctgtacggcagagacagaggcatcttcggcatcgagagctggcccgactacgaggacatctacaagaagaccgtggaggtgggcaccttcctggacctgcccagattccccgacatcaccgaggactgctacctgcaccccaacatcctgtgcatgaagtacctgatggaggtgaacctgcccgacgagatgcacagcctgacctgccacgtggtgaagatgaccggcatgggcgaggtggacttcctgaccttcgaccccatcgccaagatggccaagaccgtgaagtacgacgtgcaggccgtggccatcatcgtggtggtgctgaagctgctgttcctgctggacgacagcttcgagtggagcctgagcaacctggccgagaagcacaacgagaagaacaagaaggacaagccctggttcgacttcagaaagtggtaccagatcatgaagaaggccttcgacgagaagaagcagaagtgggaggaggccagagccaagtacctgtggaagagcgagaagcccctgtactacagcttcgtggacaagcccgtggcctacaagaagagagagatggtggtgaacctgcagaagcagttcagcaccctggtggagagcaccgccaccgccggcaagaagagccccagcagcttccagttcaactggaccgaggaggacaccgacagaacctgcttccacggccacagcctgcagggcgtgctgaaggagaagggccagagcctgctgaccaagaacagcctgtactggctgagcacccagaagttctgcagatgctactgcacccacgtgaccacctacgaggagagcaactacagcctgagctaccagttcatcctgaacctgttcagcttcctgctgagaatcaagaccagcctgctgcacgaggaggtgagcctggtggagaagaagctgttcgagaagaagtacagcgtgaagagaaagaagagcagaagcaagaaggtgagaagacactag

SEQ ID NO: 158429 - protein, 361 aa, Artificial Sequence
  derived and/or modified sequence
MNESRWTEWRILNMSSGIVNVSERHSCPLGFGHYSVVDVCIFETVVIVLLTFLIIAGNLTVIFVFHCAPLLHHYTTSYFIQTMAYADLFVGVSCLVPTLSLLHYSTGVHESLTCQVFGYIISVLKSVSMACLACISVDRYLAITKPLSYNQLVTPCRLRICIILIWIYSCLIFLPSFFGWGKPGYHGDIFEWCATSWLTSAYFTGFIVCLLYAPAAFVVCFTYFHIFKICRQHTKEINDRRARFPSHEVDSSRETGHSPDRRYAMVLFRITSVFYMLWLPYIIYFLLESSRVLDNPTLSFLTTWLAISNSFCNCVIYSLSNSVFRLGLRRLSETMCTSCMCVKDQEAQEPKPRKRANSCSI

SEQ ID NO: 158430 - DNA, 1472 bp, Artificial Sequence
  derived and/or modified sequence
tgtagccaagtctgcaggtgtctttaaatttccaagccatgaatgaatccaggtggactgaatggaggatcctgaacatgagcagtggcattgtgaatgtgtccgagcgtcactcctgcccacttggatttggccactacagtgtggtggatgtctgcatcttcgagacagtggttattgtgttgctgacatttctgatcattgctgggaatctaacagttatctttgtctttcattgtgctccactgttacatcattatactaccagctatttcattcagacgatggcatatgctgatcttttcgttggagttagctgcttggttcctactctgtcacttctccactactccacaggtgtccacgagtcattgacttgccaggtttttggatatatcatctcagttctaaaaagtgtttctatggcatgtcttgcttgcatcagtgtggatcgttatcttgcaataaccaagcctctttcctacaatcaactggtcaccccttgtcgcttgagaatttgcattattttgatctggatctactcctgcctaattttcttgccttccttttttggctgggggaaacctggttaccatggtgacatttttgaatggtgtgccacgtcttggctcaccagtgcctattttactggctttattgtttgtttactttatgctcctgctgcctttgttgtctgcttcacttacttccacattttcaaaatttgccgtcagcacaccaaagagataaatgaccgaagagcccgattccctagtcatgaggtagattcttccagagagactggacacagccctgaccgtcgctacgccatggttttgtttaggataaccagtgtattttatatgctgtggctcccctatataatttactttcttctagaaagctcccgggtcttggacaatccaactctgtccttcttaacaacctggcttgcaataagtaatagtttttgtaactgtgtaatatacagcctctccaacagcgttttccggctaggcctccgaagactgtctgagacaatgtgcacatcctgtatgtgtgtgaaggatcaggaagcacaagaacccaaacctaggaaacgggctaattcttgctccatttgaagagagctacatagtaaatcaaatgtaatctgacagtggttttggatcatattctagattcatctggaaatttgccatcagagaaatatttacttgaatagttgactgtaaaatgaagtatgagactaaaggtttctctctttttttttctttttcatggaagaaactaaagggaaggatgtatagagggttagctcatgaaataattatagcatgtgagtattagtgtgcagtaataggaaaaattaagcactgagatgaaaaagaatatctcaaatcttctgcaggacatgagcaagccccttggctcagcatttctgtctttctgtctgactgtaccctgcctct

SEQ ID NO: 158431 - DNA, 1086 bp, Artificial Sequence
  derived and/or modified sequence
atgaacgagtccaggtggaccgagtggcggatcctcaatatgtcgtcgggaattgttaacgtctcagaaagacacagttgcccactgggcttcggccactatagcgtggttgatgtctgcatattcgaaaccgtcgtgatcgtattattaacatttctgattatagccggaaatcttacagtcattttcgtgttccactgtgctccgctgctccaccactatacaacaagttactttatccagactatggcttatgccgacttgttcgtaggcgtgtcttgcctcgttcccacactcagccttcttcactatagtaccggagtgcatgagtctctcacttgccaggtgttcggctacattatctctgtgctgaagtccgtgagcatggcttgcctcgcgtgtattagcgtggaccggtatcttgcaatcactaagccgttaagctacaatcaactggttaccccttgtaggctgaggatctgtatcatacttatatggatctacagctgtctgatcttcctccctagcttctttggctggggaaaacctgggtaccacggagatatctttgagtggtgtgctacttcatggctaacttcagcttattttactggcttcatcgtgtgcctcctgtatgctccagcagcattcgttgtctgctttacatatttccacatttttaaaatctgccgccaacacacaaaagagattaacgacaggagggctagattcccatctcacgaggtggatagtagccgcgagactggccatagcccagatagaaggtacgccatggtgttattccggatcaccagcgtattttacatgctatggctgccctatatcatatacttcttactagagtcatctcgcgttctcgacaaccctacattgagcttcctgactacctggctagctatctccaactccttttgcaattgtgttatctatagcctgtcaaattcagttttcaggctggggttgcgacgtctgtctgagaccatgtgcacttcatgtatgtgtgtcaaggaccaggaagcacaagaacctaaacctaggaagcgagcaaactcttgtagcatctag

SEQ ID NO: 158432 - DNA, 1086 bp, Artificial Sequence
  derived and/or modified sequence
atgaatgaaagccgctggacagagtggaggatcctgaacatgagcagcggcatcgtgaatgtgtctgagcggcacagctgccccctgggcttcggccactacagcgtggtggatgtgtgcatctttgagaccgtggtgattgtgctgctgaccttcctgatcatcgccggcaacctgaccgtcatctttgtgttccactgtgcccccctgctgcaccactacaccaccagctacttcatccagaccatggcctatgctgacctgtttgtgggcgtgtcctgcctggtgcccaccctgagcctgctgcactacagcactggagtgcatgagagcctgacctgccaggtgtttggctacatcatctctgtgctgaagtctgtgtccatggcctgcctggcctgcatctctgtggaccgctacctggccatcaccaagcccctgagctacaaccagctggtgaccccctgccgcctgcgcatctgcatcatcctgatctggatctacagctgcctgatcttcctgcccagcttcttcggctggggcaagccaggctaccacggggacatctttgagtggtgtgccacctcctggctgaccagcgcctacttcaccggcttcatcgtgtgcctgctgtatgccccagctgcctttgtggtgtgcttcacctacttccacatcttcaagatctgccggcagcacaccaaggagatcaatgaccggcgggcccgcttccccagccatgaggtggacagcagccgggagaccggccacagcccagacagaagatatgccatggtgctcttccgcatcaccagcgtcttctacatgctgtggctgccctacatcatctacttcctgctggagagcagccgggtgctggacaaccccaccctgtccttcctgaccacctggctggccatcagcaacagcttctgcaactgtgtgatctacagcctgagcaacagcgtcttccggctgggcctgcggcggctgtctgagaccatgtgcaccagctgcatgtgtgtgaaggaccaggaggcccaggagcccaagcccaggaagagggccaacagctgcagcatctag

SEQ ID NO: 158433 - DNA, 1086 bp, Artificial Sequence
  derived and/or modified sequence
atgaacgagagccggtggaccgagtggcggatcctgaacatgagctccggcatcgtaaacgtgtctgaacgacatagttgcccgttggggttcggacattacagtgtcgttgatgtttgcatctttgagaccgttgtgattgtgctcctcacctttcttataattgctggaaacttaacggtgatctttgtcttccattgcgctcccctgctgcaccactacacaacatcttacttcattcagacaatggcctacgccgacttattcgtgggtgtgtcttgtctcgtcccaactttgtcgctgctgcattactctactggagtgcacgaatcactgacttgtcaggtatttggctacatcatctctgttttaaagagcgtcagcatggcttgcctggcatgtatttccgtggacaggtaccttgctatcactaaacccctctcttataaccagctggtgacaccctgtcgcttgcgtatttgtatcatccttatctggatatacagctgtctgatttttctcccatcgttctttggttggggcaaacctgggtatcatggggatatctttgagtggtgtgctacaagctggctgacaagcgcctacttcacagggtttatcgtttgcctcttgtatgcccccgctgcctttgtggtgtgttttacttatttccatatctttaagatctgtcggcaacacacgaaggagatcaacgaccggcgggcccgatttccaagccacgaagtagacagcagcagagagacaggacacagcccagatagaagatatgccatggtcctgtttcgtattactagcgtgttttacatgctgtggctgccatatattatatattttttgcttgagtcctctagagtcctggacaaccccaccctgtctttccttacaacttggctggccatatctaacagtttctgtaactgcgtcatctatagcctgtccaacagcgttttccggctcgggttacggcgactaagcgaaactatgtgcacttcctgtatgtgcgtgaaagatcaggaggcacaggaacctaaacccaggaagagggccaactcatgttctatctag

SEQ ID NO: 158434 - DNA, 1086 bp, Artificial Sequence
  derived and/or modified sequence
atgaacgagtcccgttggacggagtggaggatcctgaacatgagttcgggaatcgtcaatgtgtctgagcgtcatagctgcccactgggattcggacattattccgtggttgacgtgtgcatcttcgaaacggtggtcatagtgcttctgacgtttctgattatcgccggtaacctcacggtaattttcgtttttcactgcgcacccctgctccaccactatacaacctcctatttcatccagaccatggcctacgccgacctgtttgtgggggtgagttgtctcgtgccaactctcagtctgctgcactacagcaccggtgtgcacgaaagtcttacatgtcaagtgtttgggtacattatatccgttctcaagagtgtgtctatggcctgtcttgcttgtatttcggtggaccggtacctggccattactaagccgctttcttataatcaattagtcacaccatgcaggctacgcatatgtatcattcttatctggatctactcctgcctgatctttttaccgtccttcttcggttggggtaaaccgggataccatggagatatattcgagtggtgtgctacatcctggctgactagcgcatattttactgggttcattgtgtgtctcttgtatgccccagcagcgttcgtggtatgtttcacctacttccatatctttaagatctgtaggcaacacactaaagagatcaatgacagacgtgcgaggttcccatcccatgaggtggacagctcacgggagacaggccactcaccagatcgaaggtacgcaatggtactatttaggatcacaagcgtgttttatatgctttggcttccctacatcatttattttctgcttgagagctcaagggtgctcgataatccaactctgagcttcctgacgacctggctggctatttccaactctttctgcaattgtgttatttactcgctatctaacagtgttttcaggctgggccttaggcgtctgagtgagaccatgtgtaccagctgcatgtgcgtgaaggaccaggaggcccaggaaccaaaacctaggaagagagccaactcatgttccatttag

SEQ ID NO: 158435 - DNA, 1086 bp, Artificial Sequence
  derived and/or modified sequence
atgaacgagagcagatggaccgagtggagaatcctgaacatgagcagcggcatcgtgaacgtgagcgagagacacagctgccccctgggcttcggccactacagcgtggtggacgtgtgcatcttcgagaccgtggtgatcgtgctgctgaccttcctgatcatcgccggcaacctgaccgtgatcttcgtgttccactgcgcccccctgctgcaccactacaccaccagctacttcatccagaccatggcctacgccgacctgttcgtgggcgtgagctgcctggtgcccaccctgagcctgctgcactacagcaccggcgtgcacgagagcctgacctgccaggtgttcggctacatcatcagcgtgctgaagagcgtgagcatggcctgcctggcctgcatcagcgtggacagatacctggccatcaccaagcccctgagctacaaccagctggtgaccccctgcagactgagaatctgcatcatcctgatctggatctacagctgcctgatcttcctgcccagcttcttcggctggggcaagcccggctaccacggcgacatcttcgagtggtgcgccaccagctggctgaccagcgcctacttcaccggcttcatcgtgtgcctgctgtacgcccccgccgccttcgtggtgtgcttcacctacttccacatcttcaagatctgcagacagcacaccaaggagatcaacgacagaagagccagattccccagccacgaggtggacagcagcagagagaccggccacagccccgacagaagatacgccatggtgctgttcagaatcaccagcgtgttctacatgctgtggctgccctacatcatctacttcctgctggagagcagcagagtgctggacaaccccaccctgagcttcctgaccacctggctggccatcagcaacagcttctgcaactgcgtgatctacagcctgagcaacagcgtgttcagactgggcctgagaagactgagcgagaccatgtgcaccagctgcatgtgcgtgaaggaccaggaggcccaggagcccaagcccagaaagagagccaacagctgcagcatctag

SEQ ID NO: 158436 - protein, 944 aa, Artificial Sequence
  derived and/or modified sequence
MALLGKRCDVPTNGCGPDRWNSAFTRKDEIITSLVSALDSMCSALSKLNAEVACVAVHDESAFVVGTEKGRMFLNARKELQSDFLRFCRGPPWKDPEAEHPKKVQRGEGGGRSLPRSSLEHGSDVYLLRKMVEEVFDVLYSEALGRASVVPLPYERLLREPGLLAVQGLPEGLAFRRPAEYDPKALMAILEHSHRIRFKLKRPLEDGGRDSKALVELNGVSLIPKGSRDCGLHGQAPKVPPQDLPPTATSSSMASFLYSTALPNHAIRELKQEAPSCPLAPSDLGLSRPMPEPKATGAQDFSDCCGQKPTGPGGPLIQNVHASKRILFSIVHDKSEKWDAFIKETEDINTLRECVQILFNSRYAEALGLDHMVPVPYRKIACDPEAVEIVGIPDKIPFKRPCTYGVPKLKRILEERHSIHFIIKRMFDERIFTGNKFTKDTTKLEPASPPEDTSAEVSRATVLDLAGNARSDKGSMSEDCGPGTSGELGGLRPIKIEPEDLDIIQVTVPDPSPTSEEMTDSMPGHLPSEDSGYGMEMLTDKGLSEDARPEERPVEDSHGDVIRPLRKQVELLFNTRYAKAIGISEPVKVPYSKFLMHPEELFVVGLPEGISLRRPNCFGIAKLRKILEASNSIQFVIKRPELLTEGVKEPIMDSQERDSGDPLVDESLKRQGFQENYDARLSRIDIANTLREQVQDLFNKKYGEALGIKYPVQVPYKRIKSNPGSVIIEGLPPGIPFRKPCTFGSQNLERILAVADKIKFTVTRPFQGLIPKPDEDDANRLGEKVILREQVKELFNEKYGEALGLNRPVLVPYKLIRDSPDAVEVTGLPDDIPFRNPNTYDIHRLEKILKAREHVRMVIINQLQPFAEICNDAKVPAKDSSIPKRKRKRVSEGNSVSSSSSSSSSSSSNPDSVASANQISLVQWPMYMVDYAGLNVQLPGPLNY

SEQ ID NO: 158437 - DNA, 3078 bp, Artificial Sequence
  derived and/or modified sequence
aggaggctgagtcctggccgcgggccggggccggggcgccgctggcaggagcgcttggggatcctccaaggcgaccatggccttgctgggtaagcgctgtgacgtccccaccaacggctgcggacccgaccgctggaactccgcgttcacccgcaaagacgagatcatcaccagcctcgtgtctgccttagactccatgtgctcagcgctgtccaaactgaacgccgaggtggcctgtgtcgccgtgcacgatgagagcgcctttgtggtgggcacagagaaggggagaatgttcctgaatgcccggaaggagctacagtcagacttcctcaggttctgccgagggcccccgtggaaggatccggaggcagagcaccccaagaaggtgcagcggggcgagggtggaggccgtagcctccctcggtcctccctggaacatggctcagatgtgtaccttctgcggaagatggtagaggaggtgtttgatgttctttatagcgaggccctgggaagggccagtgtggtgccactgccctatgagaggctgctcagggagccagggctgctggccgtgcaggggctgcccgaaggcctggccttccgaaggccagccgagtatgaccccaaggccctcatggccatcctggaacacagccaccgcatccgcttcaagctcaagaggccacttgaggatggcgggcgggactcgaaggccctggtggagctgaacggtgtctccctgattcccaaggggtcacgggactgtggcctgcatggccaggcccccaaggtgccaccccaggacctgcccccaaccgccacctcctcctccatggccagcttcctgtacagcacggcgctccccaaccacgccatccgagagctcaagcaggaagcaccttcctgcccccttgcccccagcgacctgggcctgagtcggcccatgccagagcccaaggccaccggtgcccaagacttctccgactgttgtggacagaagcccactgggcctggtgggcctctcatccagaacgtccatgcctccaagcgcattctcttctccatcgtccatgacaagtcagagaagtgggacgccttcataaaggaaaccgaggacatcaacacgctccgggagtgtgtgcagatcctgtttaacagcagatatgcggaagccctgggcctggaccacatggtccccgtgccctaccggaagattgcctgtgacccggaggctgtggagatcgtgggcatcccggacaagatccccttcaagcgcccctgcacttatggagtccccaagctgaagcggatcctggaggagcgccatagtatccacttcatcattaagaggatgtttgatgagcgaattttcacagggaacaagtttaccaaagacaccacgaagctggagccagccagcccgccagaggacacctctgcagaggtctctagggccaccgtccttgaccttgctgggaatgctcggtcagacaagggcagcatgtctgaagactgtgggccaggaacctccggggagctgggcgggctgaggccgatcaaaattgagccagaggatctggacatcattcaggtcaccgtcccagacccctcgccaacctctgaggaaatgacagactcgatgcctgggcacctgccatcggaggattctggttatgggatggagatgctgacagacaaaggtctgagtgaggacgcgcggcccgaggagaggcccgtggaggacagccacggtgacgtgatccggcccctgcggaagcaggtggagctgctcttcaacacacgatacgccaaggccattggcatctcggagcccgtcaaggtgccgtactccaagtttctgatgcacccggaggagctgtttgtggtgggactgcctgaaggcatctccctccgcaggcccaactgcttcgggatcgccaagctccggaagattctggaggccagcaacagcatccagtttgtcatcaagaggcccgagctgctcactgagggagtcaaagagcccatcgtggatagtcaagagagggattccggggaccctctggtggacgagagcctgaagagacagggctttcaagaaaattatgacgcgaggctctcacggatcgacatcgccaacacactaagggagcaggtccaggaccttttcaataagaaatacggggaagccttgggcatcaagtacccggtccaggtcccctacaagcggatcaagagtaaccccggctccgtgatcatcgaggggctgcccccaggaatcccgttccgaaagccctgtaccttcggctcccagaacctggagaggattcttgctgtggctgacaagatcaagttcacagtcaccaggcctttccaaggactcatcccaaagcctgatgaagatgacgccaacagactcggggagaaggtgatcctgcgggagcaggtgaaggaactcttcaacgagaaatacggtgaggccctgggcctgaaccggccggtgctggtcccttataaactaatccgggacagcccagacgccgtggaggtcacgggtctgcctgatgacatccccttccggaaccccaacacgtacgacatccaccggctggagaagatcctgaaggcccgagagcatgtccgcatggtcatcattaaccagctccaaccctttgcagaaatctgcaatgatgccaaggtgccagccaaagacagcagcattcccaagcgcaagagaaagcgggtctcggaaggaaattccgtctcctcttcctcctcgtcttcctcttcctcgtcctctaacccggattcagtggcatcggccaaccagatctcactcgtgcaatggccaatgtacatggtggactatgccggcctgaacgtgcagctcccgggacctcttaattactagacctcagtactgaatcaggacctcactcagaaagactaaaggaaatgtaatttatgtacaaaatgtatattcggatatgtatcgatgccttttagtttttccaatgatttttacactatattcctgccaccaaggcctttttaaataagtaaaaaaaaaaaaaaaaa

SEQ ID NO: 158438 - DNA, 2835 bp, Artificial Sequence
  derived and/or modified sequence
atggccttgctggggaaaaggtgtgacgtgccaactaacgggtgtggacctgatagatggaattcagcctttaccagaaaggatgagataattacctcactggttagcgccctcgactcaatgtgcagtgctctttccaaactgaacgccgaggtggcctgtgtggccgtgcacgatgagtcagctttcgtcgttggaacagagaaagggagaatgtttctgaatgctcgcaaagagcttcagagtgacttccttcgcttttgtcggggaccaccttggaaggacccagaggccgagcatccgaagaaggtgcaacgtggcgagggggggggacggtccctacccagaagctctctagagcacggcagtgacgtttacctcctgagaaaaatggtggaggaggttttcgatgtcttatattccgaggctctgggtcgagcatcggttgtccctctgccatatgagcggttgctccgcgagcctggcttgctcgcagtgcagggtttgccggagggcctcgccttcagaaggcccgcggagtatgaccccaaagctcttatggccatccttgaacacagccacagaatcagatttaaactgaaacggcctcttgaggacggtggcagagactctaaggcccttgtcgaactgaatggggtgtccctaataccgaaggggtccagggactgtggccttcacggtcaagcaccaaaggtgcctccccaggatctgccgcctactgcaacgtcttcctcgatggcctcgtttttatacagcaccgctctccccaatcatgccatccgagagcttaagcaggaagcccctagctgccccctcgctccgagcgatttgggccttagtcggcccatgccagaacccaaggcaacaggtgctcaggacttctcagactgttgcggtcaaaagccgactggtccagggggccccttgatacagaatgttcacgccagtaagaggatacttttttcgatcgtccacgataagagtgaaaaatgggacgcatttattaaagaaacagaagacattaacacactgcgggagtgtgtccaaattctgttcaacagccgctatgcggaagccctgggcttggatcatatggtgcccgtgccttatcgaaagatagcttgcgatcccgaggccgtggagattgtgggaatccccgataagataccattcaaacgcccctgtacctatggtgttccaaagttaaagaggattctcgaagagaggcactccatccacttcatcatcaaacgcatgttcgatgagcgaatctttacaggaaataagtttaccaaggacaccaccaaattggagcccgctagcccacctgaagacacatccgctgaggtgagccgggcaactgtgctcgatttagccggcaacgccagaagcgataaaggctctatgagcgaggactgtggcccaggcacctctggcgagctcggtggccttcgaccgatcaaaattgagccggaggaccttgacatcatacaggtaactgtgcctgacccctcccctacttccgaagagatgaccgattccatgccagggcacctgccgtcagaagattcagggtatgggatggaaatgttgaccgacaaaggcctgagtgaagatgctagacccgaggaacggccagtcgaggactcacatggggatgtaatcaggccactgcggaaacaggtggagttgcttttcaacacaaggtatgctaaagccatcggcatctccgagcccgtaaaggtcccttattccaaatttctgatgcatcccgaggagttattcgtcgtgggcctccctgagggcataagcctgaggaggcctaattgcttcggcatcgccaagctgaggaagatccttgaagcctcgaacagtattcagtttgtgatcaagaggccagaattgctgaccgaaggcgtcaaggagccaattatggacagtcaggagagagattcaggggatccccttgtcgatgaatcgctcaaaaggcagggatttcaagagaactatgacgctcgcctgtcccgcatcgatattgcaaatacactgcgagagcaggtgcaggatcttttcaataagaaatacggggaggccctcggcattaaatatccagtccaggtcccatacaagcgcattaagtctaacccaggatctgtgataatcgaggggttgccccccggtattccttttcgcaaaccttgtactttcggcagtcagaacctcgagcggattctggcggttgcagacaaaatcaagttcactgtcacccggccatttcaaggattgatacccaagcccgatgaagatgacgccaacaggttgggcgagaaggtaattctgagggagcaggtaaaggagctgttcaacgagaaatacggcgaagcactcgggctgaatcgacctgtgttggttccttacaaactgatccgcgacagcccagacgctgtggaagttaccggcctgcctgacgatatccccttccgcaacccgaatacttacgatatacataggcttgaaaaaatcctaaaagctcgtgagcatgtcagaatggtgatcatcaaccagctgcagccctttgctgagatctgtaacgacgctaaagtcccggccaaagacagttccatcccaaaaagaaagcggaagcgagtgtcagaggggaacagtgtgtcgtcctcctcctctagttcaagcagtagcagctccaaccccgactctgtcgcaagtgctaatcagatctctttagtccagtggcctatgtatatggtggactacgccggcctgaacgtgcagttaccagggccccttaactattag

SEQ ID NO: 158439 - DNA, 3077 bp, Artificial Sequence
  derived and/or modified sequence
gaggctgagtcctggccgcgggccggggccggggcgccgctggcaggagcgcttggggatcctccaaggcgaccatggccttgctgggtaagcgctgtgacgtccccaccaacggctgcggacccgaccgctggaactccgcgttcacccgcaaagacgagatcatcaccagcctcgtgtctgccttagactccatgtgctcagcgctgtccaaactgaacgccgaggtggcctgtgtcgccgtgcacgatgagagcgcctttgtggtgggcacagagaaggggagaatgttcctgaatgcccggaaggagctacagtcagacttcctcaggttctgccgagggcccccgtggaaggatccggaggcagagcaccccaagaaggtgcagcggggcgagggtggaggccgtagcctccctcggtcctccctggaacatggctcagatgtgtaccttctgcggaagatggtagaggaggtgtttgatgttctttatagcgaggccctgggaagggccagtgtggtgccactgccctatgagaggctgctcagggagccagggctgctggccgtgcaggggctgcccgaaggcctggccttccgaaggccagccgagtatgaccccaaggccctcatggccatcctggaacacagccaccgcatccgcttcaagctcaagaggccacttgaggatggcgggcgggactcgaaggccctggtggagctgaacggtgtctccctgattcccaaggggtcacgggactgtggcctgcatggccaggcccccaaggtgccaccccaggacctgcccccaaccgccacctcctcctccatggccagcttcctgtacagcacggcgctccccaaccacgccatccgagagctcaagcaggaagcaccttcctgcccccttgcccccagcgacctgggcctgagtcggcccatgccagagcccaaggccaccggtgcccaagacttctccgactgttgtggacagaagcccactgggcctggtgggcctctcatccagaacgtccatgcctccaagcgcattctcttctccatcgtccatgacaagtcagagaagtgggacgccttcataaaggaaaccgaggacatcaacacgctccgggagtgtgtgcagatcctgtttaacagcagatatgcggaagccctgggcctggaccacatggtccccgtgccctaccggaagattgcctgtgacccggaggctgtggagatcgtgggcatcccggacaagatccccttcaagcgcccctgcacttatggagtccccaagctgaagcggatcctggaggagcgccatagtatccacttcatcattaagaggatgtttgatgagcgaattttcacagggaacaagtttaccaaagacaccacgaagctggagccagccagcccgccagaggacacctctgcagaggtctctagggccaccgtccttgaccttgctgggaatgctcggtcagacaagggcagcatgtctgaagactgtgggccaggaacctccggggagctgggcgggctgaggccgatcaaaattgagccagaggatctggacatcattcaggtcaccgtcccagacccctcgccaacctctgaggaaatgacagactcgatgcctgggcacctgccatcggaggattctggttatgggatggagatgctgacagacaaaggtctgagtgaggacgcgcggcccgaggagaggcccgtggaggacagccacggtgacgtgatccggcccctgcggaagcaggtggagctgctcttcaacacacgatacgccaaggccattggcatctcggagcccgtcaaggtgccgtactccaagtttctgatgcacccggaggagctgtttgtggtgggactgcctgaaggcatctccctccgcaggcccaactgcttcgggatcgccaagctccggaagattctggaggccagcaacagcatccagtttgtcatcaagaggcccgagctgctcactgagggagtcaaagagcccatcatggatagtcaagagagggattccggggaccctctggtggacgagagcctgaagagacagggctttcaagaaaattatgacgcgaggctctcacggatcgacatcgccaacacactaagggagcaggtccaggaccttttcaataagaaatacggggaagccttgggcatcaagtacccggtccaggtcccctacaagcggatcaagagtaaccccggctccgtgatcatcgaggggctgcccccaggaatcccgttccgaaagccctgtaccttcggctcccagaacctggagaggattcttgctgtggctgacaagatcaagttcacagtcaccaggcctttccaaggactcatcccaaagcctgatgaagatgacgccaacagactcggggagaaggtgatcctgcgggagcaggtgaaggaactcttcaacgagaaatacggtgaggccctgggcctgaaccggccggtgctggtcccttataaactaatccgggacagcccagacgccgtggaggtcacgggtctgcctgatgacatccccttccggaaccccaacacgtacgacatccaccggctggagaagatcctgaaggcccgagagcatgtccgcatggtcatcattaaccagctccaaccctttgcagaaatctgcaatgatgccaaggtgccagccaaagacagcagcattcccaagcgcaagagaaagcgggtctcggaaggaaattccgtctcctcttcctcctcgtcttcctcttcctcgtcctctaacccggattcagtggcatcggccaaccagatctcactcgtgcaatggccaatgtacatggtggactatgccggcctgaacgtgcagctcccgggacctcttaattactagacctcagtactgaatcaggacctcactcagaaagactaaaggaaatgtaatttatgtacaaaatgtatattcggatatgtatcgatgccttttagtttttccaatgatttttacactatattcctgccaccaaggcctttttaaataagtaaaaaaagaaaaaaaaaa

SEQ ID NO: 158440 - DNA, 2835 bp, Artificial Sequence
  derived and/or modified sequence
atggccctgctgggcaagagatgtgatgtgcccaccaacggctgcggccctgaccgctggaacagcgccttcaccaggaaggatgagatcatcaccagcctggtgtctgccctggacagcatgtgcagcgccctgagcaagctgaatgctgaggtggcctgtgtggccgtgcatgatgaaagtgcctttgtggtgggcacagagaagggccgcatgttcctgaatgccaggaaggagctgcagagcgacttcctgcgcttctgccggggccccccctggaaggaccctgaggccgagcaccccaagaaggtgcagagaggagagggcggcggccgcagcctgcccaggagcagcctggagcacggcagtgatgtgtacctgctgaggaagatggtggaggaggtgtttgatgtgctgtacagcgaggccctgggccgggcctctgtggtgcccctgccctatgaaaggctgctgcgggagcccggcctgctggccgtgcagggcctgcctgagggcctggccttccggcggccagcagaatatgaccccaaggccctgatggccatcctggagcacagccaccgcatccgcttcaagctgaagaggcccctggaggatggcggccgggacagcaaggccctggtggagctgaatggagtgtccctcatccccaagggcagccgggactgtggcctgcacggccaggcccccaaggtgcccccccaggacctgcccccaacagccaccagcagctccatggccagcttcctgtacagcacagccctgcccaaccacgccatccgggagctgaagcaggaggcccccagctgccccctggcccccagcgacctgggcctgagccggcccatgcctgagcccaaggccaccggggcccaggacttcagtgactgctgcggccagaagcccaccggccctgggggccccctcatccagaatgtgcacgccagcaagaggatcctcttcagcatcgtgcatgacaagtctgagaagtgggatgccttcatcaaggagacagaggacatcaacaccctgagagaatgtgtgcagatcctcttcaacagccgctatgcagaggccctgggcctggaccacatggtgcctgtgccctacaggaagatcgcctgtgaccctgaggccgtggagatcgtgggcatcccagacaagatccccttcaagaggccctgcacctacggcgtgcccaagctgaagaggatcctggaggagcggcacagcatccacttcatcatcaagaggatgtttgatgagcgcatcttcaccggcaacaagttcaccaaggacaccaccaagctggagcccgccagccccccagaggacaccagcgctgaggtgtcccgggccaccgtgctggacctggccggaaatgcccggagtgacaagggctccatgtctgaggactgtggccctggcaccagcggggagctgggcggcctgcggcccatcaagattgagcctgaggacctggacatcatccaggtgacagtgcctgaccccagccccaccagcgaggagatgacagacagcatgcctggccacctgcccagtgaagattctggctacggcatggagatgctgacagacaagggcctgtctgaagatgcccggcctgaggagaggcctgtggaggacagccatggagatgtgatccggcccctgaggaagcaggtggagctgctcttcaacaccaggtatgccaaggccatcggcatcagcgagcctgtgaaggtgccctacagcaagttcctgatgcaccctgaggagctgtttgtggtgggcctgcctgagggcatcagcctgcggcggcccaactgcttcggcatcgccaagctgaggaagatcctggaggccagcaacagcatccagtttgtgatcaagaggcctgagctgctgacagagggcgtgaaggagcccatcatggacagccaggagcgggacagcggggaccccctggtggatgagagcctgaagaggcagggcttccaggagaactatgatgcccggctgagcagaattgacatcgccaacaccctgcgggagcaggtgcaggacctcttcaacaagaagtacggggaggccctgggcatcaagtaccctgtgcaggtgccctacaagaggatcaagagcaaccctggcagcgtcatcatcgagggcctgcccccaggcatccccttcaggaagccctgcaccttcggcagccagaacctggagcgcatcctggccgtggccgacaagatcaagttcaccgtgacccggcccttccagggcctcatccccaagccagatgaagatgatgccaaccggctgggggagaaggtgatcctgcgggagcaggtgaaggagctgttcaatgagaagtatggagaggccctgggcctgaacagacctgtgctggtgccctacaagctgatccgggacagcccagatgctgtggaggtgacaggcctgcctgatgacatccccttcaggaaccccaacacctatgacatccaccggctggagaagatcctgaaggcccgggagcacgtgaggatggtgatcatcaaccagctgcagccctttgctgagatctgcaatgatgccaaggtgcctgccaaggacagcagcatccccaagaggaagaggaagagggtgtctgagggcaacagcgtgagcagcagcagcagcagcagcagcagcagcagcagcaacccagacagcgtggccagcgccaaccagatcagcctggtgcagtggcccatgtacatggtggactatgccggcctgaatgtgcagctgcccggccccctgaactactag

SEQ ID NO: 158441 - DNA, 2835 bp, Artificial Sequence
  derived and/or modified sequence
atggccctgctgggcaagcggtgcgacgtgcccaccaacggctgcggaccagacagatggaattccgcctttactcgtaaggacgaaatcatcacctctctagtcagcgctctggattctatgtgctccgccctgtcaaagctgaatgctgaggtcgcctgcgtggccgtgcatgatgaatctgctttcgtggtcggcacagagaaaggtcgaatgttcctgaacgccaggaaggaattgcagtccgattttctaaggttttgtcgtggcccgccctggaaggaccccgaggccgaacaccccaagaaggttcagcgcggagaaggagggggcaggagcctgcctcggagcagcctggaacatggaagtgatgtctaccttttacggaagatggtggaggaggtatttgatgtgctgtacagtgaggccctaggaagggcttctgtggtaccactcccctacgaaaggctgctccgcgaacccggcttgctcgccgtgcagggcctccccgaagggctcgcattccggagaccggctgagtacgatcccaaagccctgatggccatccttgaacattcgcaccgcatccgctttaagctgaagaggcctctggaggatggcggaagggactcaaaagctctggtcgagctgaacggtgtcagcctcatccctaaagggagcagggattgcggactgcacggccaagctcctaaagttccgccgcaggatttgccaccaactgcaactagtagttctatggccagcttcctctattctacagccctacctaatcacgccatccgagagcttaagcaggaagccccctcatgcccactggccccatctgatcttggtctttctcgaccgatgcctgaaccaaaagccactggtgctcaggatttctcagattgctgtggccagaagcctaccggccctgggggaccgctgatacaaaacgtacatgccagcaagaggatcctttttagcatcgtgcacgataagtccgaaaaatgggacgcatttattaaggagacggaggatattaacacgttacgcgaatgtgtgcagatcctgttcaattcgcgatatgccgaagctctggggctcgatcacatggtgccagtcccttaccgaaaaatcgcatgtgaccctgaagcagtggagatcgtcgggatccccgataaaattcccttcaagagaccctgcacctatggtgtgcccaaactgaaacggatattagaggagaggcattccatacatttcatcattaagcgtatgttcgacgagcggattttcactggaaacaaattcaccaaagataccaccaagctggagccagctagcccgcccgaggacacaagtgctgaggtatcaagggcgacagtgctcgacttagccggaaacgcgcggtcggataagggctctatgtctgaagattgcggacccggtactagcggggagctcgggggtctacggccgatcaagatagaacccgaagacctggatatcattcaggtcaccgtgccagatccatcccccacctctgaggagatgacagattcaatgcccgggcatctgccgtcagaggattccggatacgggatggagatgctgacagataaaggcctcagcgaggacgctcggcccgaggagaggcccgtggaagattcccacggcgacgtcattcgtcctctccggaaacaggtcgagctgttatttaatacccggtacgccaaagcaatcgggatctcagagccagtaaaagtgccatatagcaaattcttgatgcaccccgaagagctctttgtcgtaggtctgccagagggaatcagtctgagaaggcctaactgcttcgggatcgcaaaactgcgcaaaattctggaggccagcaacagcatccagtttgtaattaagagacctgagcttctaacagagggtgtcaaggaacccattatggattctcaggagcgagacagtggcgaccccctggtggatgaatcactgaaacgccagggatttcaagagaactatgacgcccgccttagccggatagacatcgccaataccctgagggagcaggtccaggacctctttaataaaaagtatggagaagcattgggcataaagtacccagtgcaggttccctataaaaggatcaagagcaatccggggtccgtcatcattgagggcctgcctccaggcatccccttccggaagccgtgcacctttggatcccagaacctagagcggatcttagcagtagccgacaagatcaaatttacagtgaccaggccgtttcaggggttgatcccaaaacccgacgaagacgatgcaaaccggttaggtgaaaaggtgatccttcgcgagcaggtcaaagagttgtttaacgagaagtacggtgaggcactggggcttaatcgcccagtcctcgtgccttacaagctgatccgcgattctcccgacgccgttgaggtaaccggtctccctgatgacatcccattcagaaacccaaatacatacgatattcatcggctggagaagattctgaaggcccgggagcacgtgaggatggttattatcaaccaactgcagccattcgcagaaatctgtaacgacgccaaagtccctgccaaggattcctccataccaaagcggaaaaggaagcgcgtttcagaaggcaattccgtgagtagttcctcttccagctctagtagcagctcgagcaaccctgattccgttgcgtcagctaatcagatcagtctagtccagtggcccatgtatatggtagattacgcaggactgaacgttcaactccccggaccacttaattactag

SEQ ID NO: 158442 - DNA, 2835 bp, Artificial Sequence
  derived and/or modified sequence
atggcccttctcgggaaacggtgtgatgtacccacaaatggctgtgggcctgaccgatggaattcagcgttcacaaggaaagatgaaattatcactagcctggtgtccgcactggactccatgtgttctgctctgagcaaacttaatgcagaagttgcttgcgttgccgtccacgatgagagtgctttcgtggtggggaccgagaaagggagaatgtttcttaacgcccgaaaggaactgcagagtgacttcctgcgcttttgtagagggccaccatggaaagatccagaggccgagcacccaaagaaagtacagcggggtgagggcggtggcaggtcccttccacgatcatcactggaacatggatccgatgtgtatcttctgagaaagatggtagaggaggtctttgacgtgctgtactccgaggcgctaggacgtgcctctgttgtccctctgccgtacgaacggctacttcgcgagcctggtctactcgccgtccaggggctccccgaaggcctggcattccgtcgacccgcagagtacgacccaaaggcactgatggccatcctggaacattctcaccgaatccggtttaaattgaaacgcccactcgaggacgggggaagggactctaaggctctcgtggagttaaacggcgtctccttgatccctaagggcagcagagactgcggacttcacggccaggccccaaaagtgcccccacaggacttgccccctactgccacctccagcagcatggcttctttcctatactcaacagcattacccaaccatgcaatcagagagctgaagcaagaagccccatcctgccccttggccccatctgatttgggactgtccaggccaatgcctgagccaaaggcaacgggtgcacaggatttcagcgactgttgtggtcaaaagccgacagggcctggtggccctctgattcagaatgtgcatgcctctaagcgcatattgttctcaattgtgcatgacaaatccgaaaagtgggacgcctttattaaggagacggaggacatcaacaccctgcgggagtgtgtacagatcttattcaactcaaggtatgctgaagccctcggcctcgatcatatggtccccgtgccatacaggaaaatcgcatgcgaccccgaagcagtcgagatcgtcggcattcccgataaaatcccattcaagagaccatgtacctatggagtccccaaactgaaacggattttggaagaaagacattcaatacactttataattaaaagaatgtttgatgagcggatattcaccggaaacaagttcaccaaagacactacaaaactggagccagcttcgcccccagaagatacctcagctgaggtgtcacgagctacagtactcgacctggctggaaacgccaggtctgataagggttccatgtcagaagactgcggccctggtacttctggcgaactgggcggactgcgccctataaagatcgagccagaggatctggacatcatccaggtgactgtgcccgacccatcaccgacttccgaagagatgactgatagcatgccagggcaccttccctctgaggattctgggtatggtatggagatgctcacagataaaggtttatccgaggatgcccgacccgaagagcgcccagtcgaggacagtcatggcgacgtaatcagacccctccggaagcaggtcgagttattgttcaacacaaggtatgcaaaagcaattgggatcagtgagccagtaaaggtgccttattctaagttcctgatgcacccagaggaactttttgtagttggactcccggagggtatcagcttgcgtcgtcccaactgttttggcatcgcaaagctgagaaaaatcctggaagcctccaactccatacagttcgttataaagaggcccgaattgttgacagaaggcgtgaaggaacctatcatggattcccaagagagagacagtggtgatccattggtcgatgagagtctgaaacgacaggggttccaggagaattatgacgcaagactcagtagaatcgacatcgctaataccctgagggagcaggtacaagacctgttcaataagaaatatggggaggcactcggcattaagtatcctgtccaggtcccttacaaaaggataaagtccaatccgggtagcgtgataatcgagggtcttccccctggtattcccttccgaaaaccctgcaccttcggcagtcagaacctagagaggatcctggcagttgccgataagatcaaatttacagttacccgtcccttccaggggctgatccccaagccagatgaagacgatgccaatcgactaggcgagaaagtcatcctgagagagcaggtgaaggagttatttaatgagaagtatggcgaagcactagggttgaaccgcccagtcctcgtgccttacaaactcatccgggatagcccagacgccgttgaggttactggactgccggatgatattccgttcaggaaccccaatacatacgacattcatcggctagagaagattctgaaggctagggaacacgtccgaatggtgatcattaatcaactccagccatttgcggagatttgcaacgatgccaaagtgccagccaaagacagctcgattcctaagaggaaaaggaagcgggtttcagaaggaaacagtgtttctagctcttcctccagctcctcttcctccagctctaacccggatagcgtagcctcagctaaccagatcagcctggtccagtggccgatgtacatggtcgactatgccggtctgaatgtccaacttcccggtcccctgaactattag

SEQ ID NO: 158443 - DNA, 2835 bp, Artificial Sequence
  derived and/or modified sequence
atggccctgctgggcaagagatgcgacgtgcccaccaacggctgcggccccgacagatggaacagcgccttcaccagaaaggacgagatcatcaccagcctggtgagcgccctggacagcatgtgcagcgccctgagcaagctgaacgccgaggtggcctgcgtggccgtgcacgacgagagcgccttcgtggtgggcaccgagaagggcagaatgttcctgaacgccagaaaggagctgcagagcgacttcctgagattctgcagaggccccccctggaaggaccccgaggccgagcaccccaagaaggtgcagagaggcgagggcggcggcagaagcctgcccagaagcagcctggagcacggcagcgacgtgtacctgctgagaaagatggtggaggaggtgttcgacgtgctgtacagcgaggccctgggcagagccagcgtggtgcccctgccctacgagagactgctgagagagcccggcctgctggccgtgcagggcctgcccgagggcctggccttcagaagacccgccgagtacgaccccaaggccctgatggccatcctggagcacagccacagaatcagattcaagctgaagagacccctggaggacggcggcagagacagcaaggccctggtggagctgaacggcgtgagcctgatccccaagggcagcagagactgcggcctgcacggccaggcccccaaggtgcccccccaggacctgccccccaccgccaccagcagcagcatggccagcttcctgtacagcaccgccctgcccaaccacgccatcagagagctgaagcaggaggcccccagctgccccctggcccccagcgacctgggcctgagcagacccatgcccgagcccaaggccaccggcgcccaggacttcagcgactgctgcggccagaagcccaccggccccggcggccccctgatccagaacgtgcacgccagcaagagaatcctgttcagcatcgtgcacgacaagagcgagaagtgggacgccttcatcaaggagaccgaggacatcaacaccctgagagagtgcgtgcagatcctgttcaacagcagatacgccgaggccctgggcctggaccacatggtgcccgtgccctacagaaagatcgcctgcgaccccgaggccgtggagatcgtgggcatccccgacaagatccccttcaagagaccctgcacctacggcgtgcccaagctgaagagaatcctggaggagagacacagcatccacttcatcatcaagagaatgttcgacgagagaatcttcaccggcaacaagttcaccaaggacaccaccaagctggagcccgccagcccccccgaggacaccagcgccgaggtgagcagagccaccgtgctggacctggccggcaacgccagaagcgacaagggcagcatgagcgaggactgcggccccggcaccagcggcgagctgggcggcctgagacccatcaagatcgagcccgaggacctggacatcatccaggtgaccgtgcccgaccccagccccaccagcgaggagatgaccgacagcatgcccggccacctgcccagcgaggacagcggctacggcatggagatgctgaccgacaagggcctgagcgaggacgccagacccgaggagagacccgtggaggacagccacggcgacgtgatcagacccctgagaaagcaggtggagctgctgttcaacaccagatacgccaaggccatcggcatcagcgagcccgtgaaggtgccctacagcaagttcctgatgcaccccgaggagctgttcgtggtgggcctgcccgagggcatcagcctgagaagacccaactgcttcggcatcgccaagctgagaaagatcctggaggccagcaacagcatccagttcgtgatcaagagacccgagctgctgaccgagggcgtgaaggagcccatcatggacagccaggagagagacagcggcgaccccctggtggacgagagcctgaagagacagggcttccaggagaactacgacgccagactgagcagaatcgacatcgccaacaccctgagagagcaggtgcaggacctgttcaacaagaagtacggcgaggccctgggcatcaagtaccccgtgcaggtgccctacaagagaatcaagagcaaccccggcagcgtgatcatcgagggcctgccccccggcatccccttcagaaagccctgcaccttcggcagccagaacctggagagaatcctggccgtggccgacaagatcaagttcaccgtgaccagacccttccagggcctgatccccaagcccgacgaggacgacgccaacagactgggcgagaaggtgatcctgagagagcaggtgaaggagctgttcaacgagaagtacggcgaggccctgggcctgaacagacccgtgctggtgccctacaagctgatcagagacagccccgacgccgtggaggtgaccggcctgcccgacgacatccccttcagaaaccccaacacctacgacatccacagactggagaagatcctgaaggccagagagcacgtgagaatggtgatcatcaaccagctgcagcccttcgccgagatctgcaacgacgccaaggtgcccgccaaggacagcagcatccccaagagaaagagaaagagagtgagcgagggcaacagcgtgagcagcagcagcagcagcagcagcagcagcagcagcaaccccgacagcgtggccagcgccaaccagatcagcctggtgcagtggcccatgtacatggtggactacgccggcctgaacgtgcagctgcccggccccctgaactactag

SEQ ID NO: 158444 - protein, 622 aa, Artificial Sequence
  derived and/or modified sequence
MSMRSPISAQLALDGVGTMVNCTIKSEEKKEPCHEAPQGSATAAEPQPGDPARASQDSADPQAPAQGNFRGSWDCSSPEGNGSPEPKRPGVSEAASGSQEKLDFNRNLKEVVPAIEKLLSSDWKERFLGRNSMEAKDVKGTQESLAEKELQLLVMIHQLSTLRDQLLTAHSEQKNMAAMLFEKQQQQMELARQQQEQIAKQQQQLIQQQHKINLLQQQIQQVNMPYVMIPAFPPSHQPLPVTPDSQLALPIQPIPCKPVEYPLQLLHSPPAPVVKRPGAMATHHPLQEPSQPLNLTAKPKAPELPNTSSSPSLKMSSCVPRPPSHGGPTRDLQSSPPSLPLGFLGEGDAVTKAIQDARQLLHSHSGALDGSPNTPFRKDLISLDSSPAKERLEDGCVHPLEEAMLSCDMDGSRHFPESRNSSHIKRPMNAFMVWAKDERRKILQAFPDMHNSSISKILGSRWKSMTNQEKQPYYEEQARLSRQHLEKYPDYKYKPRPKRTCIVEGKRLRVGEYKALMRTRRQDARQSYVIPPQAGQVQMSSSDVLYPRAAGMPLAQPLVEHYVPRSLDPNMPVIVNTCSLREEGEGTDDRHSVADGEMYRYSEDEDSEGEEKSDGELVVLTD

SEQ ID NO: 158445 - protein, 57 aa, Artificial Sequence
  derived and/or modified sequence
MSMRSPISAQLALDGVGTMVNCTIKSEEKKEPCHEAPQGSATAAEPQPGDPARASQD

SEQ ID NO: 158446 - protein, 180 aa, Artificial Sequence
  derived and/or modified sequence
MSMRSPISAQLALDGVGTMVNCTIKSEEKKEPCHEAPQGSATAAEPQPGDPARASQDSADPQAPAQGNFRGSWDCSSPEGNGSPEPKRPGVSEAASGSQEKLDFNRNLKEVVPAIEKLLSSDWKERFLGRNSMEAKDVKGTQESLAEKELQLLVMIHQLSTLRDQLLTAHSEQKNMAAML

SEQ ID NO: 158447 - DNA, 1869 bp, Artificial Sequence
  derived and/or modified sequence
atgagcatgagaagccccatcagcgcccagctggccctggacggcgtgggcaccatggtgaactgcaccatcaagagcgaggagaagaaggagccctgccacgaggccccccagggcagcgccaccgccgccgagccccagcccggcgaccccgccagagccagccaggacagcgccgacccccaggcccccgcccagggcaacttcagaggcagctgggactgcagcagccccgagggcaacggcagccccgagcccaagagacccggcgtgagcgaggccgccagcggcagccaggagaagctggacttcaacagaaacctgaaggaggtggtgcccgccatcgagaagctgctgagcagcgactggaaggagagattcctgggcagaaacagcatggaggccaaggacgtgaagggcacccaggagagcctggccgagaaggagctgcagctgctggtgatgatccaccagctgagcaccctgagagaccagctgctgaccgcccacagcgagcagaagaacatggccgccatgctgttcgagaagcagcagcagcagatggagctggccagacagcagcaggagcagatcgccaagcagcagcagcagctgatccagcagcagcacaagatcaacctgctgcagcagcagatccagcaggtgaacatgccctacgtgatgatccccgccttcccccccagccaccagcccctgcccgtgacccccgacagccagctggccctgcccatccagcccatcccctgcaagcccgtggagtaccccctgcagctgctgcacagcccccccgcccccgtggtgaagagacccggcgccatggccacccaccaccccctgcaggagcccagccagcccctgaacctgaccgccaagcccaaggcccccgagctgcccaacaccagcagcagccccagcctgaagatgagcagctgcgtgcccagaccccccagccacggcggccccaccagagacctgcagagcagcccccccagcctgcccctgggcttcctgggcgagggcgacgccgtgaccaaggccatccaggacgccagacagctgctgcacagccacagcggcgccctggacggcagccccaacacccccttcagaaaggacctgatcagcctggacagcagccccgccaaggagagactggaggacggctgcgtgcaccccctggaggaggccatgctgagctgcgacatggacggcagcagacacttccccgagagcagaaacagcagccacatcaagagacccatgaacgccttcatggtgtgggccaaggacgagagaagaaagatcctgcaggccttccccgacatgcacaacagcagcatcagcaagatcctgggcagcagatggaagagcatgaccaaccaggagaagcagccctactacgaggagcaggccagactgagcagacagcacctggagaagtaccccgactacaagtacaagcccagacccaagagaacctgcatcgtggagggcaagagactgagagtgggcgagtacaaggccctgatgagaaccagaagacaggacgccagacagagctacgtgatccccccccaggccggccaggtgcagatgagcagcagcgacgtgctgtaccccagagccgccggcatgcccctggcccagcccctggtggagcactacgtgcccagaagcctggaccccaacatgcccgtgatcgtgaacacctgcagcctgagagaggagggcgagggcaccgacgacagacacagcgtggccgacggcgagatgtacagatacagcgaggacgaggacagcgagggcgaggagaagagcgacggcgagctggtggtgctgaccgactag

SEQ ID NO: 158448 - DNA, 1869 bp, Artificial Sequence
  derived and/or modified sequence
atgtctatgcggtcacccattagtgcacaattggcactcgatggcgtggggacgatggtgaactgcacaatcaagtcagaagaaaagaaggagccctgccacgaggccccccagggctctgctacggcagccgagccccagcctggcgatcccgcaagagcaagccaggattcagcagatccacaagcccccgcacaaggtaactttagaggaagctgggactgttcatccccagagggaaacggcagccctgagccaaagcgacctggtgtatcagaggctgcctccggcagtcaagagaaactggacttcaatagaaatctcaaggaggtcgtgcccgctattgagaagcttctaagttctgactggaaggagcgcttcctcggtcggaacagtatggaggcaaaagacgtcaaaggcacgcaagagtccctggccgaaaaagaacttcagctgctggtaatgatccatcagctgagcaccctgagggaccagttgctgacagcccatagtgagcagaaaaatatggctgccatgctatttgaaaagcagcagcagcaaatggaacttgcccgccaacagcaagagcaaatcgcaaagcagcagcagcagttgatccagcagcaacacaagatcaaccttctccagcagcagatccagcaggtcaatatgccctacgtcatgataccagcatttcccccaagtcaccaaccgctgccagtgacacctgactctcagctggcactgcccatacagcccattccatgcaaaccagttgaatatcctctccagctcttgcacagccccccagccccggtggtgaagcgtcccggtgctatggcaactcaccacccgcttcaggagccttctcaacctcttaatctgacagccaagccaaaggcccccgaactgcctaacacctcaagcagccctagtctgaagatgtcgtcctgtgttcctcgtccgcctagtcatgggggacccacaagggacttacagtcctcccccccgtccctgcccttaggatttttaggagagggtgacgctgtgacaaaggctattcaagacgcccggcagctgttgcactcacattctggggccctcgacggcagtcctaatacaccatttcgcaaggatttgatttctctcgattcctcacccgccaaggagaggctggaggatggttgcgtgcacccactcgaggaggcaatgctatcctgcgatatggacgggtcaaggcatttcccagagagccggaattctagccacattaaaagaccaatgaatgcgtttatggtgtgggcaaaagacgagcgccggaagatcctccaggcctttcccgacatgcataattcctctataagtaagattctcggctccaggtggaagtcaatgacaaaccaagagaaacagccgtactatgaagagcaggctcggctgtccaggcagcatctcgagaagtatcctgattacaaatacaaaccccgccccaagcggacatgcatagtggaggggaagcgtctcagggtgggtgagtataaggccctcatgaggactcggaggcaggacgcccggcaatcgtatgtaatacccccacaggcaggacaggtccagatgtctagctcagatgtcttgtatccacgcgccgccggtatgcccttagcacagcccctggtggaacactacgtgccacgatcattggacccgaatatgccagttatcgttaacacctgctcacttcgtgaagagggcgagggaacagatgacagacactccgtggccgacggtgagatgtatcggtactccgaagacgaagacagcgaaggcgaggaaaaaagtgatggcgagcttgttgtcctgacggattag

SEQ ID NO: 158449 - DNA, 1869 bp, Artificial Sequence
  derived and/or modified sequence
atgtccatgaggagccccatcagcgcccagctggccctggatggagtgggcaccatggtgaactgcaccatcaagtctgaggagaagaaggagccctgccacgaggccccccagggcagcgccacagctgctgagccccagcccggggaccctgcccgggccagccaggacagcgctgacccccaggccccagcccagggcaacttccggggctcctgggactgcagcagccctgagggcaatggcagccctgagcccaagaggcctggggtgtctgaggccgccagcggcagccaggagaagctggacttcaacagaaacctgaaggaggtggtgcctgccatcgagaagctgctgagcagtgactggaaggagcgcttcctgggcaggaacagcatggaggccaaggatgtgaagggcacccaggagagcctggccgagaaggagctgcagctgctggtgatgatccaccagctgagcaccctgcgggaccagctgctgacagcccacagcgagcagaagaacatggccgccatgctgtttgagaagcagcagcagcagatggagctggcccggcagcagcaggagcagatcgccaagcagcagcagcagctgatccagcagcagcacaagatcaacctgctgcagcagcagatccagcaggtgaacatgccctacgtgatgatcccagccttcccccccagccaccagcccctgcctgtgaccccagacagccagctggccctgcccatccagcccatcccctgcaagcctgtggagtaccccctgcagctgctgcacagccccccagcccctgtggtgaagaggcctggggccatggccacccaccaccccctgcaggagcccagccagcccctgaacctgacagccaagcccaaggcccctgagctgcccaacaccagcagcagccccagcctgaagatgagcagctgtgtgccccggccccccagccatggaggccccacccgggacctgcagagcagcccccccagcctgcccctgggcttcctgggggagggagatgctgtgaccaaggccatccaggatgcccggcagctgctgcacagccacagcggggccctggatggcagccccaacacccccttcaggaaggacctgatcagcctggacagcagccctgccaaggagcggctggaggatggctgtgtgcaccccctggaggaggccatgctgagctgtgacatggatggcagccgccacttccctgagagcaggaacagcagccacatcaagaggcccatgaatgccttcatggtgtgggccaaggatgaaagaaggaagatcctgcaggccttcccagacatgcacaacagcagcatcagcaagatcctgggcagccgctggaagtccatgaccaaccaggagaagcagccctactatgaggagcaggcccggctgagccggcagcacctggagaagtacccagactacaagtacaagccccggcccaagaggacctgcatcgtggagggcaagaggctgcgggtgggggagtacaaggccctgatgaggacccggcggcaggatgcccggcagagctatgtgattcctccccaggccggccaggtgcagatgagcagcagtgatgtgctgtaccccagggctgctggcatgcccctggcccagcccctggtggagcactacgtgcccaggagcctggaccccaacatgcctgtgattgtgaacacctgcagcctgcgggaggagggggagggcacagatgacagacacagcgtggctgatggagagatgtaccgctacagtgaagatgaagattctgagggggaggagaagagtgatggagagctggtggtgctgacagactag

SEQ ID NO: 158450 - DNA, 1869 bp, Artificial Sequence
  derived and/or modified sequence
atgagcatgcggagccccatcagcgcccagctggccctggacggcgtcgggacgatggtgaactgcacaatcaaatccgaggagaaaaaggaaccttgccatgaggccccccagggctccgcaacggctgccgaaccccagccaggagaccctgcccgcgcctctcaagacagtgcagacccccaggcccccgcccaggggaatttcagaggcagctgggattgctcaagtccggaaggtaacgggtcacctgagcctaagcgacctggagtctccgaggcagcttccggaagccaggagaagctagatttcaatcggaatttgaaagaggtcgtgccagccatcgagaaactgctgtcgagcgactggaaagagagattcttagggagaaactccatggaagccaaagatgtcaaaggcacccaggaatctctggccgagaaggagctgcagttattggtgatgattcaccagttgtccaccttgagggaccagctgttaacggcacattctgaacagaaaaacatggctgcaatgttgttcgagaagcagcaacagcagatggagttggctcggcagcagcaagagcagatagccaagcaacagcagcagctcatccagcaacaacacaaaatcaatctcctgcaacagcagatccagcaggtgaatatgccttatgtcatgatcccagcttttccgccaagccatcagcccttgccagtaactcccgactcacagctcgctctaccaatccagccaattccttgcaaaccagtggagtaccctttgcagctattacacagtcccccagctcccgtcgtgaagcgccccggcgctatggcgacacaccaccccctccaagaaccgagccagccactcaatctgactgcgaagccaaaagcaccagagcttcccaacacgtcgtcttctcctagcctgaagatgtcaagctgtgtcccacggcctcctagccacggaggccctacgcgagatctccagtcttcccctcccagtttgcctctaggtttcctgggagaaggcgacgctgttacaaaggcaattcaggacgctaggcagctactgcatagtcatagcggtgctctggacgggtccccaaatacaccgttccggaaagacctgatctcactcgactctagccccgcgaaagagaggctagaggatggatgtgtgcaccccctagaagaagctatgttgtcttgcgacatggacgggtccaggcatttcccagagagtcgtaattcatcccatattaaaaggccgatgaacgccttcatggtatgggcaaaggacgagcggcggaaaatcctgcaggccttccccgatatgcacaatagttctatatctaagatcctcggatcaagatggaaaagtatgacaaaccaggaaaagcagccatattacgaggagcaggcgcgcctgtccagacaacacctcgaaaagtatcccgattacaagtataagccccgcccaaaaaggacttgcatcgttgagggcaagcgcctccgggtaggcgagtacaaggcgctcatgcgtacacggcgccaagatgctcgccagagctatgttattccacctcaagccggccaggtgcaaatgagctcctctgacgtcctctatccacgggctgccgggatgccactggctcagccactggtagagcactatgtgccgcggtcgctggacccaaatatgcctgtgattgtcaatacctgttccctgagggaggagggcgaggggactgatgatcggcactccgtggccgacggcgaaatgtaccgatattctgaagacgaagacagcgagggggaggaaaagagtgacggagagctagtagttcttaccgactag

SEQ ID NO: 158451 - DNA, 1869 bp, Artificial Sequence
  derived and/or modified sequence
atgtcaatgcgaagccctatctcagcacagctagcattagacggagtgggcaccatggtcaattgcaccataaagtcagaggaaaaaaaggagccttgtcacgaggcaccccagggtagtgcaactgccgctgagccacagcccggagatcccgcacgggcttcccaggattcagctgaccctcaggccccagcgcagggtaacttccgagggtcatgggattgcagtagccctgagggcaacggctcccccgaacctaaacggcctggggtgtccgaagcagcctctggatcccaggagaaacttgatttcaacagaaacctcaaggaggtcgttcccgctattgaaaaactattgagctcggactggaaggagcggtttctgggcagaaacagcatggaagccaaggacgtcaagggaacacaagaatccctggccgaaaaagaacttcaactcctggtgatgatacatcagctcagcacattgcgcgaccagctcttaactgctcactctgagcagaaaaacatggctgcaatgctgtttgagaagcagcaacagcagatggagctcgccaggcagcagcaagagcaaattgctaagcagcagcagcaactgattcaacagcagcacaagattaacctgctccaacagcagatacagcaggtcaatatgccttatgtgatgattcccgctttcccccctagccaccagccgctgccggtgacccccgacagccagcttgctcttccaattcaacccattccttgcaagccggtcgagtatccacttcaactgttgcattccccccctgctccagtggtaaaacggccaggtgccatggccacccaccaccctctgcaggagccttcccagcccctgaatctcacagctaaacctaaagcacccgagctgcccaatacttcaagttctcctagcttaaagatgagtagctgcgtgcctaggcctccttcacatggagggccaactagggacctgcagagctctccgcctagccttcctctcgggttcctcggagaaggcgatgcagtcacaaaagcgatacaggatgcgcgtcagctgctgcactcccacagcggggcacttgacggttcccctaacacccctttccgcaaggaccttatctctcttgatagttccccagccaaagagcgcctcgaggacggttgcgtccatccactcgaagaggccatgcttagctgcgatatggatggaagtcgtcacttcccagaatcaagaaactcttcccacatcaaaagacccatgaatgcgttcatggtgtgggcaaaggacgaaagacgaaaaatcttgcaagcattcccggacatgcacaactcctcaatcagtaagattctgggctccaggtggaaatccatgacgaaccaagaaaagcagccttattatgaggagcaagctaggcttagtcggcagcacctcgaaaagtaccctgactacaagtacaaaccaagacccaagcgtacctgcattgtggaagggaagcgcctgcgagttggcgagtataaggctctgatgcggaccagaagacaggatgccaggcagagctacgtgatacccccacaggcagggcaggtgcagatgtcttcttctgacgtgctgtatcctagagccgctggcatgcctctggcccagcctcttgtggagcactacgtgccccgaagccttgaccccaacatgcctgtgatcgtgaacacctgcagtctccgcgaagaaggggagggtacagacgatcggcactcagtggctgatggggaaatgtatagatattcggaggacgaggattccgagggagaagaaaaaagcgatggtgagctggtggtcctcacagattag

SEQ ID NO: 158452 - DNA, 3579 bp, Artificial Sequence
  derived and/or modified sequence
ggcatgtgagcgggaagcctaggctgccagccgcgaggaccgcacggaggaggagcaggagcgcggagccgcgagccccgagccccgagcccggcgcctggctgagtagatgtccatgaggagccccatctctgcccagctggccctggatggcgttggcaccatggtgaactgcaccatcaagtcagaggagaagaaagagccttgccacgaggccccccagggctcagccactgccgctgaacctcagcctggagacccagcccgggcctcccaggatagtgctgacccccaagctccagcccaggggaatttcaggggctcctgggactgtagctctccagagggtaatgggtccccagaacccaagagaccaggagtgtcggaggctgcctctggaagccaggagaagctggacttcaaccgaaatttgaaagaagtggtgccagccatagagaagctgttgtccagtgactggaaggagaggtttctaggaaggaactctatggaagccaaagatgtcaaagggacccaagagagcctagcagagaaggagctccagcttctggtcatgattcaccagctgtccaccctgcgggaccagctcctgacagcccactcggagcagaagaacatggctgccatgctgtttgagaagcagcagcagcagatggagcttgcccggcagcagcaggagcagattgcaaagcagcagcagcagctgattcagcagcagcataagatcaacctccttcagcagcagatccagcaggttaacatgccttatgtcatgatcccagccttccccccaagccaccaacctctgcctgtcacccctgactcccagctggccttacccattcagcccattccctgcaaaccagtggagtatccgctgcagctgctgcacagcccccctgccccagtggtgaagaggcctggggccatggccacccaccaccccctgcaggagccctcccagcccctgaacctcacagccaagcccaaggcccccgagctgcccaacacctccagctccccaagcctgaagatgagcagctgtgtgccccgcccccccagccatggaggccccacgcgggacctgcagtccagccccccgagcctgcctctgggcttccttggtgaaggggacgctgtcaccaaagccatccaggatgctcggcagctgctgcacagccacagtggggccttggatggctcccccaacacccccttccgtaaggacctcatcagcctggactcatccccagccaaggagcggctggaggacggctgtgtgcacccactggaggaagccatgctgagctgcgacatggatggctcccgccacttccccgagtcccgaaacagcagccacatcaagaggcccatgaacgccttcatggtgtgggccaaggatgagcggaggaagatcctgcaagccttcccagacatgcacaactccagcatcagcaagatccttggatctcgctggaagtccatgaccaaccaggagaagcagccctactatgaggaacaggcgcggctgagccggcagcacctggagaagtatcctgactacaagtacaagccgcggcccaagcgcacctgcatcgtggagggcaagcggctgcgcgtgggagagtacaaggccctgatgaggacccggcgtcaggatgcccgccagagctacgtgatccccccgcaggctggccaggtgcagatgagctcctcagatgtcctgtaccctcgggcagcaggcatgccgctggcacagccactggtggagcactatgtccctcgtagcctggaccccaacatgcctgtgatcgtcaacacctgcagcctcagagaggagggtgagggcacagatgacaggcactcggtggctgatggcgagatgtaccggtacagcgaggacgaggactcggagggcgaagagaagagcgatggggagttggtggtgctcacagactgatcccggctgggtgggcctggccccttctcctctggggaagaccttgtcccaactcgatgggcacagccagccaacctaagactatgttggtacttggacttgttcgtgccccagagatgggcaaagctgtgcacttgcagatacattcatgaggggagaggcgccctcccttcctgaggagctgttggcctgggtgggcaggaactgcagtatggccatgggctgagcaggctgagcacctcagcctttagggcttatggccaggggacactgtatgactctcctctcctgcaggtgtctatccacctggggtatggcatctaccgacctgtctccctggggtcacatgctttgtttccattcttgtcctggctggaccagccactgtgggaccaacacccctcccacactcccccagactgctcgtctatcaccaggatcgctttgtactttgtgcaaaagggtctggctgtcccttgctgttttcatctctgccaagcctattgtgcctctggctgctgtatgtgtgcgcgtgcacgtgtgtgtgtttcatctgttcattcactgcacaagatatttattgagtgcccactacgtgccaggcactgttgctgagttcctgtgggtgtgtctctcgatgccactcctgcttctctgggggcctctttctgtgcttctctttgtccccaaattgctacctctttgtcagtctgggtgtctcaggttctgtgtgtccttgtgtgcatttctgtctctctctgtcctcgtctctctgcaaggccctctatttctctctttcttggtgtctgtcctttgccccctgtgccctctggattctctgggtctatgtaggcccctggtctgccctgggctcatcagccttcctgacctcctcctgccctccccttcactccctccctggctctgccagtcggttcccacggagccatttttagctctgatcagcatgggaatgtgcctcggcctccaaggggctttgtcctggtgcccccgcccctggtcccaacctgatcccacgagggagttgggacaggaggattgatggtgctccccttcctgccagcgtcagaggccctggagaggggctgtccatggcagctggtctttattcctccctcatgagcacagggtcgggggggtccccattcttggaagaggttgagaagactcctgggcttcagcctctcccacccagccctgcccctcacctgcctgccctcccctcccccactctatactagggactggatctcagcctctgatcagtttcacaaagtttgttccctaaggaaatcaaatcccattgtcacctaactctgaagatctaaatagcccttggatcagtatgggaaccccaaatcccacagggccagatgtggagtctgtgtctgcccccgtcttctctccatcctcaaagcccccacttctctccaggctgtttctttttttatgactgtaaacatagatagtgctttattttgttaataataagataatgatgagtaacttaaccagcacatttctcctgtttacactcgggggatttttttgttttctgatgacataataaagacagatca

SEQ ID NO: 158453 - protein, 1394 aa, Artificial Sequence
  derived and/or modified sequence
MKDIDIGKEYIIPSPGYRSVRERTSTSGTHRDREDSKFRRTRPLECQDALETAARAEGLSLDASMHSQLRILDEEHPKGKYHHGLSALKPIRTTSKHQHPVDNAGLFSCMTFSWLSSLARVAHKKGELSMEDVWSLSKHESSDVNCRRLERLWQEELNEVGPDAASLRRVVWIFCRTRLILSIVCLMITQLAGFSGPAFMVKHLLEYTQATESNLQYSLLLVLGLLLTEIVRSWSLALTWALNYRTGVRLRGAILTMAFKKILKLKNIKEKSLGELINICSNDGQRMFEAAAVGSLLAGGPVVAILGMIYNVIILGPTGFLGSAVFILFYPAMMFASRLTAYFRRKCVAATDERVQKMNEVLTYIKFIKMYAWVKAFSQSVQKIREEERRILEKAGYFQSITVGVAPIVVVIASVVTFSVHMTLGFDLTAAQAFTVVTVFNSMTFALKVTPFSVKSLSEASVAVDRFKSLFLMEEVHMIKNKPASPHIKIEMKNATLAWDSSHSSIQNSPKLTPKMKKDKRASRGKKEKVRQLQRTEHQAVLAEQKGHLLLDSDERPSPEEEEGKHIHLGHLRLQRTLHSIDLEIQEGKLVGICGSVGSGKTSLISAILGQMTLLEGSIAISGTFAYVAQQAWILNATLRDNILFGKEYDEERYNSVLNSCCLRPDLAILPSSDLTEIGERGANLSGGQRQRISLARALYSDRSIYILDDPLSALDAHVGNHIFNSAIRKHLKSKTVLFVTHQLQYLVDCDEVIFMKEGCITERGTHEELMNLNGDYATIFNNLLLGETPPVEINSKKETSGSQKKSQDKGPKTGSVKKEKAVKPEEGQLVQLEEKGQGSVPWSVYGVYIQAAGGPLAFLVIMALFMLNVGSTAFSTWWLSYWIKQGSGNTTVTRGNETSVSDSMKDNPHMQYYASIYALSMAVMLILKAIRGVVFVKGTLRASSRLHDELFRRILRSPMKFFDTTPTGRILNRFSKDMDEVDVRLPFQAEMFIQNVILVFFCVGMIAGVFPWFLVAVGPLVILFSVLHIVSRYQELLDDNQAPFFLFTCAMRWLAVRLDLISIALITTTGLMIVLMHGQIPPAYAGLAISYAVQLTGLFQFTVRLASETEARFTSVERINHYIKTLSLEAPARIKNKAPSPDWPQEGEVTFENAEMRYRENLPLVLKKVSFTIKPKEKIGIVGRTGSGKSSLGMALFRLVELSGGCIKIDGVRISDIGLADLRSKLSIIPQEPVLFSGTVRSNLDPFNQYTEDQIWDALERTHMKECIAQLPLKLESEVMENGDNFSVGERQLLCIARALLRHCKILILDEATAAMDTETDLLIQETIREAFADCTMLTIAHRLHTVLGSDRIMVLAQGQVVEFDTPSVLLSNDSSRFYAMFAAAENKVAVKG

SEQ ID NO: 158454 - protein, 1437 aa, Artificial Sequence
  derived and/or modified sequence
MKDIDIGKEYIIPSPGYRSVRERTSTSGTHRDREDSKFRRTRPLECQDALETAARAEGLSLDASMHSQLRILDEEHPKGKYHHGLSALKPIRTTSKHQHPVDNAGLFSCMTFSWLSSLARVAHKKGELSMEDVWSLSKHESSDVNCRRLERLWQEELNEVGPDAASLRRVVWIFCRTRLILSIVCLMITQLAGFSGPAFMVKHLLEYTQATESNLQYSLLLVLGLLLTEIVRSWSLALTWALNYRTGVRLRGAILTMAFKKILKLKNIKEKSLGELINICSNDGQRMFEAAAVGSLLAGGPVVAILGMIYNVIILGPTGFLGSAVFILFYPAMMFASRLTAYFRRKCVAATDERVQKMNEVLTYIKFIKMYAWVKAFSQSVQKIREEERRILEKAGYFQSITVGVAPIVVVIASVVTFSVHMTLGFDLTAAQAFTVVTVFNSMTFALKVTPFSVKSLSEASVAVDRFKSLFLMEEVHMIKNKPASPHIKIEMKNATLAWDSSHSSIQNSPKLTPKMKKDKRASRGKKEKVRQLQRTEHQAVLAEQKGHLLLDSDERPSPEEEEGKHIHLGHLRLQRTLHSIDLEIQEGKLVGICGSVGSGKTSLISAILGQMTLLEGSIAISGTFAYVAQQAWILNATLRDNILFGKEYDEERYNSVLNSCCLRPDLAILPSSDLTEIGERGANLSGGQRQRISLARALYSDRSIYILDDPLSALDAHVGNHIFNSAIRKHLKSKTVLFVTHQLQYLVDCDEVIFMKEGCITERGTHEELMNLNGDYATIFNNLLLGETPPVEINSKKETSGSQKKSQDKGPKTGSVKKEKAVKPEEGQLVQLEEKGQGSVPWSVYGVYIQAAGGPLAFLVIMALFMLNVGSTAFSTWWLSYWIKQGSGNTTVTRGNETSVSDSMKDNPHMQYYASIYALSMAVMLILKAIRGVVFVKGTLRASSRLHDELFRRILRSPMKFFDTTPTGRILNRFSKDMDEVDVRLPFQAEMFIQNVILVFFCVGMIAGVFPWFLVAVGPLVILFSVLHIVSRVLIRELKRLDNITQSPFLSHITSSIQGLATIHAYNKGQEFLHRYQELLDDNQAPFFLFTCAMRWLAVRLDLISIALITTTGLMIVLMHGQIPPAYAGLAISYAVQLTGLFQFTVRLASETEARFTSVERINHYIKTLSLEAPARIKNKAPSPDWPQEGEVTFENAEMRYRENLPLVLKKVSFTIKPKEKIGIVGRTGSGKSSLGMALFRLVELSGGCIKIDGVRISDIGLADLRSKLSIIPQEPVLFSGTVRSNLDPFNQYTEDQIWDALERTHMKECIAQLPLKLESEVMENGDNFSVGERQLLCIARALLRHCKILILDEATAAMDTETDLLIQETIREAFADCTMLTIAHRLHTVLGSDRIMVLAQGQVVEFDTPSVLLSNDSSRFYAMFAAAENKVAVKG

SEQ ID NO: 158455 - protein, 225 aa, Artificial Sequence
  derived and/or modified sequence
MKDIDIGKEYIIPSPGYRSVRERTSTSGTHRDREDSKFRRTRPLECQDALETAARAEGLSLDASMHSQLRILDEEHPKGKYHHGLSALKPIRTTSKHQHPVDNAGLFSCMTFSWLSSLARVAHKKGELSMEDVWSLSKHESSDVNCRRLERLWQEELNEVGPDAASLRRVVWIFCRTRLILSIVCLMITQLAGFSGPPSFGDCSISAEVCGNRLHCTAILLSCFT

SEQ ID NO: 158456 - protein, 231 aa, Artificial Sequence
  derived and/or modified sequence
MKDIDIGKEYIIPSPGYRSVRERTSTSGTHRDREDSKFRRTRPLECQDALETAARAEGLSLDASMHSQLRILDEEHPKGKYHHGLSALKPIRTTSKHQHPVDNAGLFSCMTFSWLSSLARVAHKKGELSMEDVWSLSKHESSDVNCRRLERLWQEELNEVGPDAASLRRVVWIFCRTRLILSIVCLMITQLAGFSGPVSSNHPFRQSPGARPRPALTLLFCCRGCAQLWAR

SEQ ID NO: 158457 - protein, 147 aa, Artificial Sequence
  derived and/or modified sequence
MKDIDIGKEYIIPSPGYRSVRERTSTSGTHRDREDSKFRRTRPLECQDALETAARAEGLSLDASMHSQLRILDEEHPKGKYHHGLSALKPIRTTSKHQHPVDNAGLFSCMTFSWLSSLARVAHKKGELSMEDVWSLSKHESSDVNCR

SEQ ID NO: 158458 - protein, 212 aa, Artificial Sequence
  derived and/or modified sequence
MKDIDIGKEYIIPSPGYRSVRERTSTSGTHRDREDSKFRRTRPLECQDALETAARAEGLSLDASMHSQLRILDEEHPKGKYHHGLSALKPIRTTSKHQHPVDNAGLFSCMTFSWLSSLARVAHKKGELSMEDVWSLSKHESSDVNCRRLERLWQEELNEVGPDAASLRRVVWIFCRTRLILSIVCLMITQLAGFSGPLAWCCQDLDLGGVSL

SEQ ID NO: 158459 - DNA, 4185 bp, Artificial Sequence
  derived and/or modified sequence
atgaaggacatcgacatcggtaaggagtatattattccctcaccggggtaccggagcgtgcgagaacggacctcgacgtcaggcacgcatagggatagggaggatagcaagttcagacgcacccgccctctggaatgccaggacgccctcgagaccgccgcccgcgccgaaggcctgtccctggatgctagcatgcacagtcagttaaggattctggacgaggagcatcccaaaggaaagtaccatcatgggctgtccgcactgaaacctatacgcaccacctcaaaacatcagcatccggtggacaatgcgggcctattctcttgcatgaccttctcctggctgagttccttggctcgggtggctcataagaagggcgaattgtctatggaagacgtatggtccctaagcaaacatgagtcgtccgacgtcaattgccggcgcctcgaaagactctggcaggaagagctaaatgaagtgggcccagatgccgcctcacttcgtagggtcgtgtggattttctgcagaaccaggctgatcctgtccattgtttgcctcatgattacccagctggccggatttagtgggccagcctttatggtcaagcacctcttggaatacactcaggctaccgagtcaaaccttcagtactctttactgctcgtgctcggccttctgttgactgagattgtgaggtcttggtctctcgccctgacctgggccctgaactaccgaactggggtccgcttaaggggcgcaattctcaccatggccttcaagaaaattctgaagttaaagaacattaaggaaaagagtctgggggagcttatcaacatttgcagcaacgacggtcagcgcatgtttgaagctgcagcagtggggagcctgctggcaggagggccggtggtggccattctgggaatgatctataatgtgatcatccttgggccaactggattcctcggttccgcggtgttcatcctattctaccctgccatgatgttcgcaagtcggttgacagcctattttaggcggaaatgtgtggcggcaaccgacgagcgggtgcaaaaaatgaatgaagtgctgacctacattaagttcattaagatgtacgcatgggtcaaggcttttagccaatctgtgcagaagatccgggaagaagaacgaagaatactcgagaaggctggctacttccaaagcattacagtgggtgtcgcaccaattgtggtggtgatagcctcggtagtgacattctccgtgcatatgacactcgggttcgacctaacggccgctcaggcattcaccgtcgtgaccgtttttaacagcatgacctttgcactgaaggtcaccccatttagtgtgaagtcacttagcgaagcctctgtagcggttgataggttcaagagcttgttcctgatggaagaggtgcatatgatcaaaaacaagccagcgtccccccatatcaagattgagatgaagaatgcaacattggcctgggactcatcgcacagctctatacagaacagtcctaagctgactccaaaaatgaagaaggacaaacgcgcttctcggggaaaaaaggagaaggtgagacagctgcagcggaccgaacatcaagcagtgctggccgaacagaaaggccacctgttgctagattccgacgagaggcctagtcccgaagaggaggaaggcaaacatatccacctgggccacctgcgcctccaaaggacattgcatagtatcgatttggagatacaggaggggaagctggtcggtatatgcgggagtgtgggttcaggcaaaacatccctcattagcgccattctgggtcaaatgacccttctcgaggggagcatcgccatttccgggacctttgcttacgtagcccagcaggcatggattctcaatgccaccctgcgtgacaacatcctgttcggcaaggaatacgacgaagagcgctacaacagtgttctaaactcctgttgcttacggcctgacctggcaatcttaccgagctccgaccttaccgaaattggcgagaggggggccaatctctccgggggccagaggcagagaatcagtcttgctagagccttatacagtgaccggagtatttatattctcgatgacccactatcagctttagacgcccacgtgggtaatcatattttcaatagcgccatcaggaaacacctcaagtccaagaccgtgctatttgtgacacatcagttgcagtatctggtagattgtgatgaggtaatctttatgaaagaaggatgcatcacagagaggggaacgcacgaagagctgatgaacctgaatggagactatgcaacaatatttaacaatctccttctgggcgagaccccacccgttgaaataaattcaaaaaaagaaacaagcggctctcagaaaaagtcccaggataaagggcccaagactggttcagtcaaaaaagaaaaggccgtcaagccagaggagggccaactggtgcagttagaggagaaaggccagggctccgtcccctggagcgtgtatggggtttatattcaggccgctggaggacctctcgcttttctcgttatcatggccctctttatgcttaatgtgggtagcaccgctttttccacgtggtggctgagttactggatcaaacaaggctccggaaacaccaccgtgacccggggcaacgaaacatccgtgagcgatagcatgaaggataatccacatatgcagtattatgcgtctatttatgctcttagtatggctgtgatgctcatactgaaggctatccgaggcgtggtatttgtgaaagggaccctgagagcatcctccaggttgcacgatgagctttttcgcaggattctgcggtcccccatgaagttttttgacacaacccccactggccgcattctgaacaggttctccaaggatatggatgaagtggatgttcgtctacccttccaggccgagatgttcatccagaacgtcattctggtgttcttttgcgtgggcatgattgcaggcgtttttccttggttcctcgtcgccgtcggccccctggtgattctgttctcagtgctgcacatcgtcagtagataccaggagcttctcgacgacaaccaggcgcccttctttttgtttacatgcgcaatgcgctggctggctgtccgactagacctcattagtattgcattaattaccactactgggctgatgatcgttctgatgcacgggcaaatcccacctgcctacgcaggactggccatatcttacgcggttcagctgaccgggttattccagtttacagtgcgtctggcttcagagaccgaggcccggtttactagcgtagaaagaatcaaccattatatcaagacactgtcactcgaggcaccagcacggattaaaaacaaggcacccagccctgattggccacaggagggcgaggtcaccttcgaaaacgccgaaatgcgctatcgcgaaaacctgcctctcgtcctgaaaaaagtgagttttaccatcaaaccaaaggagaaaatcgggattgtcggaaggactggaagtggcaaatccagcctgggcatggccctctttcggctcgtagaactgagtggaggctgtatcaagatcgatggcgtgagaatttctgacatagggcttgcagatctgcgttccaagctgtccattatacctcaggagccagtcctgttctctggcaccgtgcggtcaaatctcgaccctttcaatcagtacactgaggaccagatctgggacgctctcgagcgtacacacatgaaggaatgtattgcccaattgcccctcaaattggagtcagaggtgatggaaaacggggataacttctctgtgggagaaagacagctgctttgtatcgcgagagcactgctgcgacactgcaagatcttaatcttggacgaagctaccgcagcgatggacaccgaaactgatctgctgatccaggagactatccgcgaagccttcgcggactgcacaatgttaaccattgcacaccggctgcacaccgttctgggatctgataggatcatggttctagcccaagggcaggtcgtggagttcgatactccttcagtccttttgtctaacgactcttctcgcttttatgctatgtttgctgccgctgaaaacaaagtagcagtgaagggttag

SEQ ID NO: 158460 - DNA, 4314 bp, Artificial Sequence
  derived and/or modified sequence
atgaaggatatcgacatcggtaaagagtatatcattcccagtcccggttacaggagtgtgcgagaacgaacctccacttcaggcacacacagggatcgcgaggattccaaatttagacggacgagaccactagaatgtcaggacgctcttgagacagccgcccgggctgagggcttatccctcgatgcttccatgcattctcagctgcggatactggatgaggagcaccccaaaggtaagtaccaccatggactatcagccttgaaacctatcagaacaaccagcaaacaccagcaccctgtggacaacgcaggcttgttttcctgtatgacattttcctggttaagcagcctggcaagagttgcgcacaagaaaggcgagctgagcatggaggacgtttggtccctcagcaagcacgagtcgtcagatgttaattgtaggcgtctggagagactgtggcaggaggagttgaacgaggtcggacccgacgccgcctcactgcggcgcgtggtctggatcttctgcagaacgcggctcatactgtctatcgtctgcctgatgataacccagcttgcaggtttctcaggaccagccttcatggttaagcatctgttggagtatacccaagcaacagagagcaatctacagtacagtctgctgctggtgcttggactgctcttaacggagatagtgaggtcctggtccctggcgctcacctgggcactcaactacaggacaggagtccgccttcgaggggcaattttgaccatggccttcaaaaagattttgaagctcaaaaacattaaggaaaagagtctaggcgaactcatcaacatctgctcaaacgatgggcaacgtatgttcgaagcagcagcagtcgggtccctgcttgctggggggcccgttgtggctattctggggatgatctacaacgttatcatcttaggaccaaccggattcctgggatctgccgtgtttattttgttttatccagccatgatgtttgcttccagactgaccgcctactttcggcggaaatgcgtcgctgccacagacgaaagggtgcagaagatgaacgaagtgctgacctacatcaagttcatcaagatgtacgcatgggtaaaggcctttagtcaatccgtgcaaaaaatacgcgaagaggaaaggagaatcctggagaaggccggatactttcagagcataaccgtcggagtagcacccatagtcgttgtaattgccagcgtcgtgaccttctctgtgcatatgaccctgggttttgacctgacggctgcacaggctttcaccgtcgttacggtgtttaatagcatgacctttgctctgaaagttacacctttttcagtgaagtcactttccgaggcaagtgtggcggtcgacagattcaagtccctttttctgatggaggaagtgcatatgataaaaaataagccggcttccccacatattaagatcgagatgaagaatgccactctcgcttgggactcatctcactcgtcgattcagaacagcccgaaactgacacccaaaatgaaaaaagacaagcgcgcctctagaggaaaaaaggaaaaagtgaggcaattgcagcgtacggagcaccaggcagtgctcgcagaacagaaggggcacctcctgctcgactccgacgaaaggcctagccccgaggaagaggagggcaagcatatacacctaggacatttgcgtttacagcgaactctccactccattgacctggagatccaagagggaaagctggtgggtatctgtggatctgtcggatcaggtaaaacttccttgatctcagcgatcctaggacaaatgactctgctcgagggtagtattgcaattagtggtactttcgcatacgtcgctcagcaggcctggatcttgaatgcaacccttcgcgataatattctcttcggaaaggagtatgatgaagagcgctacaacagtgtgctgaattcatgctgcctccggccagacctagcgatcctccctagcagtgacctgacagagatcggggaacggggggccaatctgtctggtggacagagacagcggattagcctggccagggctctatatagcgacagatcaatctacatcctcgatgatcctctttcagccctggatgcccatgtggggaatcacatcttcaacagcgctattcgtaaacatctgaaaagtaaaaccgtgctgttcgtaacacaccagcttcaataccttgtcgactgcgacgaagtgatcttcatgaaggagggctgcattacagagcgcgggacacatgaagagctgatgaacctgaatggagattatgccacaatttttaataacctgctgttgggggaaacaccaccagtagagatcaattcgaagaaagagacaagcggttcacagaagaagagccaagacaagggcccaaagacgggaagcgtgaaaaaggagaaagcagtcaagccagaggaaggacaactggttcagctcgaggagaagggacaaggaagcgtgccatggagcgtgtatggcgtgtatattcaagccgcggggggtcctctcgcctttctcgttatcatggcccttttcatgctcaacgtggggtctactgccttcagtacttggtggctctcttattggatcaagcaggggtccgggaatacaactgttactcggggcaacgaaaccagcgtttccgattctatgaaggacaatcctcacatgcagtattacgcttccatttacgccttgtctatggctgttatgttgattctcaaagccattcgtggcgtggttttcgtgaaagggaccttacgtgctagctcccgcctgcacgatgagctgtttaggcgaattcttcgaagcccaatgaagttttttgatacaaccccaacgggacggattcttaatagattctccaaggacatggatgaggtagatgtcagactcccatttcaggctgagatgtttatccagaacgtgatactggtgttcttttgtgtcgggatgatcgccggtgttttcccgtggttcctggtggcagtgggacctctggtaattctgttctccgtcctccacattgtctccagggtccttattcgggaactgaagaggttagacaatatcacccaaagcccattcctctctcacatcacctccagcatccaaggactggccacgatccatgcgtataacaaaggccaggagtttctccacaggtatcaggaattacttgatgataatcaagctccctttttcctgttcacatgcgccatgaggtggcttgctgtgcgcctggacctgatcagcattgccttgatcaccacgactgggctcatgatagttctgatgcacggccagatcccgccagcgtacgccggactggctatttcatatgccgtgcaactcacaggattatttcagttcacagtccgtttggcatctgagaccgaggcccggtttacctcagtcgaacggataaaccactatatcaaaactctgagcctcgaggcgcctgcaaggatcaagaataaagctccatcacccgattggcctcaggaaggagaagtgacctttgagaacgccgagatgagataccgcgaaaacttacctctggtattgaaaaaagttagcttcacgatcaagcccaaggaaaaaatcggaattgtgggacggaccggtagcggtaaaagctctctgggaatggctttgtttagactggtggaactttccggcggatgcatcaagatagacggggtacgcatctctgacataggtctggcagatctcaggtctaagctgagcatcatacctcaggaacccgttctgtttagtgggacagtgagatccaatttagacccttttaaccagtacactgaggatcaaatctgggatgcattggaacggacacacatgaaagagtgcatcgcgcagctccctctcaagttggaatcagaggtgatggagaatggggataactttagcgtgggggagcgccagcttctctgcattgcaagggccctgctgagacactgcaagattcttatcctggatgaggcaacagcggccatggatacagagactgatttgttaatccaggagactatcagggaagccttcgctgattgtacgatgctcaccattgctcaccggctgcatacagttttgggatcagaccgaataatggtcttggcacagggccaggtggtggaatttgatacaccatctgttctgctgtccaacgactcaagcaggttctacgcgatgtttgccgccgctgagaacaaggtcgctgtgaagggatag

SEQ ID NO: 158461 - DNA, 2511 bp, Artificial Sequence
  derived and/or modified sequence
atgcatagccagctgaggatcctggatgaagaacaccctaagggaaagtatcatcacggcctgtctgccctgaagcctattaggacaaccagcaagcatcagcaccctgtggacaatgcggggctcttttcatgtatgactttttcgtggctgtctagcctggccagagtagcccacaagaaaggcgaactctccatggaagatgtgtggtcactgtcaaagcacgaaagcagcgacgtgaactgccgccgcctggaacgattatggcaggaggagctgaacgaggtgggccctgacgccgctagccttaggcgagtcgtgtggattttctgccggaccaggttaattctctctatagtgtgtcttatgatcacacagctggctggattctcgggtcctgcctttatggtcaaacatctgttagaatatactcaggcaactgagagcaacctacaatatagcctcctactggtgctcggcctgttgttaaccgagattgtcagatcctggtcactcgccctcacctgggccctgaattataggactggggttagattgcgcggcgccattctaaccatggcttttaagaagatcctcaagctgaaaaacataaaagaaaagtctttaggcgagttaattaacatttgctcaaatgacggccagcgcatgttcgaagcagcagccgtgggttctctcctggctggcggacctgtcgtcgcaatcctcggcatgatctataatgtgatcatcctcggacctactggtttcttgggaagtgctgtctttatactcttctacccagcaatgatgttcgccagccgcctgacagcttacttccgcaggaagtgcgttgccgccaccgatgaacgagtgcagaagatgaacgaagttcttacctatattaagttcatcaaaatgtatgcctgggtcaaagccttcagtcagtccgtccaaaaaattagggaagaggagcgcagaattttggaaaaggcgggatactttcaatccatcactgtgggagtggcccctatcgtggtagtgattgccagtgtggttaccttcagcgtccacatgaccctgggctttgacctgacagcagcacaggccttcacggtggttaccgtattcaactcaatgacattcgccctgaaagtcacccccttctccgtgaaatctctaagcgaagcttctgtcgccgtggaccggttcaaaagtctgttcctgatggaagaggtacacatgatcaaaaacaaaccggcatcccctcatattaaaatcgaaatgaagaatgcaaccctagcctgggacagctcacactcctcaattcagaattccccaaagctgaccccaaagatgaaaaaggacaaacgggcaagccggggtaaaaaagagaaggttcgccagctgcagcgcacagaacatcaggccgtcctggcagagcagaagggacacctgctgctggactctgacgagagaccttctccagaggaggaggagggcaagcatattcatctgggacatctccgactgcagcgtaccctgcattctatcgaccttgagatacaggagggtaagctcgtgggtatttgcgggtctgttggcagtggcaaaacctcactgataagtgctattctaggtcaaatgacactgctggagggctccatagccattagcggtaccttcgcctacgtggcacagcaagcatggatcttgaatgccacactgagagacaacatactgttcggaaaggagtacgatgaggaaaggtataacagtgtcctcaatagctgctgcctgaggcctgacctggccatcctcccctcctccgatctgacggagatcggcgagaggggcgcaaatctgagtggtggccaaaggcagcgcatctcactggcccgagccctctattccgaccgtagcatttacatcttagacgatcccttgtcggcgctcgacgcccacgtgggcaatcatatattcaattctgccattcgcaaacatctcaaaagtaaaaccgtgctatttgtgacgcaccagctgcagtatcttgttgactgcgatgaagtcattttcatgaaagaaggatgcatcaccgagagaggcacccacgaggaactgatgaacctgaacggcgactacgccactattttcaacaatttgctcctaggcgagacccctccggtggaaattaactccaagaaggaaaccagcgggagccagaaaaagtcgcaggacaaaggccccaaaaccggtagtgttaagaaggagaaggccgtgaaacccgaagaagggcagctggttcagctggaggaaaaaggtcaggggtccgtcccttggtctgtgtacggccaccccggctgctggggacctctgggcatccccggatactatggcccgttccacgccgagtgtcgtcaacacagactccagcatcttgttgtcgaactgttagatcaggcccgcaagagagagcaccactgtgatagtagggaacgcgacctgggcgaatag

SEQ ID NO: 158462 - DNA, 4185 bp, Artificial Sequence
  derived and/or modified sequence
atgaaggacatcgacatcggcaaggagtacatcatccccagccctggctacagatctgtgcgggagaggaccagcaccagcggcacccaccgggaccgggaggacagcaagttccggaggacccggcccctggagtgccaggatgccctggagacagctgcccgggcagagggcctgagcctggatgcctccatgcacagccagctgcgcatcctggatgaggagcaccccaagggcaagtaccaccacggcctgagcgccctgaagcccatccgcaccaccagcaagcaccagcaccctgtggacaatgccggcctcttcagctgcatgaccttctcctggctgagcagcctggcccgggtggcccacaagaagggggagctgtccatggaggatgtgtggagcctgagcaagcatgagagcagtgatgtgaactgccggcggctggagcggctgtggcaggaggagctgaatgaggtgggcccagatgctgccagcctgcggcgggtggtgtggatcttctgcaggaccaggctcatcctgagcatcgtgtgcctgatgatcacccagctggccggcttcagcggccctgccttcatggtgaagcacctgctggagtacacccaggccacagagagcaacctgcagtacagcctgctgctggtgctgggcctgctgctgacagagatcgtgcgctcctggagcctggccctgacctgggccctgaactacagaactggagtgcggctgcggggggccatcctgaccatggccttcaagaagatcctgaagctgaagaacatcaaggagaagagcctgggggagctgatcaacatctgcagcaatgatggccagaggatgtttgaggccgctgctgtgggcagcctgctggccggcggccctgtggtggccatcctgggcatgatctacaacgtcatcatcctgggccccaccggcttcctgggcagcgctgtgttcatcctcttctacccagccatgatgtttgccagccggctgacagcctacttccggaggaaatgtgtggccgccacagatgagcgggtgcagaagatgaatgaggtgctgacctacatcaagttcatcaagatgtatgcctgggtgaaggccttcagccagagcgtgcagaagatccgggaggaggagcggcgcatcctggagaaggccggctacttccagagcatcaccgtgggcgtggcccccatcgtggtggtgattgcctctgtggtgaccttctctgtgcacatgaccctgggctttgacctgacagctgcccaggccttcaccgtggtgaccgtcttcaacagcatgacctttgccctgaaggtgacccccttctctgtgaagagcctgtctgaggcctctgtggccgtggaccgcttcaagagcctcttcctgatggaggaggtgcacatgatcaagaacaagccagccagcccccacatcaagattgagatgaagaatgccaccctggcctgggacagcagccacagcagcatccagaacagccccaagctgacccccaagatgaagaaggacaagagggccagccggggcaagaaggagaaggtgcggcagctgcagaggacagagcaccaggccgtgctggccgagcagaagggccacctgctgctggacagtgatgagcggcccagccctgaggaggaggagggcaagcacatccacctgggccacctgcggctgcagaggaccctgcacagcattgacctggagatccaggagggcaagctggtgggcatctgtggctctgtgggcagcggcaagaccagcctcatcagcgccatcctgggccagatgaccctgctggagggcagcatcgccatcagcggcacctttgcctacgtggcccagcaggcctggatcctgaatgccaccctgcgggacaacatcctgtttgggaaggagtatgatgaggagcgctacaacagcgtgctgaacagctgctgcctgcggccagacctggccatcctgcccagcagtgacctgacagagatcggggagcggggggccaacctgagcggcggccagaggcagaggatcagcctggcccgggccctgtacagcgacaggagcatctacatcctggatgaccccctgagcgccctggatgcccacgtgggcaaccacatcttcaacagcgccatcaggaagcacctgaagagcaagacagtgctgtttgtgacccaccagctgcagtacctggtggactgtgatgaagtcatcttcatgaaggagggctgcatcacagagcggggcacccatgaggagctgatgaacctgaatggagactatgccaccatcttcaacaacctgctgctgggggagaccccacctgtggagatcaacagcaagaaggagaccagcggcagccagaagaagagccaggacaagggccccaagacaggctctgtgaagaaggagaaggctgtgaagccagaggagggccagctggtgcagctggaggagaagggccagggctctgtgccctggagcgtgtatggagtgtacatccaggccgccggcggccccctggccttcctggtgatcatggccctcttcatgctgaatgtgggcagcacagccttcagcacctggtggctgagctactggatcaagcagggcagcggcaacaccaccgtgaccagaggaaatgagacctctgtgtctgacagcatgaaggacaacccccacatgcagtactatgccagcatctatgccctgtccatggctgtgatgctgatcctgaaggccatccggggcgtggtgtttgtgaagggcaccctgcgggccagcagccggctgcatgatgagctgttccgccgcatcctgcggagccccatgaagttctttgacaccacccccaccggccgcatcctgaaccgcttcagcaaggacatggatgaggtggatgtgcggctgcccttccaggccgagatgttcatccagaatgtcatcctggtgttcttctgtgtgggcatgattgctggggtcttcccctggttcctggtggccgtgggccccctggtgatcctcttctctgtgctgcacatcgtgagccgctaccaggagctgctggatgacaaccaggcccccttcttcctgttcacctgtgccatgcgctggctggccgtgcggctggacctgatcagcatcgccctgatcaccaccaccggcctgatgattgtgctgatgcacggccagatccccccagcctatgccggcctggccatctcctatgctgtgcagctgaccggcctcttccagttcaccgtgcggctggccagcgagacagaggcccgcttcacctctgtggagcgcatcaaccactacatcaagaccctgagcctggaggccccagcccgcatcaagaacaaggcccccagcccagactggccccaggagggggaggtgacctttgaaaatgctgagatgagataccgggagaacctgcccctggtgctgaagaaggtgtccttcaccatcaagcccaaggagaagattggcatcgtgggccgcacaggcagcggcaagagcagcctgggcatggccctcttccggctggtggagctgagcggcggctgcatcaagattgatggagtgcgcatcagtgacatcggcctggccgacctgcggagcaagctgagcatcatcccccaggagcctgtgctcttcagcggcaccgtgcgcagcaacctggaccccttcaaccagtacacagaggaccagatctgggatgccctggagaggacccacatgaaggaatgtattgcccagctgcccctgaagctggagagcgaggtgatggagaatggagacaacttctctgtgggggagcggcagctgctgtgcatcgcccgggccctgctgcggcactgcaagatcctgatcctggatgaggccacagctgccatggacacagaaacagacctgctgatccaggagaccatccgggaggcctttgctgactgcaccatgctgaccatcgcccaccggctgcacacagtgctgggcagtgaccgcatcatggtgctggcccagggccaggtggtggagtttgacaccccatctgtgctgctgagcaatgacagcagccgcttctacgccatgtttgctgctgctgagaacaaggtggccgtgaagggctag

SEQ ID NO: 158463 - DNA, 4314 bp, Artificial Sequence
  derived and/or modified sequence
atgaaggacatcgacatcggcaaggagtacatcatccccagccctggctacagatctgtgcgggagaggaccagcaccagcggcacccaccgggaccgggaggacagcaagttccggaggacccggcccctggagtgccaggatgccctggagacagctgcccgggcagagggcctgagcctggatgcctccatgcacagccagctgcgcatcctggatgaggagcaccccaagggcaagtaccaccacggcctgagcgccctgaagcccatccgcaccaccagcaagcaccagcaccctgtggacaatgccggcctcttcagctgcatgaccttctcctggctgagcagcctggcccgggtggcccacaagaagggggagctgtccatggaggatgtgtggagcctgagcaagcatgagagcagtgatgtgaactgccggcggctggagcggctgtggcaggaggagctgaatgaggtgggcccagatgctgccagcctgcggcgggtggtgtggatcttctgcaggaccaggctcatcctgagcatcgtgtgcctgatgatcacccagctggccggcttcagcggccctgccttcatggtgaagcacctgctggagtacacccaggccacagagagcaacctgcagtacagcctgctgctggtgctgggcctgctgctgacagagatcgtgcgctcctggagcctggccctgacctgggccctgaactacagaactggagtgcggctgcggggggccatcctgaccatggccttcaagaagatcctgaagctgaagaacatcaaggagaagagcctgggggagctgatcaacatctgcagcaatgatggccagaggatgtttgaggccgctgctgtgggcagcctgctggccggcggccctgtggtggccatcctgggcatgatctacaacgtcatcatcctgggccccaccggcttcctgggcagcgctgtgttcatcctcttctacccagccatgatgtttgccagccggctgacagcctacttccggaggaaatgtgtggccgccacagatgagcgggtgcagaagatgaatgaggtgctgacctacatcaagttcatcaagatgtatgcctgggtgaaggccttcagccagagcgtgcagaagatccgggaggaggagcggcgcatcctggagaaggccggctacttccagagcatcaccgtgggcgtggcccccatcgtggtggtgattgcctctgtggtgaccttctctgtgcacatgaccctgggctttgacctgacagctgcccaggccttcaccgtggtgaccgtcttcaacagcatgacctttgccctgaaggtgacccccttctctgtgaagagcctgtctgaggcctctgtggccgtggaccgcttcaagagcctcttcctgatggaggaggtgcacatgatcaagaacaagccagccagcccccacatcaagattgagatgaagaatgccaccctggcctgggacagcagccacagcagcatccagaacagccccaagctgacccccaagatgaagaaggacaagagggccagccggggcaagaaggagaaggtgcggcagctgcagaggacagagcaccaggccgtgctggccgagcagaagggccacctgctgctggacagtgatgagcggcccagccctgaggaggaggagggcaagcacatccacctgggccacctgcggctgcagaggaccctgcacagcattgacctggagatccaggagggcaagctggtgggcatctgtggctctgtgggcagcggcaagaccagcctcatcagcgccatcctgggccagatgaccctgctggagggcagcatcgccatcagcggcacctttgcctacgtggcccagcaggcctggatcctgaatgccaccctgcgggacaacatcctgtttgggaaggagtatgatgaggagcgctacaacagcgtgctgaacagctgctgcctgcggccagacctggccatcctgcccagcagtgacctgacagagatcggggagcggggggccaacctgagcggcggccagaggcagaggatcagcctggcccgggccctgtacagcgacaggagcatctacatcctggatgaccccctgagcgccctggatgcccacgtgggcaaccacatcttcaacagcgccatcaggaagcacctgaagagcaagacagtgctgtttgtgacccaccagctgcagtacctggtggactgtgatgaagtcatcttcatgaaggagggctgcatcacagagcggggcacccatgaggagctgatgaacctgaatggagactatgccaccatcttcaacaacctgctgctgggggagaccccacctgtggagatcaacagcaagaaggagaccagcggcagccagaagaagagccaggacaagggccccaagacaggctctgtgaagaaggagaaggctgtgaagccagaggagggccagctggtgcagctggaggagaagggccagggctctgtgccctggagcgtgtatggagtgtacatccaggccgccggcggccccctggccttcctggtgatcatggccctcttcatgctgaatgtgggcagcacagccttcagcacctggtggctgagctactggatcaagcagggcagcggcaacaccaccgtgaccagaggaaatgagacctctgtgtctgacagcatgaaggacaacccccacatgcagtactatgccagcatctatgccctgtccatggctgtgatgctgatcctgaaggccatccggggcgtggtgtttgtgaagggcaccctgcgggccagcagccggctgcatgatgagctgttccgccgcatcctgcggagccccatgaagttctttgacaccacccccaccggccgcatcctgaaccgcttcagcaaggacatggatgaggtggatgtgcggctgcccttccaggccgagatgttcatccagaatgtcatcctggtgttcttctgtgtgggcatgattgctggggtcttcccctggttcctggtggccgtgggccccctggtgatcctcttctctgtgctgcacatcgtgtcccgggtgctgatccgggagctgaagaggctggacaacatcacccagagccccttcctgagccacatcaccagcagcatccagggcctggccaccatccacgcctacaacaagggccaggagttcctgcaccgctaccaggagctgctggatgacaaccaggcccccttcttcctgttcacctgtgccatgcgctggctggccgtgcggctggacctgatcagcatcgccctgatcaccaccaccggcctgatgattgtgctgatgcacggccagatccccccagcctatgccggcctggccatctcctatgctgtgcagctgaccggcctcttccagttcaccgtgcggctggccagcgagacagaggcccgcttcacctctgtggagcgcatcaaccactacatcaagaccctgagcctggaggccccagcccgcatcaagaacaaggcccccagcccagactggccccaggagggggaggtgacctttgaaaatgctgagatgagataccgggagaacctgcccctggtgctgaagaaggtgtccttcaccatcaagcccaaggagaagattggaattgtgggccgcactggaagtggcaagagcagcctgggcatggccctcttccggctggtggagctgagcggcggctgcatcaagattgatggagtgcgcatcagtgacatcggcctggccgacctgcggagcaagctgagcatcatcccccaggagcctgtgctcttctctggaacagtgcgcagcaacctggaccccttcaaccagtacacagaggaccagatctgggatgccctggagaggacccacatgaaggagtgcatcgcccagctgcccctgaagctggagagcgaggtgatggagaatggagacaacttctctgtgggggagcggcagctgctgtgcatcgcccgggccctgctgcggcactgcaagatcctgatcctggatgaggccacagctgccatggacacagaaacagacctgctgatccaggagaccatccgggaggcctttgctgactgcaccatgctgaccatcgcccaccggctgcacacagtgctgggcagtgaccgcatcatggtgctggcccagggccaggtggtggagtttgacacccccagcgtgctgctgagcaatgacagcagccgcttctacgccatgtttgctgctgctgagaacaaggtggccgtgaagggctag

SEQ ID NO: 158464 - DNA, 2511 bp, Artificial Sequence
  derived and/or modified sequence
atgcacagccagctgcgcatcctggatgaggagcaccccaagggcaagtaccaccacggcctgagcgccctgaagcccatccgcaccaccagcaagcaccagcaccctgtggacaatgccggcctcttcagctgcatgaccttctcctggctgagcagcctggcccgggtggcccacaagaagggggagctgtccatggaggatgtgtggagcctgagcaagcatgagagcagtgatgtgaactgccggcggctggagcggctgtggcaggaggagctgaatgaggtgggcccagatgctgccagcctgcggcgggtggtgtggatcttctgcaggaccaggctcatcctgagcatcgtgtgcctgatgatcacccagctggccggcttcagcggccctgccttcatggtgaagcacctgctggagtacacccaggccacagagagcaacctgcagtacagcctgctgctggtgctgggcctgctgctgacagagatcgtgcgctcctggagcctggccctgacctgggccctgaactacagaactggagtgcggctgcggggggccatcctgaccatggccttcaagaagatcctgaagctgaagaacatcaaggagaagagcctgggggagctgatcaacatctgcagcaatgatggccagaggatgtttgaggccgctgctgtgggcagcctgctggccggcggccctgtggtggccatcctgggcatgatctacaacgtcatcatcctgggccccaccggcttcctgggcagcgctgtgttcatcctcttctacccagccatgatgtttgccagccggctgacagcctacttccggaggaaatgtgtggccgccacagatgagcgggtgcagaagatgaatgaggtgctgacctacatcaagttcatcaagatgtatgcctgggtgaaggccttcagccagagcgtgcagaagatccgggaggaggagcggcgcatcctggagaaggccggctacttccagagcatcaccgtgggcgtggcccccatcgtggtggtgattgcctctgtggtgaccttctctgtgcacatgaccctgggctttgacctgacagctgcccaggccttcaccgtggtgaccgtcttcaacagcatgacctttgccctgaaggtgacccccttctctgtgaagagcctgtctgaggcctctgtggccgtggaccgcttcaagagcctcttcctgatggaggaggtgcacatgatcaagaacaagccagccagcccccacatcaagattgagatgaagaatgccaccctggcctgggacagcagccacagcagcatccagaacagccccaagctgacccccaagatgaagaaggacaagagggccagccggggcaagaaggagaaggtgcggcagctgcagaggacagagcaccaggccgtgctggccgagcagaagggccacctgctgctggacagtgatgagcggcccagccctgaggaggaggagggcaagcacatccacctgggccacctgcggctgcagaggaccctgcacagcattgacctggagatccaggagggcaagctggtgggcatctgtggctctgtgggcagcggcaagaccagcctcatcagcgccatcctgggccagatgaccctgctggagggcagcatcgccatcagcggcacctttgcctacgtggcccagcaggcctggatcctgaatgccaccctgcgggacaacatcctgtttgggaaggagtatgatgaggagcgctacaacagcgtgctgaacagctgctgcctgcggccagacctggccatcctgcccagcagtgacctgacagagatcggggagcggggggccaacctgagcggcggccagaggcagaggatcagcctggcccgggccctgtacagcgacaggagcatctacatcctggatgaccccctgagcgccctggatgcccacgtgggcaaccacatcttcaacagcgccatcaggaagcacctgaagagcaagacagtgctgtttgtgacccaccagctgcagtacctggtggactgtgatgaagtcatcttcatgaaggagggctgcatcacagagcggggcacccatgaggagctgatgaacctgaatggagactatgccaccatcttcaacaacctgctgctgggggagaccccacctgtggagatcaacagcaagaaggagaccagcggcagccagaagaagagccaggacaagggccccaagacaggctctgtgaagaaggagaaggctgtgaagccagaggagggccagctggtgcagctggaggagaagggccagggctctgtgccctggagcgtgtatggccaccctggctgctggggccccctgggcatccctggctactacggccccttccacgcagaatgtcggcagcaccggctgcagcacctggtggtggagctgctggaccaggccaggaagcgggagcaccactgtgacagccgggagcgggacctgggggagtag

SEQ ID NO: 158465 - DNA, 4185 bp, Artificial Sequence
  derived and/or modified sequence
atgaaggacatcgacatcggcaaggagtacatcatccccagccccggatacagatcagtgagagagcgtacttccaccagtggcacccaccgggaccgcgaggattcaaagtttcgccgcacaaggccgctcgaatgccaggacgctctagaaacagcagcacgcgccgaggggctatccctcgacgcatcaatgcacagccagctccgaattctggacgaggaacatcccaagggaaaataccaccacggccttagtgcccttaagcccatccgcacgacttctaaacatcagcaccccgtggacaatgctgggttgttcagttgtatgacctttagctggcttagctctctggcaagggttgcacacaagaagggcgaactgtctatggaagatgtttggtctctgtcgaagcacgagtctagtgacgtgaactgcaggcgactggaaaggctgtggcaggaggagctaaacgaagttggcccagacgccgcctctctgcgacgagtggtgtggatattttgtcgtactagacttattttgtcaatagtttgtctcatgataacgcagctggctgggttcagcggtcctgctttcatggttaagcacctgctggaatatacccaggctaccgagagcaatctgcagtactccttgttgctggtgctgggtctgctgttgacagaaattgtgcggtcgtggagcctcgccctgacctgggcccttaactatcggacgggcgtgcggcttagaggcgcgatactaaccatggccttcaagaaaattctgaaacttaaaaatataaaagagaagtcactaggtgagctaatcaatatttgtagcaatgatggccagaggatgtttgaggcagccgccgtcggctcactgctagctggggggccagtggtggctatactcggtatgatttacaacgtgattatattgggtcctactgggtttctcgggtctgccgtgttcatattgttctaccccgctatgatgttcgcctcccgactgacagcctactttaggcgtaaatgtgtagccgccactgacgaacgcgttcagaaaatgaatgaggtactgacatacatcaaattcattaaaatgtacgcctgggtgaaggcattctcacagagcgtccagaaaatccgcgaagaagaaaggcgcatcctggagaaggctggctacttccaatccattaccgtgggtgtggccccgatagtggtcgtaatcgctagcgtggtcaccttttccgtgcatatgacgctcggttttgatctcaccgccgcccaagccttcactgtggtgaccgtttttaatagcatgacatttgcgctgaaggtcaccccattctctgtgaaatctttaagcgaagcctcagttgctgtggacaggtttaagagcctattcttgatggaagaggtgcacatgatcaagaacaagcccgctagcccacatattaaaattgagatgaagaacgctactttggcctgggatagctctcactcatccattcagaacagccctaagctgacacctaagatgaagaaggataagcgcgccagcaggggcaagaaagagaaagtaagacaactccaacgcacagagcaccaggcggtgctggcggagcagaaaggccatctgctgctggattcggatgagcggcctagtcccgaggaggaggagggtaagcacattcacctcggccatctgcgcttacagcgtaccctgcactcaatcgatctggagatacaagaaggtaaactggtaggtatctgcgggtctgttggctctggcaagacctccctaatcagtgctattctggggcagatgacgctgctcgaaggttcaatcgcaattagcggaacattcgcatacgtggcacagcaggcttggattctgaacgccacattgcgcgacaatattttgttcggcaaagaatacgacgaggagcggtacaactcggtactaaattcctgctgcctccgtcccgacctggccattctgccttccagcgacctgaccgagataggggagaggggggccaatctttctggaggacagcgccagaggataagccttgctcgggcactgtatagtgatcgctctatctacatcctcgatgatcccttaagtgctctggatgcacacgtcggtaaccatattttcaacagcgccataagaaaacatttgaagtccaagacggtgcttttcgttacacatcaattacaatacctggtggactgtgacgaggtgatcttcatgaaggaggggtgtattacagaacgaggtacccacgaggaactgatgaacctgaacggcgactacgctacaatatttaataacctgctcctcggggagacacctcccgtcgaaataaattcaaaaaaagaaacctctgggagccagaagaagtcccaagacaaagggcctaagactgggagcgtgaagaaagagaaagccgtgaaaccagaagagggacaacttgttcagttagaggaaaaaggacaaggaagcgtgccatggagtgtgtatggagtctacatccaggcagcagggggcccactggccttcctggtcatcatggcccttttcatgcttaatgtgggctcgacggcattttccacgtggtggctttcatattggatcaagcagggcagtggcaatacgaccgtaacccggggaaacgaaacttccgtgagtgactctatgaaagacaacccacatatgcagtactatgccagtatttatgccctgtccatggccgttatgctgatccttaaagcaatccgtggagtggtgtttgtaaagggcacgcttagagcaagctctcgattgcacgacgaactgttccgtagaatattacgaagtcctatgaagtttttcgatactactccaacaggcagaatcctcaataggttcagcaaagatatggatgaagtggacgtgcgtctgccgttccaagcggaaatgttcatacagaatgtgatcctcgtgttcttctgcgtgggaatgatcgcaggggtattcccttggttcctggtggccgtgggaccgctagtgatcctgttttccgtgttgcacattgtgtcaagataccaggaactgctggatgataatcaggcgccattttttctgttcacctgcgccatgcgctggttggccgtgcggctcgacttgattagcatcgccctgattactacgactggcctgatgattgtgttaatgcacggccagatcccccctgcatatgcggggctggccatctcctatgcagttcagttaacaggactgtttcaatttaccgtgaggctggcctccgagacagaggctcgtttcactagcgtggaacgtatcaatcactatattaagacacttagcctggaggcacccgcaagaattaaaaataaagctccgtcccccgattggccccaggagggcgaggtcacatttgaaaatgcggaaatgagatatagggaaaatctccctctggtgctgaagaaggtgagctttaccatcaagccaaaagagaagattggaattgtgggcaggacagggagcggaaaatcatccctgggcatggccttgtttaggctggtggaactgtcgggcggatgtatcaaaatcgacggcgtgagaatctcagacattggtcttgccgatttacgatccaagctttccatcattccccaggaacccgtgttattttccggaaccgtcagaagcaatttggatcctttcaaccagtacacagaggaccaaatctgggacgctttagagcgaacacacatgaaggaatgcatcgcacaactgcccctgaaactcgaatctgaggtgatggagaacggggataatttcagcgtcggtgagaggcagttgttgtgtatcgctagggcactgcttaggcactgcaagatcctgatcttggatgaggctacagccgccatggataccgaaacagatctgctgattcaggagaccatcagagaggccttcgccgactgtactatgctgaccattgcacataggttgcacaccgtgctgggctccgaccgcatcatggtactggctcagggccaagtcgtagagttcgacaccccatccgtactgctctctaatgatagctcacggttttacgccatgttcgcagccgccgagaacaaggtggccgtcaaaggatag

SEQ ID NO: 158466 - DNA, 4314 bp, Artificial Sequence
  derived and/or modified sequence
atgaaggacatcgacatcggcaaggagtacatcatccccagccccggctacaggtccgtacgggagaggacttctacttctggaacccaccgggacagggaggacagcaaatttcgccggactaggccccttgagtgccaagacgccctcgagacggcggcccgggcagaggggcttagtcttgacgcttccatgcacagccagttgcgcattctcgatgaagagcaccctaagggtaagtaccaccatggattgagtgcgcttaaacccatccgcaccacctcaaaacaccagcatccagtggataacgccggtctcttttcatgcatgacatttagttggttgtcatctctagccagggtggcccacaagaagggcgaactgagcatggaggacgtgtggagcctcagcaaacacgagtcaagtgacgtgaattgtagacgcctcgagcggctgtggcaagaagaacttaacgaggttggccctgatgccgccagccttaggagagtggtttggattttctgcagaacgagactgatcctgagtattgtgtgtttgatgatcacgcagttagctggtttctcgggtcccgcattcatggtgaagcacctgctggaatacacccaagctactgagagcaacttacaatacagcctgttgctggtgctgggacttcttcttacagagattgttaggtcctggtcacttgccctaacatgggcattgaactacaggactggcgtccgactgcgaggagccatcctcaccatggccttcaaaaagattctcaagctcaaaaacatcaaagagaagagcctgggcgagttaattaatatctgtagcaatgatggccagcggatgttcgaggctgccgcggtaggctctttactcgcggggggaccagtggttgctatcctgggcatgatttacaacgtgatcattctgggcccaaccggctttcttggctcagccgttttcattctgttctatccagccatgatgtttgcatcacggttgactgcctatttccgccggaagtgtgtcgcagccacggacgaaagagtccaaaagatgaacgaagtgttgacatatataaagttcatcaagatgtatgcatgggtaaaagctttctcacagtcggtgcaaaagatccgagaggaggaaaggcggatcctggagaaggccggctatttccagtcaataacagttggggtggccccgatcgtggtcgtgatcgcttctgtcgtgacttttagcgtgcacatgacgctagggtttgatcttacagccgctcaggctttcacagtcgtgacagtgtttaacagcatgacctttgctctcaaagttacgcctttttccgtgaagtcattgtctgaagcgtccgttgccgtggatcggtttaaatctttgtttctcatggaggaggtgcatatgatcaagaacaaacccgcctcccctcatattaagatcgagatgaaaaatgctaccctggcctgggacagttcacatagctcaattcaaaattctccaaaactgacacccaaaatgaagaaggacaaaagggcttcccgtggaaagaaggaaaaggtccgccagctgcagaggactgaacatcaggcggtccttgccgaacaaaaaggccacctcctcctggacagcgatgaacgcccgtctcccgaggaagaagaagggaaacatatccacctaggacatttgcgcctccaacgcacccttcatagcattgatctcgaaatccaagaagggaaactggtgggtatatgcgggtctgtgggatccggaaagacgtcgctcatctccgcaattctagggcaaatgactctactggagggtagtatagcaattagcggaacttttgcttatgtggcccagcaggcttggattctgaacgccacacttagagataacattctgtttggcaaagagtatgacgaagagcggtacaactctgtgctgaactcgtgctgtctaagaccggatctcgccatcctcccctcatctgacttgacagagattggggagcgcggtgccaatctcagcggaggccagaggcaaaggatctcgcttgcccgtgcactgtattccgacaggagcatctatatccttgatgaccccctcagtgctctggacgcccatgtgggtaatcacatctttaactcggccatcagaaaacaccttaaatctaaaacagtcctctttgtgactcaccagcttcagtatttggtcgactgtgatgaggtgatcttcatgaaagagggctgcataacagagagaggaacccatgaggagctgatgaatctgaatggcgactatgctacgatcttcaacaatctgctcttaggtgagacaccgcccgtcgaaatcaacagcaagaaggagaccagcgggtcccagaaaaagtcacaggataagggacccaagaccggatctgtcaaaaaggagaaggcggtaaaacccgaagaagggcagctggtgcagctggaggagaaaggacagggcagtgtgccctggtctgtgtatggcgtgtacatccaggctgctggcggtccactcgcctttttagtaattatggctctgtttatgctgaatgtagggagtacagcatttagtacctggtggctgagttactggattaaacagggttcaggtaacactaccgtcactagaggcaacgaaacatcagtgtccgacagcatgaaggataacccgcatatgcaatattacgctagcatctatgccctgtcgatggctgtcatgctcatccttaaggctatccgaggggtggtgtttgtcaagggaaccctgagggccagttcaaggctgcacgatgaactctttaggaggattttgcgttccccaatgaaattctttgatactacacccaccggacgcattcttaaccggtttagcaaggacatggacgaagtcgacgtgcgactcccgtttcaggccgaaatgttcatccagaatgtgatcctcgtgttcttttgtgttgggatgattgcgggagtgttcccctggttcctagtggccgtgggccctctggtcatcctgtttagcgttcttcacattgtctctagggttctgattcgcgagcttaagcgcttggataatataacgcaatcaccatttttgtctcatatcacgagcagtattcagggtcttgctaccattcacgcctacaacaagggtcaggagttcttgcacaggtaccaggaactcttggacgacaaccaggcaccattcttcctgtttacttgtgccatgagatggctcgctgttaggctcgaccttatctcgattgcactcattactaccacagggctcatgatagtgctgatgcatggacagatcccacccgcgtatgccggacttgcaatttcatatgcggttcagctgaccggactgtttcagtttacagttcggctcgccagtgagactgaggccaggtttaccagcgtcgagcgaattaaccactacattaagacactgagcctggaggctccagcgcggattaagaacaaagctcccagccccgactggcctcaggagggagaagtgacctttgagaacgccgaaatgaggtaccgcgagaatttaccactagtgctcaagaaagtgtcatttactatcaaacccaaggagaaaattggaattgtcggacgaaccggatctgggaagtcaagccttgggatggccctgttcagactcgtagagctatccggcgggtgtattaagattgatggagtccgaatttccgatataggcctcgctgatcttaggtccaagctatcaatcatcccccaagagcctgtgctttttagcggtacagtgaggagcaacttagacccattcaaccagtacaccgaggatcagatttgggacgccttggagcggacccatatgaaggagtgcattgcccagctgcctctaaagctggaatcagaggtaatggaaaatggcgataacttttctgtgggtgagcgccagttgttgtgcattgctcgggccctccttaggcattgcaagatccttatcttggacgaggcgaccgctgctatggacaccgagacagacctgctaattcaggaaacgatccgggaagcgtttgctgactgcaccatgctgaccatcgcacacagattacacacagttctcggcagtgaccgcatcatggtgttggcccaaggtcaggtggtcgaattcgatacaccttccgtacttttgtccaatgacagctcccgattttatgctatgtttgccgcggccgaaaataaagtcgcagttaaagggtag

SEQ ID NO: 158467 - DNA, 2511 bp, Artificial Sequence
  derived and/or modified sequence
atgcacagccagctgcggatcctggacgaggagcaccccaagggcaaatatcatcacggcctgtctgccctaaagcccattcgcaccacaagcaagcatcaacatccggttgacaacgctggactgttcagctgcatgacattttcttggctcagtagccttgcccgggtggcccataagaaaggggagctcagcatggaggacgtctggagtctttccaagcacgagagttccgacgtgaactgtcgacgcttggagagactgtggcaggaggaactgaatgaagttggaccggacgcggcatcgctgaggcgggtcgtgtggatcttttgcagaacacgactcatactgagtatcgtgtgtctaatgatcactcagctggctggatttagcggacccgcgttcatggtgaagcatctcctggagtatacccaggccactgaaagcaatctgcagtactctcttcttcttgtgctaggtctgttgctgactgaaattgtgaggtcctggtcccttgcactgacctgggcgctgaactaccgtactggggtgcgactaagaggcgctatcttaacaatggcatttaagaaaatacttaagcttaaaaatattaaggagaagagcctgggtgagctcattaatatatgttccaatgacggccagaggatgttcgaggctgcggccgttggctctctcctggccggaggaccagtggtggcaatcctgggaatgatctataatgttataatcctcggtcccactggatttctgggatcagccgttttcattctgttctaccctgccatgatgtttgcatctagactcaccgcttacttccggcggaaatgcgttgcagcaacagatgagcgggtgcaaaagatgaatgaggtcctcacatacattaagttcattaagatgtacgcttgggtgaaggccttctctcagtctgtgcagaagattagggaggaagagcgtagaattctggaaaaggccggctactttcagtcaattacagtaggggtggccccaatcgtggtcgttatcgcgtccgtggttaccttttctgtccacatgacattgggattcgacctcactgcagcacaggctttcactgtcgtcactgtcttcaactctatgacattcgcgctcaaggtgactccattctcagtcaagtcattgtcagaggcatcggtggctgttgataggttcaaatctttgtttctgatggaagaggttcacatgatcaagaacaagcctgcttccccacacattaagattgaaatgaagaatgctactctcgcttgggacagctcacactctagtatccaaaattcacccaaacttactcctaaaatgaagaaagacaagcgtgcgtccagaggcaagaaagaaaaggtgcggcagctgcaacgaactgagcaccaggccgtgctggccgaacagaaaggacatctgctgctggacagcgacgaacggccttcacccgaagaagaggagggcaaacatatacatctgggtcacctccggttacagcggacactgcacagcatcgatctcgagattcaggagggaaagcttgtgggaatttgtggaagtgtggggagcggaaaaacttccttgatttctgccatcttggggcagatgacgctccttgagggcagcatcgcgatcagtggcaccttcgcctacgtcgcccaacaggcctggatactgaatgcgactttacgtgataacatcctgtttggcaaggaatatgatgaagaacggtataatagcgtgctcaatagttgttgcttgaggcctgacctcgctatcctgccttcctcggacctgacagagatcggagagcggggcgcaaacctgtcaggtggtcagagacagcgcatctcgctggccagggcactgtatagtgatcgttcaatttacattttggacgatccactgtcggccttagacgctcatgttggaaaccatatcttcaacagcgccataaggaagcatctgaaatccaagactgtgttattcgtcacccaccagctacagtacctggtagactgtgacgaagtcatttttatgaaagaaggctgcatcacagagcgaggaactcatgaggagctgatgaatctcaatggtgactatgcgacaatcttcaataacctgctgttgggagagactcctccggtcgagattaattccaaaaaagagacatctgggtctcaaaaaaagagtcaagataagggaccaaagactggaagtgtgaagaaagagaaggccgtcaagccggaggaggggcagctggtccagctggaagagaaagggcagggatctgtgccttggagtgtgtatggccaccccggctgctggggcccgttgggcattccaggttattacggtccctttcatgccgagtgtaggcagcaccggctccagcatctagtcgtcgagctcctggatcaagccaggaaacgcgaacaccactgcgattctcgggagcgggacctcggggaatag

SEQ ID NO: 158468 - DNA, 4185 bp, Artificial Sequence
  derived and/or modified sequence
atgaaggacattgatatagggaaggaatatatcattccatctcctggttatcggagtgtcagggagcgtacttctacgtcagggacccatagagaccgggaagatagtaagtttcggagaacccgcccactggagtgccaggatgcgttggaaaccgcggctagagctgagggacttagcctagacgcgtccatgcattcacagcttaggatcctggacgaagaacatcccaaaggtaagtaccaccatggactgagtgcactgaagcccatccgaaccactagtaagcaccagcatccggtagataatgcaggcctcttctcatgtatgacattttcctggctgtcatccttggccagagtggcccataagaaaggcgagctgagtatggaggacgtctggagtctgagcaagcatgagagctccgatgtaaattgtaggcgcctggaacgcctctggcaagaagagttgaatgaagtaggtccagatgctgccagcttaaggcgtgttgtctggatcttttgtaggactcgcctcatcctcagtattgtctgccttatgattacacagctagcaggctttagcggaccagcatttatggtgaagcatctgttagagtatactcaggcaacagaatccaatctacagtattcattgctgttggtcctgggtcttctcctgactgaaatcgttagatcttggagtttggccttaacttgggctcttaactatcggaccggtgttaggttacggggtgccatcctgactatggcgtttaagaaaatcttgaaacttaaaaatatcaaggagaagagcctcggcgagctcatcaacatctgctcaaatgatggccaacgcatgttcgaagccgcagctgttggctctctcttggcgggtggcccagtggtagccatactagggatgatatacaacgtcatcattcttggcccaactggcttcttgggatccgccgtctttattttattttaccccgctatgatgttcgcgagcaggttaacagcatactttcggcgaaagtgtgtcgcagccacagatgaacgggtacagaagatgaatgaggtgctaacttatattaaattcatcaagatgtacgcctgggtcaaggcattcagccaatctgtgcagaaaatccgagaggaagaaaggcgcatcctggagaaggctggctattttcagtccatcactgtaggcgtggccccaattgttgtggtgatcgccagcgtggtgacattctccgtacacatgacactgggcttcgacctaactgcggctcaggcctttacggtcgtgacggtgtttaatagtatgacattcgctttgaaggttacccccttcagtgtcaaatctttatccgaagccagcgtcgcggtggacagatttaagtccctctttctgatggaggaagttcacatgatcaaaaataaacctgctagtcctcacatcaaaattgagatgaaaaatgccaccctggcctgggacagtagccattctagtatccaaaactcccctaagttaacgccaaaaatgaagaaagacaaaagagccagtcggggaaagaaggagaaggtcaggcagctacagcgcactgagcatcaggccgtgctggctgagcaaaagggacatctcctcctggattccgatgagaggccttctcccgaagaagaagagggtaagcacatacatctcggccacctgagactccaaaggaccctgcacagtatcgatctggaaattcaggagggcaagctagtgggtatttgtggcagcgtgggtagtggcaaaacctctctcatcagcgcaatactgggccaaatgacgctgctcgagggtagcatcgctatttccggcacgtttgcttacgtggctcaacaagcatggatcttgaacgcaactctacgggacaacatcctcttcggaaaggaatatgatgaagagaggtataactctgttctgaacagctgctgtctccgacctgacctggctattctgccatcatctgatttgactgaaattggagagaggggagcgaacttgagcggaggccagcggcagcgtatttccttagccagagccctgtattccgatagatccatttacatacttgatgaccccctttctgccctagacgctcatgtgggtaaccatatcttcaattccgccatccgcaagcacttgaagtcaaaaactgtgttgttcgttactcaccaattacagtacctcgtggactgcgatgaggtaattttcatgaaggaaggctgtatcacagagagaggcactcatgaggaactaatgaatctcaacggagactatgccacaattttcaataaccttctgcttggagagaccccgccagtagagataaattccaagaaggaaacttccggcagtcagaaaaaatcccaggataagggcccaaaaacgggaagcgtcaagaaagagaaggctgttaaaccagaggagggccagctggtgcagcttgaagagaaaggccaaggttccgtgccatggtccgtatacggcgtgtacatacaggcggcaggaggacccttggccttcctcgttataatggccctgtttatgttaaatgttggctccaccgctttttcgacttggtggctgagttattggatcaagcagggatcaggaaatactaccgtaacccggggaaacgaaacatctgtttctgacagtatgaaggacaacccgcacatgcagtattacgcgagtatctatgcactcagcatggctgtgatgctgattttgaaagccataaggggcgtcgtcttcgtcaaaggcacccttcgggcttcttcccgactgcacgatgagctcttcagacgaatactgcggagcccaatgaagttcttcgacactactccgaccggacgtatactgaacaggttctcaaaagatatggacgaagtcgatgtgaggcttcccttccaggccgagatgttcatccagaacgtgatcttggtcttcttctgtgttggtatgatagccggtgtgtttccctggtttttagtggcggtagggccacttgtgattcttttctcagtcctgcacatcgtgagcagatatcaggaactgcttgacgataaccaggcccctttcttcctgtttacctgcgcaatgcgctggttggccgtgagactcgatcttatttcgattgcactcattacaacgacaggcctgatgattgtactcatgcacgggcaaatccctcccgcttatgcaggcctggccatctcttatgcagtgcagctcactggtctctttcaattcactgtccggctcgcatcggaaacagaggcaagatttacaagtgtagaaaggattaaccactatattaaaaccctgagcctcgaagcccctgcacgtataaagaacaaggccccatctcccgactggcctcaggagggcgaagttactttcgaaaatgccgagatgagataccgggagaatcttccgctggtcctgaagaaggtcagcttcacaattaaaccaaaggaaaagattggcatcgtggggagaacaggatcagggaagtcctctttgggaatggcactttttagattggtagaactgagcggtggatgtattaagatagatggcgtgaggatctctgatatcggactggctgacctcaggtcaaaactgtcaatcatcccccaggaaccagtcctctttagcggtactgttagatctaatctcgaccctttcaaccaatacaccgaagatcagatctgggacgccctggaacgcactcacatgaaggagtgcattgcacagttgccccttaagttagagagcgaggtgatggaaaacggagacaacttcagtgtcggcgagcgtcaactcctctgtatcgctcgcgcattactacgccactgtaagatcttaatcctggacgaagcaaccgccgctatggatactgagaccgatcttctaattcaggaaacaattcgggaggcctttgccgactgtacaatgttgaccattgcccatcggttgcacaccgtgctaggctcagatcgtatcatggttctcgcccagggacaagtggtggagttcgatacaccaagcgtgttgctttccaatgatagctcgcgattttacgcaatgttcgcagctgcagagaacaaggtggctgtcaagggttag

SEQ ID NO: 158469 - DNA, 4314 bp, Artificial Sequence
  derived and/or modified sequence
atgaaggatatcgacatcggaaaagagtatatcataccttcgccgggataccggtccgtgagagaaagaacatcaacaagtgggacacatcgagatcgggaggattccaagttcaggcgtaccagaccgctcgagtgccaggatgccttagagacagcagcaagagctgaaggtctatcacttgatgcctcaatgcatagccagctgcggatactggatgaggaacaccctaaggggaaataccatcatgggctctcggccctcaaacctatccggaccaccagcaagcaccagcatcccgtggataacgccggactcttctcctgcatgactttcagctggctcagctccctggcacgcgtcgcacacaagaagggagaactgtccatggaggacgtgtggtcacttagcaagcacgagtcgagcgacgttaactgcaggcggctcgagcgcttgtggcaggaagagttgaatgaagttggacctgatgctgcctccctgaggcgtgtggtgtggattttctgccgcacccgactgattctgagtattgtatgcctgatgatcacccagctggcaggatttagcggccctgccttcatggtcaagcacctgcttgagtacacccaggccaccgaatctaacctccagtacagcctgctccttgttctggggctgttgttgaccgaaattgtgaggagttggagcctggccctgacatgggcccttaattataggaccggcgtgcggctccgaggtgcaattctgactatggcatttaagaagatcctgaagcttaagaatatcaaggagaaatctctgggcgaattgatcaacatatgtagcaacgatggtcagcggatgttcgaggcagctgccgtgggttcactgctagctggagggccagtagtggccatacttggcatgatctacaatgtgatcattctagggccaaccggctttctcggaagcgctgtgttcattttgttttacccggctatgatgtttgcttcccggctgactgcgtatttcagaaggaaatgtgtcgccgcaacggacgaacgtgtgcagaagatgaacgaggtgttaacctatatcaagttcatcaaaatgtacgcatgggtgaaggctttctcccagagcgtgcaaaagattcgggaagaggagcgacgtattcttgagaaggcagggtacttccagagcataacagtgggggtagcacccatcgtggttgtcatcgctagcgtagtaactttttccgtccacatgaccctgggattcgacctcaccgccgcacaggccttcaccgtggtgactgtatttaatagcatgacctttgcccttaaggtgacacccttcagcgtgaaaagcctgagtgaagcatctgtcgccgtggatagatttaagtccctattccttatggaggaggtacacatgatcaaaaacaagcccgcaagcccgcacatcaaaattgagatgaagaatgcaacattggcctgggatagcagtcacagttccatacagaatagcccaaagctcactcctaagatgaagaaggataaacgtgcctcacggggtaagaaagagaaggtccgtcaactccaacggaccgagcatcaagcagtcttggcggagcagaagggccatctcctgctcgattccgacgaacggccaagtccagaggaggaggagggcaagcacattcatctcggacaccttagactgcagcggacactgcattctattgacctcgaaatccaggaggggaagcttgtcggtatctgtggatccgttgggtcagggaaaacaagcctgatttccgctattctgggacaaatgacgctactggagggctcaatcgctatttctggaactttcgcctacgtcgctcagcaggcctggattctgaatgcaacacttcgggataatatactgtttggaaaggaatacgacgaagagcggtacaacagtgtattgaactcctgctgcctaagacccgatctcgcgattctccccagttcagacctcacagaaatcggagagaggggggcaaacttgtccgggggtcagaggcagcgcatttctcttgctcgcgcactttactcagacaggagtatctatatattggacgatccgctatcagctttggacgcgcatgtggggaaccacatctttaattccgccatcagaaagcacctgaagtcaaagacagtccttttcgtgactcaccagctgcagtacctagtggactgcgacgaggtgatctttatgaaggaggggtgtatcacggaaagaggaacacacgaagagctcatgaatctcaacggggattacgcaaccatcttcaacaatctgctactcggggagacacccccagttgagatcaattcaaagaaggagacaagcggatcacagaaaaagtcccaggacaaggggcctaagacgggatctgtcaagaaggagaaggctgtgaagcccgaggagggacagctcgttcagctggaagagaagggacagggaagcgtgccttggtcagtatatggcgtgtacattcaggccgcaggtggacctctcgcttttctggtgatcatggcgctgttcatgcttaacgtcggctctacggcctttagcacctggtggctgtcctattggatcaaacaggggtcagggaataccaccgtaaccaggggcaacgagacatccgttagcgacagtatgaaggacaacccccacatgcagtactatgcttcaatatacgcgctgagtatggctgttatgctgattctcaaagccatcagaggcgtggttttcgtgaagggcacattacgcgcatcgtcaaggctccacgacgaactgttcagacgaatcctgaggtcgcccatgaaattctttgacacaacgcccactgggagaatcctgaaccggttctcaaaggatatggatgaagtcgacgtgcgactcccattccaggcagaaatgttcattcagaacgttatcttggtattcttctgcgtgggcatgatcgcaggagtgtttccatggttcttagtagccgtgggcccattggtgattctcttttccgttctgcacattgtctcacgcgtgttgattcgcgagctgaaaaggctcgacaacattactcagagcccctttctgtctcacataacctcgtcaatccaagggctagccaccatccatgcatacaacaaaggacaagaattcctgcatagataccaggagctcttggacgacaatcaggcgccattttttctcttcacctgtgcgatgcggtggctcgctgtgcggctggatctgatctcaatagcactcattactacaacgggcttgatgatcgtgctcatgcacggtcagatacctccagcctatgcgggattggctatctcctacgccgtgcagctgaccggactgtttcagttcacagtgcggctcgcctctgagaccgaagcaaggtttacatccgttgagcgcataaaccattacatcaagaccttgtcactcgaggcgcctgcccgaattaagaacaaggcaccctcccctgattggccccaggaaggcgaagtgacattcgagaacgccgaaatgcgctatcgggagaatttgcccctcgtccttaaaaaagtgagcttcaccatcaaaccaaaagagaaaatcggcatagttggccgaaccggatccggtaagagttccctgggcatggccttgttccggcttgtggagctgtccggcggatgtattaaaatcgacggcgtgcgcatctccgacatcggtctggctgacctcaggtcgaagctcagtatcattccacaagaaccagttctattctccggcacagttaggagcaatctggaccccttcaatcaatacaccgaggatcaaatctgggatgccctcgaacgtacccacatgaaggaatgtatcgcacaattacctctaaagctcgaatctgaggttatggaaaacggcgacaatttttctgtcggcgagcgacagctcctttgtattgcccgagccttgcttaggcattgtaaaattttaattctggatgaggcaaccgcggcaatggacacagagaccgacctgctcatccaagaaacgatccgcgaagctttcgccgactgtacaatgttgacaatcgctcatagactacatactgtgctagggtcagatcgtattatggtcctcgcccagggccaagtggtggagtttgataccccatctgtgctgctctcaaacgatagtagcaggttctacgctatgtttgccgcagccgagaataaagtcgcggtcaagggctag

SEQ ID NO: 158470 - DNA, 2511 bp, Artificial Sequence
  derived and/or modified sequence
atgcacagccagctgagaatacttgacgaggaacatcctaaaggcaaatatcatcacggattatctgccctgaaacccatccgcaccacaagtaaacaccagcaccccgtggataatgctggactcttcagctgcatgacctttagctggctgagctcactggcccgagtggcacacaagaaaggagagttgagtatggaggatgtatggtcccttagcaaacacgagagtagtgatgtcaactgtaggaggctcgagcgactgtggcaggaagagttgaacgaggtcggacccgatgcagctagtctgcgaagggtggtctggatcttttgtagaactcgactcattctgagtattgtgtgtttaatgattacccaactggcgggattttccggacctgcttttatggtgaagcatctcctggaatatacccaggccactgagtcgaacctgcagtattcccttctcctcgttcttgggctgttactcacagagatcgtcaggtcctggagtctagccctgacatgggctcttaattatcggaccggcgttagactgcgcggagccattctaaccatggctttcaaaaagatcctcaagctcaagaatattaaggagaaatcactcggagagctgatcaacatttgtagtaacgatggccaacgcatgttcgaagcagctgcagtgggcagccttctggccggaggacccgtggtcgcaattctggggatgatctacaatgtcatcatcctgggtcctaccggctttctcggctcagcagtgttcatcctattttatcccgcaatgatgtttgctagcagactgacagcctacttcaggcggaagtgcgttgccgctacagatgagcgggtgcagaagatgaacgaggttctgacatatatcaagttcattaaaatgtacgcctgggtcaaagctttttcgcagtccgtacagaaaatccgcgaggaagagagaaggatcctggaaaaagcagggtacttccaatccattacagtcggcgtagcacccatcgtagtcgtgatcgcctccgtcgtgacttttagtgtacatatgacgttgggttttgatttaacagcggctcaggctttcactgtggtgacggtattcaattcaatgaccttcgcattaaaggttaccccgttttcagtgaaatctttatccgaggcctcagtggcggtggacagatttaagtccttgttcctaatggaggaggtgcacatgattaaaaacaagccggcaagccctcacattaaaatagagatgaagaacgctaccttggcctgggacagcagtcactctagcatccagaatagtcctaagctgacgccaaagatgaagaaggacaaacgggcttcccgcggtaaaaaggagaaggttagacagctgcaaaggacagagcatcaagccgtgttggctgagcagaaaggacatctgttgttagattccgacgagcgcccaagccctgaagaagaagaggggaagcatattcatctgggccaccttaggttgcagagaaccctccactcaattgacttggaaatccaggaaggaaaactggtggggatttgcggaagcgttggttctggcaagacatctttgatcagtgcaatcctgggacagatgaccctcctggagggaagtatcgccatttcagggacttttgcttacgtcgcccagcaggcgtggattctcaatgctacacttagagacaatatcttgtttggaaaagagtatgacgaggagcgctataactctgttctgaacagttgttgcctgcgccctgacttagcaatactgccttccagtgacctgaccgaaataggcgagaggggggcaaatctgtccggcggacaacggcagcgcatatctctggcacgggctctgtattcagatcgatccatctatattctggatgaccctctgtctgcactggatgcccatgtgggtaaccatatttttaatagtgccatcaggaagcacttgaagtcaaagacagtgttattcgtgactcaccagttgcagtacctggtggactgcgacgaggtaatctttatgaaggaagggtgcattaccgagagaggtactcacgaagaactcatgaacctgaatggggattatgcaaccattttcaacaatctgttgcttggcgaaactcctccagtagagataaacagcaagaaggagacaagtgggtcacaaaaaaagagtcaagacaagggcccaaaaactggctccgtaaagaaagagaaggctgtaaagcctgaagaaggccagttggtccagctggaggaaaaggggcagggttcagtaccatggtccgtatacggccatcccggttgctggggaccgctcggaatccctggatactacgggcctttccacgccgagtgccgacagcaccgactccagcatctggtggtggagcttctggaccaagcacgcaaacgcgagcatcattgcgattctagggaacgcgatctgggtgagtag

SEQ ID NO: 158471 - DNA, 4283 bp, Artificial Sequence
  derived and/or modified sequence
cactcagagaagatgaaggatatcgacataggaaaagagtatatcatccccagtcctgggtatagaagtgtgagggagagaaccagcacttctgggacgcacagagaccgtgaagattccaagttcaggagaactcgaccgttggaatgccaagatgccttggaaacagcagcccgagccgagggcctctctcttgatgcctccatgcattctcagctcagaatcctggatgaggagcatcccaagggaaagtaccatcatggcttgagtgctctgaagcccatccggactacttccaaacaccagcacccagtggacaatgctgggcttttttcctgtatgactttttcgtggctttcttctctggcccgtgtggcccacaagaagggggagctctcaatggaagacgtgtggtctctgtccaagcacgagtcttctgacgtgaactgcagaagactagagagactgtggcaagaagagctgaatgaagttgggccagacgctgcttccctgcgaagggttgtgtggatcttctgccgcaccaggctcatcctgtccatcgtgtgcctgatgatcacgcagctggctggcttcagtggaccagccttcatggtgaaacacctcttggagtatacccaggcaacagagtctaacctgcagtacagcttgttgttagtgctgggcctcctcctgacggaaatcgtgcggtcttggtcgcttgcactgacttgggcattgaattaccgaaccggtgtccgcttgcggggggccatcctaaccatggcatttaagaagatccttaagttaaagaacattaaagagaaatccctgggtgagctcatcaacatttgctccaacgatgggcagagaatgtttgaggcagcagccgttggcagcctgctggctggaggacccgttgttgccatcttaggcatgatttataatgtaattattctgggaccaacaggcttcctgggatcagctgtttttatcctcttttacccagcaatgatgtttgcatcacggctcacagcatatttcaggagaaaatgcgtggccgccacggatgaacgtgtccagaagatgaatgaagttcttacttacattaaatttatcaaaatgtatgcctgggtcaaagcattttctcagagtgttcaaaaaatccgcgaggaggagcgtcggatattggaaaaagctgggtacttccagagcatcactgtgggtgtggctcccattgtggtggtgattgccagcgtggtgaccttctctgttcatatgaccctgggcttcgatctgacagcagcacaggctttcacagtggtgacagtcttcaattccatgacttttgctttgaaagtaacaccgttttcagtaaagtccctctcagaagcctcagtggctgttgacagatttaagagtttgtttctaatggaagaggttcacatgataaagaacaaaccagccagtcctcacatcaagatagagatgaaaaatgccaccttggcatgggactcctcccactccagtatccagaactcgcccaagctgacccccaaaatgaaaaaagacaagagggcttccaggggcaagaaagagaaggtgaggcagctgcagcgcactgagcatcaggcggtgctggcagagcagaaaggccacctcctcctggacagtgacgagcggcccagtcccgaagaggaagaaggcaagcacatccacctgggccacctgcgcttacagaggacactgcacagcatcgatctggagatccaagagggtaaactggttggaatctgtggcagtgtgggaagtggaaaaacctctctcatttcagccattttaggccagatgacgcttctagagggcagcattgcaatcagtggaaccttcgcttatgtggcccagcaggcctggatcctcaatgctactctgagagacaacatcctgtttgggaaggaatatgatgaagaaagatacaactctgtgctgaacagctgctgcctgaggcctgacctggccattcttcccagcagcgacctgacggagattggagagcgaggagccaacctgagcggtgggcagcgccagaggatcagccttgcccgggccttgtatagtgacaggagcatctacatcctggacgaccccctcagtgccttagatgcccatgtgggcaaccacatcttcaatagtgctatccggaaacatctcaagtccaagacagttctgtttgttacccaccagttacagtacctggttgactgtgatgaagtgatcttcatgaaagagggctgtattacggaaagaggcacccatgaggaactgatgaatttaaatggtgactatgctaccatttttaataacctgttgctgggagagacaccgccagttgagatcaattcaaaaaaggaaaccagtggttcacagaagaagtcacaagacaagggtcctaaaacaggatcagtaaagaaggaaaaagcagtaaagccagaggaagggcagcttgtgcagctggaagagaaagggcagggttcagtgccctggtcagtatatggtgtctacatccaggctgctgggggccccttggcattcctggttattatggcccttttcatgctgaatgtaggcagcaccgccttcagcacctggtggttgagttactggatcaagcaaggaagcgggaacaccactgtgactcgagggaacgagacctcggtgagtgacagcatgaaggacaatcctcatatgcagtactatgccagcatctacgccctctccatggcagtcatgctgatcctgaaagccattcgaggagttgtctttgtcaagggcacgctgcgagcttcctcccggctgcatgacgagcttttccgaaggatccttcgaagccctatgaagttttttgacacgacccccacagggaggattctcaacaggttttccaaagacatggatgaagttgacgtgcggctgccgttccaggccgagatgttcatccagaacgttatcctggtgttcttctgtgtgggaatgatcgcaggagtcttcccgtggttccttgtggcagtggggccccttgtcatcctcttttcagtcctgcacattgtctccagataccaggagctgctggatgacaaccaagctcctttttttttgtttacgtgtgcgatgcggtggctggctgtgcggctggacctcatcagcatcgccctcatcaccaccacggggctgatgatcgttcttatgcacgggcagattcccccagcctatgcgggtctcgccatctcttatgctgtccagttaacggggctgttccagtttacggtcagactggcatctgagacagaagctcgattcacctcggtggagaggatcaatcactacattaagactctgtccttggaagcacctgccagaattaagaacaaggctccctcccctgactggccccaggagggagaggtgacctttgagaacgcagagatgaggtaccgagaaaacctccctctcgtcctaaagaaagtatccttcacgatcaaacctaaagagaagattggcattgtggggcggacaggatcagggaagtcctcgctggggatggccctcttccgtctggtggagttatctggaggctgcatcaagattgatggagtgagaatcagtgatattggccttgccgacctccgaagcaaactctctatcattcctcaagagccggtgctgttcagtggcactgtcagatcaaatttggaccccttcaaccagtacactgaagaccagatttgggatgccctggagaggacacacatgaaagaatgtattgctcagctacctctgaaacttgaatctgaagtgatggagaatggggataacttctcagtgggggaacggcagctcttgtgcatagctagagccctgctccgccactgtaagattctgattttagatgaagccacagctgccatggacacagagacagacttattgattcaagagaccatccgagaagcatttgcagactgtaccatgctgaccattgcccatcgcctgcacacggttctaggctccgataggattatggtgctggcccagggacaggtggtggagtttgacaccccatcggtccttctgtccaacgacagttcccgattctatgccatgtttgctgctgcagagaacaaggtcgctgtcaagggctgactcctccctgttgacgaagtctcttttctttagagcattgccattccctgcctggggcgggcccctcatcgcgtcctcctaccgaa

SEQ ID NO: 158472 - DNA, 5921 bp, Artificial Sequence
  derived and/or modified sequence
gccgcgtccgcagccctgggcactcggaaggaggactacagttcccttcagccttgggaatgctttgtgcagcgcgcttgcgcggtgtggcggccgatgccgctataaaggcttgttttgctgcagggctcatgctcgggagcgtggttgagcggctggcgcggttgtcctggagcaggggcgcaggaattctgatgtgaaactaacagtctgtgagccctggaacctccactcagagaagatgaaggatatcgacataggaaaagagtatatcatccccagtcctgggtatagaagtgtgagggagagaaccagcacttctgggacgcacagagaccgtgaagattccaagttcaggagaactcgaccgttggaatgccaagatgccttggaaacagcagcccgagccgagggcctctctcttgatgcctccatgcattctcagctcagaatcctggatgaggagcatcccaagggaaagtaccatcatggcttgagtgctctgaagcccatccggactacttccaaacaccagcacccagtggacaatgctgggcttttttcctgtatgactttttcgtggctttcttctctggcccgtgtggcccacaagaagggggagctctcaatggaagacgtgtggtctctgtccaagcacgagtcttctgacgtgaactgcagaagactagagagactgtggcaagaagagctgaatgaagttgggccagacgctgcttccctgcgaagggttgtgtggatcttctgccgcaccaggctcatcctgtccatcgtgtgcctgatgatcacgcagctggctggcttcagtggaccagccttcatggtgaaacacctcttggagtatacccaggcaacagagtctaacctgcagtacagcttgttgttagtgctgggcctcctcctgacggaaatcgtgcggtcttggtcgcttgcactgacttgggcattgaattaccgaaccggtgtccgcttgcggggggccatcctaaccatggcatttaagaagatccttaagttaaagaacattaaagagaaatccctgggtgagctcatcaacatttgctccaacgatgggcagagaatgtttgaggcagcagccgttggcagcctgctggctggaggacccgttgttgccatcttaggcatgatttataatgtaattattctgggaccaacaggcttcctgggatcagctgtttttatcctcttttacccagcaatgatgtttgcatcacggctcacagcatatttcaggagaaaatgcgtggccgccacggatgaacgtgtccagaagatgaatgaagttcttacttacattaaatttatcaaaatgtatgcctgggtcaaagcattttctcagagtgttcaaaaaatccgcgaggaggagcgtcggatattggaaaaagctgggtacttccagagcatcactgtgggtgtggctcccattgtggtggtgattgccagcgtggtgaccttctctgttcatatgaccctgggcttcgatctgacagcagcacaggctttcacagtggtgacagtcttcaattccatgacttttgctttgaaagtaacaccgttttcagtaaagtccctctcagaagcctcagtggctgttgacagatttaagagtttgtttctaatggaagaggttcacatgataaagaacaaaccagccagtcctcacatcaagatagagatgaaaaatgccaccttggcatgggactcctcccactccagtatccagaactcgcccaagctgacccccaaaatgaaaaaagacaagagggcttccaggggcaagaaagagaaggtgaggcagctgcagcgcactgagcatcaggcggtgctggcagagcagaaaggccacctcctcctggacagtgacgagcggcccagtcccgaagaggaagaaggcaagcacatccacctgggccacctgcgcttacagaggacactgcacagcatcgatctggagatccaagagggtaaactggttggaatctgtggcagtgtgggaagtggaaaaacctctctcatttcagccattttaggccagatgacgcttctagagggcagcattgcaatcagtggaaccttcgcttatgtggcccagcaggcctggatcctcaatgctactctgagagacaacatcctgtttgggaaggaatatgatgaagaaagatacaactctgtgctgaacagctgctgcctgaggcctgacctggccattcttcccagcagcgacctgacggagattggagagcgaggagccaacctgagcggtgggcagcgccagaggatcagccttgcccgggccttgtatagtgacaggagcatctacatcctggacgaccccctcagtgccttagatgcccatgtgggcaaccacatcttcaatagtgctatccggaaacatctcaagtccaagacagttctgtttgttacccaccagttacagtacctggttgactgtgatgaagtgatcttcatgaaagagggctgtattacggaaagaggcacccatgaggaactgatgaatttaaatggtgactatgctaccatttttaataacctgttgctgggagagacaccgccagttgagatcaattcaaaaaaggaaaccagtggttcacagaagaagtcacaagacaagggtcctaaaacaggatcagtaaagaaggaaaaagcagtaaagccagaggaagggcagcttgtgcagctggaagagaaagggcagggttcagtgccctggtcagtatatggtgtctacatccaggctgctgggggccccttggcattcctggttattatggcccttttcatgctgaatgtaggcagcaccgccttcagcacctggtggttgagttactggatcaagcaaggaagcgggaacaccactgtgactcgagggaacgagacctcggtgagtgacagcatgaaggacaatcctcatatgcagtactatgccagcatctacgccctctccatggcagtcatgctgatcctgaaagccattcgaggagttgtctttgtcaagggcacgctgcgagcttcctcccggctgcatgacgagcttttccgaaggatccttcgaagccctatgaagttttttgacacgacccccacagggaggattctcaacaggttttccaaagacatggatgaagttgacgtgcggctgccgttccaggccgagatgttcatccagaacgttatcctggtgttcttctgtgtgggaatgatcgcaggagtcttcccgtggttccttgtggcagtggggccccttgtcatcctcttttcagtcctgcacattgtctccagggtcctgattcgggagctgaagcgtctggacaatatcacgcagtcacctttcctctcccacatcacgtccagcatacagggccttgccaccatccacgcctacaataaagggcaggagtttctgcacagataccaggagctgctggatgacaaccaagctcctttttttttgtttacgtgtgcgatgcggtggctggctgtgcggctggacctcatcagcatcgccctcatcaccaccacggggctgatgatcgttcttatgcacgggcagattcccccagcctatgcgggtctcgccatctcttatgctgtccagttaacggggctgttccagtttacggtcagactggcatctgagacagaagctcgattcacctcggtggagaggatcaatcactacattaagactctgtccttggaagcacctgccagaattaagaacaaggctccctcccctgactggccccaggagggagaggtgacctttgagaacgcagagatgaggtaccgagaaaacctccctctcgtcctaaagaaagtatccttcacgatcaaacctaaagagaagattggcattgtggggcggacaggatcagggaagtcctcgctggggatggccctcttccgtctggtggagttatctggaggctgcatcaagattgatggagtgagaatcagtgatattggccttgccgacctccgaagcaaactctctatcattcctcaagagccggtgctgttcagtggcactgtcagatcaaatttggaccccttcaaccagtacactgaagaccagatttgggatgccctggagaggacacacatgaaagaatgtattgctcagctacctctgaaacttgaatctgaagtgatggagaatggggataacttctcagtgggggaacggcagctcttgtgcatagctagagccctgctccgccactgtaagattctgattttagatgaagccacagctgccatggacacagagacagacttattgattcaagagaccatccgagaagcatttgcagactgtaccatgctgaccattgcccatcgcctgcacacggttctaggctccgataggattatggtgctggcccagggacaggtggtggagtttgacaccccatcggtccttctgtccaacgacagttcccgattctatgccatgtttgctgctgcagagaacaaggtcgctgtcaagggctgactcctccctgttgacgaagtctcttttctttagagcattgccattccctgcctggggcgggcccctcatcgcgtcctcctaccgaaaccttgcctttctcgattttatctttcgcacagcagttccggattggcttgtgtgtttcacttttagggagagtcatattttgattattgtatttattccatattcatgtaaacaaaatttagtttttgttcttaattgcactctaaaaggttcagggaaccgttattataattgtatcagaggcctataatgaagctttatacgtgtagctatatctatatataattctgtacatagcctatatttacagtgaaaatgtaagctgtttattttatattaaaataagcactgtgctaataacagtgcatattcctttctatcatttttgtacagtttgctgtactagagatctggttttgctattagactgtaggaagagtagcatttcattcttctctagctggtggtttcacggtgccaggttttctgggtgtccaaaggaagacgtgtggcaatagtgggccctccgacagccccctctgccgcctccccacggccgctccaggggtggctggagacgggtgggcggctggagaccatgcagagcgccgtgagttctcagggctcctgccttctgtcctggtgtcacttactgtttctgtcaggagagcagcggggcgaagcccaggccccttttcactccctccatcaagaatggggatcacagagacattcctccgagccggggagtttctttcctgccttcttctttttgctgttgtttctaaacaagaatcagtctatccacagagagtcccactgcctcaggttcctatggctggccactgcacagagctctccagctccaagacctgttggttccaagccctggagccaactgctgctttttgaggtggcactttttcatttgcctattcccacacctccacagttcagtggcagggctcaggatttcgtgggtctgttttcctttctcaccgcagtcgtcgcacagtctctctctctctctcccctcaaagtctgcaactttaagcagctcttgctaatcagtgtctcacactggcgtagaagtttttgtactgtaaagagacctacctcaggttgctggttgctgtgtggtttggtgtgttcccgcaaaccccctttgtgctgtggggctggtagctcaggtgggcgtggtcactgctgtcatcaattgaatggtcagcgttgcatgtcgtgaccaactagacattctgtcgccttagcatgtttgctgaacaccttgtggaagcaaaaatctgaaaatgtgaataaaattattttggattttgtaaaa

SEQ ID NO: 158473 - DNA, 5836 bp, Artificial Sequence
  derived and/or modified sequence
cttgcgcggtgtggcggccgatgccgctataaaggcttgttttgctgcagggctcatgctcgggagcgtggttgagcggctggcgcggttgtcctggagcaggggcgcaggaattctgatgtgaaactaacagtctgtgagccctggaacctccactcagagaagatgaaggatatcgacataggaaaagagtatatcatccccagtcctgggtatagaagtgtgagggagagaaccagcacttctgggacgcacagagaccgtgaagattccaagttcaggagaactcgaccgttggaatgccaagatgccttggaaacagcagcccgagccgagggcctctctcttgatgcctccatgcattctcagctcagaatcctggatgaggagcatcccaagggaaagtaccatcatggcttgagtgctctgaagcccatccggactacttccaaacaccagcacccagtggacaatgctgggcttttttcctgtatgactttttcgtggctttcttctctggcccgtgtggcccacaagaagggggagctctcaatggaagacgtgtggtctctgtccaagcacgagtcttctgacgtgaactgcagaagactagagagactgtggcaagaagagctgaatgaagttgggccagacgctgcttccctgcgaagggttgtgtggatcttctgccgcaccaggctcatcctgtccatcgtgtgcctgatgatcacgcagctggctggcttcagtggaccagccttcatggtgaaacacctcttggagtatacccaggcaacagagtctaacctgcagtacagcttgttgttagtgctgggcctcctcctgacggaaatcgtgcggtcttggtcgcttgcactgacttgggcattgaattaccgaaccggtgtccgcttgcggggggccatcctaaccatggcatttaagaagatccttaagttaaagaacattaaagagaaatccctgggtgagctcatcaacatttgctccaacgatgggcagagaatgtttgaggcagcagccgttggcagcctgctggctggaggacccgttgttgccatcttaggcatgatttataatgtaattattctgggaccaacaggcttcctgggatcagctgtttttatcctcttttacccagcaatgatgtttgcatcacggctcacagcatatttcaggagaaaatgcgtggccgccacggatgaacgtgtccagaagatgaatgaagttcttacttacattaaatttatcaaaatgtatgcctgggtcaaagcattttctcagagtgttcaaaaaatccgcgaggaggagcgtcggatattggaaaaagctgggtacttccagagcatcactgtgggtgtggctcccattgtggtggtgattgccagcgtggtgaccttctctgttcatatgaccctgggcttcgatctgacagcagcacaggctttcacagtggtgacagtcttcaattccatgacttttgctttgaaagtaacaccgttttcagtaaagtccctctcagaagcctcagtggctgttgacagatttaagagtttgtttctaatggaagaggttcacatgataaagaacaaaccagccagtcctcacatcaagatagagatgaaaaatgccaccttggcatgggactcctcccactccagtatccagaactcgcccaagctgacccccaaaatgaaaaaagacaagagggcttccaggggcaagaaagagaaggtgaggcagctgcagcgcactgagcatcaggcggtgctggcagagcagaaaggccacctcctcctggacagtgacgagcggcccagtcccgaagaggaagaaggcaagcacatccacctgggccacctgcgcttacagaggacactgcacagcatcgatctggagatccaagagggtaaactggttggaatctgtggcagtgtgggaagtggaaaaacctctctcatttcagccattttaggccagatgacgcttctagagggcagcattgcaatcagtggaaccttcgcttatgtggcccagcaggcctggatcctcaatgctactctgagagacaacatcctgtttgggaaggaatatgatgaagaaagatacaactctgtgctgaacagctgctgcctgaggcctgacctggccattcttcccagcagcgacctgacggagattggagagcgaggagccaacctgagcggtgggcagcgccagaggatcagccttgcccgggccttgtatagtgacaggagcatctacatcctggacgaccccctcagtgccttagatgcccatgtgggcaaccacatcttcaatagtgctatccggaaacatctcaagtccaagacagttctgtttgttacccaccagttacagtacctggttgactgtgatgaagtgatcttcatgaaagagggctgtattacggaaagaggcacccatgaggaactgatgaatttaaatggtgactatgctaccatttttaataacctgttgctgggagagacaccgccagttgagatcaattcaaaaaaggaaaccagtggttcacagaagaagtcacaagacaagggtcctaaaacaggatcagtaaagaaggaaaaagcagtaaagccagaggaagggcagcttgtgcagctggaagagaaagggcagggttcagtgccctggtcagtatatggtcatccaggctgctgggggccccttggcattcctggttattatggcccttttcatgctgaatgtaggcagcaccgccttcagcacctggtggttgagttactggatcaagcaaggaagcgggaacaccactgtgactcgagggaacgagacctcggtgagtgacagcatgaaggacaatcctcatatgcagtactatgccagcatctacgccctctccatggcagtcatgctgatcctgaaagccattcgaggagttgtctttgtcaagggcacgctgcgagcttcctcccggctgcatgacgagcttttccgaaggatccttcgaagccctatgaagttttttgacacgacccccacagggaggattctcaacaggttttccaaagacatggatgaagttgacgtgcggctgccgttccaggccgagatgttcatccagaacgttatcctggtgttcttctgtgtgggaatgatcgcaggagtcttcccgtggttccttgtggcagtggggccccttgtcatcctcttttcagtcctgcacattgtctccagggtcctgattcgggagctgaagcgtctggacaatatcacgcagtcacctttcctctcccacatcacgtccagcatacagggccttgccaccatccacgcctacaataaagggcaggagtttctgcacagataccaggagctgctggatgacaaccaagctcctttttttttgtttacgtgtgcgatgcggtggctggctgtgcggctggacctcatcagcatcgccctcatcaccaccacggggctgatgatcgttcttatgcacgggcagattcccccagcctatgcgggtctcgccatctcttatgctgtccagttaacggggctgttccagtttacggtcagactggcatctgagacagaagctcgattcacctcggtggagaggatcaatcactacattaagactctgtccttggaagcacctgccagaattaagaacaaggctccctcccctgactggccccaggagggagaggtgacctttgagaacgcagagatgaggtaccgagaaaacctccctctcgtcctaaagaaagtatccttcacgatcaaacctaaagagaagattggcattgtggggcggacaggatcagggaagtcctcgctggggatggccctcttccgtctggtggagttatctggaggctgcatcaagattgatggagtgagaatcagtgatattggccttgccgacctccgaagcaaactctctatcattcctcaagagccggtgctgttcagtggcactgtcagatcaaatttggaccccttcaaccagtacactgaagaccagatttgggatgccctggagaggacacacatgaaagaatgtattgctcagctacctctgaaacttgaatctgaagtgatggagaatggggataacttctcagtgggggaacggcagctcttgtgcatagctagagccctgctccgccactgtaagattctgattttagatgaagccacagctgccatggacacagagacagacttattgattcaagagaccatccgagaagcatttgcagactgtaccatgctgaccattgcccatcgcctgcacacggttctaggctccgataggattatggtgctggcccagggacaggtggtggagtttgacaccccatcggtccttctgtccaacgacagttcccgattctatgccatgtttgctgctgcagagaacaaggtcgctgtcaagggctgactcctccctgttgacgaagtctcttttctttagagcattgccattccctgcctggggcgggcccctcatcgcgtcctcctaccgaaaccttgcctttctcgattttatctttcgcacagcagttccggattggcttgtgtgtttcacttttagggagagtcatattttgattattgtatttattccatattcatgtaaacaaaatttagtttttgttcttaattgcactctaaaaggttcagggaaccgttattataattgtatcagaggcctataatgaagctttatacgtgtagctatatctatatataattctgtacatagcctatatttacagtgaaaatgtaagctgtttattttatattaaaataagcactgtgctaataacagtgcatattcctttctatcatttttgtacagtttgctgtactagagatctggttttgctattagactgtaggaagagtagcatttcattcttctctagctggtggtttcacggtgccaggttttctgggtgtccaaaggaagacgtgtggcaatagtgggccctccgacagccccctctgccgcctccccacggccgctccaggggtggctggagacgggtgggcggctggagaccatgcagagcgccgtgagttctcagggctcctgccttctgtcctggtgtcacttactgtttctgtcaggagagcagcggggcgaagcccaggccccttttcactccctccatcaagaatggggatcacagagacattcctccgagccggggagtttctttcctgccttcttctttttgctgttgtttctaaacaagaatcagtctatccacagagagtcccactgcctcaggttcctatggctggccactgcacagagctctccagctccaagacctgttggttccaagccctggagccaactgctgctttttgaggtggcactttttcatttgcctattcccacacctccacagttcagtggcagggctcaggatttcgtgggtctgttttcctttctcaccgcagtcgtcgcacagtctctctctctctctcccctcaaagtctgcaactttaagcagctcttgctaatcagtgtctcacactggcgtagaagtttttgtactgtaaagagacctacctcaggttgctggttgctgtgtggtttggtgtgttcccgcaaaccccctttgtgctgtggggctggtagctcaggtgggcgtggtcactgctgtcatcaattgaatggtcagcgttgcatgtcgtgaccaactagacattctgtcgccttagcatgtttgctgaacaccttgtggaagcaaaaatctgaaaatgtgaataaaattattttggattttgt

SEQ ID NO: 158474 - DNA, 4185 bp, Artificial Sequence
  derived and/or modified sequence
atgaaggacatcgacatcggcaaggagtacatcatccccagccccggctacagaagcgtgagagagagaaccagcaccagcggcacccacagagacagagaggacagcaagttcagaagaaccagacccctggagtgccaggacgccctggagaccgccgccagagccgagggcctgagcctggacgccagcatgcacagccagctgagaatcctggacgaggagcaccccaagggcaagtaccaccacggcctgagcgccctgaagcccatcagaaccaccagcaagcaccagcaccccgtggacaacgccggcctgttcagctgcatgaccttcagctggctgagcagcctggccagagtggcccacaagaagggcgagctgagcatggaggacgtgtggagcctgagcaagcacgagagcagcgacgtgaactgcagaagactggagagactgtggcaggaggagctgaacgaggtgggccccgacgccgccagcctgagaagagtggtgtggatcttctgcagaaccagactgatcctgagcatcgtgtgcctgatgatcacccagctggccggcttcagcggccccgccttcatggtgaagcacctgctggagtacacccaggccaccgagagcaacctgcagtacagcctgctgctggtgctgggcctgctgctgaccgagatcgtgagaagctggagcctggccctgacctgggccctgaactacagaaccggcgtgagactgagaggcgccatcctgaccatggccttcaagaagatcctgaagctgaagaacatcaaggagaagagcctgggcgagctgatcaacatctgcagcaacgacggccagagaatgttcgaggccgccgccgtgggcagcctgctggccggcggccccgtggtggccatcctgggcatgatctacaacgtgatcatcctgggccccaccggcttcctgggcagcgccgtgttcatcctgttctaccccgccatgatgttcgccagcagactgaccgcctacttcagaagaaagtgcgtggccgccaccgacgagagagtgcagaagatgaacgaggtgctgacctacatcaagttcatcaagatgtacgcctgggtgaaggccttcagccagagcgtgcagaagatcagagaggaggagagaagaatcctggagaaggccggctacttccagagcatcaccgtgggcgtggcccccatcgtggtggtgatcgccagcgtggtgaccttcagcgtgcacatgaccctgggcttcgacctgaccgccgcccaggccttcaccgtggtgaccgtgttcaacagcatgaccttcgccctgaaggtgacccccttcagcgtgaagagcctgagcgaggccagcgtggccgtggacagattcaagagcctgttcctgatggaggaggtgcacatgatcaagaacaagcccgccagcccccacatcaagatcgagatgaagaacgccaccctggcctgggacagcagccacagcagcatccagaacagccccaagctgacccccaagatgaagaaggacaagagagccagcagaggcaagaaggagaaggtgagacagctgcagagaaccgagcaccaggccgtgctggccgagcagaagggccacctgctgctggacagcgacgagagacccagccccgaggaggaggagggcaagcacatccacctgggccacctgagactgcagagaaccctgcacagcatcgacctggagatccaggagggcaagctggtgggcatctgcggcagcgtgggcagcggcaagaccagcctgatcagcgccatcctgggccagatgaccctgctggagggcagcatcgccatcagcggcaccttcgcctacgtggcccagcaggcctggatcctgaacgccaccctgagagacaacatcctgttcggcaaggagtacgacgaggagagatacaacagcgtgctgaacagctgctgcctgagacccgacctggccatcctgcccagcagcgacctgaccgagatcggcgagagaggcgccaacctgagcggcggccagagacagagaatcagcctggccagagccctgtacagcgacagaagcatctacatcctggacgaccccctgagcgccctggacgcccacgtgggcaaccacatcttcaacagcgccatcagaaagcacctgaagagcaagaccgtgctgttcgtgacccaccagctgcagtacctggtggactgcgacgaggtgatcttcatgaaggagggctgcatcaccgagagaggcacccacgaggagctgatgaacctgaacggcgactacgccaccatcttcaacaacctgctgctgggcgagaccccccccgtggagatcaacagcaagaaggagaccagcggcagccagaagaagagccaggacaagggccccaagaccggcagcgtgaagaaggagaaggccgtgaagcccgaggagggccagctggtgcagctggaggagaagggccagggcagcgtgccctggagcgtgtacggcgtgtacatccaggccgccggcggccccctggccttcctggtgatcatggccctgttcatgctgaacgtgggcagcaccgccttcagcacctggtggctgagctactggatcaagcagggcagcggcaacaccaccgtgaccagaggcaacgagaccagcgtgagcgacagcatgaaggacaacccccacatgcagtactacgccagcatctacgccctgagcatggccgtgatgctgatcctgaaggccatcagaggcgtggtgttcgtgaagggcaccctgagagccagcagcagactgcacgacgagctgttcagaagaatcctgagaagccccatgaagttcttcgacaccacccccaccggcagaatcctgaacagattcagcaaggacatggacgaggtggacgtgagactgcccttccaggccgagatgttcatccagaacgtgatcctggtgttcttctgcgtgggcatgatcgccggcgtgttcccctggttcctggtggccgtgggccccctggtgatcctgttcagcgtgctgcacatcgtgagcagataccaggagctgctggacgacaaccaggcccccttcttcctgttcacctgcgccatgagatggctggccgtgagactggacctgatcagcatcgccctgatcaccaccaccggcctgatgatcgtgctgatgcacggccagatcccccccgcctacgccggcctggccatcagctacgccgtgcagctgaccggcctgttccagttcaccgtgagactggccagcgagaccgaggccagattcaccagcgtggagagaatcaaccactacatcaagaccctgagcctggaggcccccgccagaatcaagaacaaggcccccagccccgactggccccaggagggcgaggtgaccttcgagaacgccgagatgagatacagagagaacctgcccctggtgctgaagaaggtgagcttcaccatcaagcccaaggagaagatcggcatcgtgggcagaaccggcagcggcaagagcagcctgggcatggccctgttcagactggtggagctgagcggcggctgcatcaagatcgacggcgtgagaatcagcgacatcggcctggccgacctgagaagcaagctgagcatcatcccccaggagcccgtgctgttcagcggcaccgtgagaagcaacctggaccccttcaaccagtacaccgaggaccagatctgggacgccctggagagaacccacatgaaggagtgcatcgcccagctgcccctgaagctggagagcgaggtgatggagaacggcgacaacttcagcgtgggcgagagacagctgctgtgcatcgccagagccctgctgagacactgcaagatcctgatcctggacgaggccaccgccgccatggacaccgagaccgacctgctgatccaggagaccatcagagaggccttcgccgactgcaccatgctgaccatcgcccacagactgcacaccgtgctgggcagcgacagaatcatggtgctggcccagggccaggtggtggagttcgacacccccagcgtgctgctgagcaacgacagcagcagattctacgccatgttcgccgccgccgagaacaaggtggccgtgaagggctag

SEQ ID NO: 158475 - DNA, 4314 bp, Artificial Sequence
  derived and/or modified sequence
atgaaggacatcgacatcggcaaggagtacatcatccccagccccggctacagaagcgtgagagagagaaccagcaccagcggcacccacagagacagagaggacagcaagttcagaagaaccagacccctggagtgccaggacgccctggagaccgccgccagagccgagggcctgagcctggacgccagcatgcacagccagctgagaatcctggacgaggagcaccccaagggcaagtaccaccacggcctgagcgccctgaagcccatcagaaccaccagcaagcaccagcaccccgtggacaacgccggcctgttcagctgcatgaccttcagctggctgagcagcctggccagagtggcccacaagaagggcgagctgagcatggaggacgtgtggagcctgagcaagcacgagagcagcgacgtgaactgcagaagactggagagactgtggcaggaggagctgaacgaggtgggccccgacgccgccagcctgagaagagtggtgtggatcttctgcagaaccagactgatcctgagcatcgtgtgcctgatgatcacccagctggccggcttcagcggccccgccttcatggtgaagcacctgctggagtacacccaggccaccgagagcaacctgcagtacagcctgctgctggtgctgggcctgctgctgaccgagatcgtgagaagctggagcctggccctgacctgggccctgaactacagaaccggcgtgagactgagaggcgccatcctgaccatggccttcaagaagatcctgaagctgaagaacatcaaggagaagagcctgggcgagctgatcaacatctgcagcaacgacggccagagaatgttcgaggccgccgccgtgggcagcctgctggccggcggccccgtggtggccatcctgggcatgatctacaacgtgatcatcctgggccccaccggcttcctgggcagcgccgtgttcatcctgttctaccccgccatgatgttcgccagcagactgaccgcctacttcagaagaaagtgcgtggccgccaccgacgagagagtgcagaagatgaacgaggtgctgacctacatcaagttcatcaagatgtacgcctgggtgaaggccttcagccagagcgtgcagaagatcagagaggaggagagaagaatcctggagaaggccggctacttccagagcatcaccgtgggcgtggcccccatcgtggtggtgatcgccagcgtggtgaccttcagcgtgcacatgaccctgggcttcgacctgaccgccgcccaggccttcaccgtggtgaccgtgttcaacagcatgaccttcgccctgaaggtgacccccttcagcgtgaagagcctgagcgaggccagcgtggccgtggacagattcaagagcctgttcctgatggaggaggtgcacatgatcaagaacaagcccgccagcccccacatcaagatcgagatgaagaacgccaccctggcctgggacagcagccacagcagcatccagaacagccccaagctgacccccaagatgaagaaggacaagagagccagcagaggcaagaaggagaaggtgagacagctgcagagaaccgagcaccaggccgtgctggccgagcagaagggccacctgctgctggacagcgacgagagacccagccccgaggaggaggagggcaagcacatccacctgggccacctgagactgcagagaaccctgcacagcatcgacctggagatccaggagggcaagctggtgggcatctgcggcagcgtgggcagcggcaagaccagcctgatcagcgccatcctgggccagatgaccctgctggagggcagcatcgccatcagcggcaccttcgcctacgtggcccagcaggcctggatcctgaacgccaccctgagagacaacatcctgttcggcaaggagtacgacgaggagagatacaacagcgtgctgaacagctgctgcctgagacccgacctggccatcctgcccagcagcgacctgaccgagatcggcgagagaggcgccaacctgagcggcggccagagacagagaatcagcctggccagagccctgtacagcgacagaagcatctacatcctggacgaccccctgagcgccctggacgcccacgtgggcaaccacatcttcaacagcgccatcagaaagcacctgaagagcaagaccgtgctgttcgtgacccaccagctgcagtacctggtggactgcgacgaggtgatcttcatgaaggagggctgcatcaccgagagaggcacccacgaggagctgatgaacctgaacggcgactacgccaccatcttcaacaacctgctgctgggcgagaccccccccgtggagatcaacagcaagaaggagaccagcggcagccagaagaagagccaggacaagggccccaagaccggcagcgtgaagaaggagaaggccgtgaagcccgaggagggccagctggtgcagctggaggagaagggccagggcagcgtgccctggagcgtgtacggcgtgtacatccaggccgccggcggccccctggccttcctggtgatcatggccctgttcatgctgaacgtgggcagcaccgccttcagcacctggtggctgagctactggatcaagcagggcagcggcaacaccaccgtgaccagaggcaacgagaccagcgtgagcgacagcatgaaggacaacccccacatgcagtactacgccagcatctacgccctgagcatggccgtgatgctgatcctgaaggccatcagaggcgtggtgttcgtgaagggcaccctgagagccagcagcagactgcacgacgagctgttcagaagaatcctgagaagccccatgaagttcttcgacaccacccccaccggcagaatcctgaacagattcagcaaggacatggacgaggtggacgtgagactgcccttccaggccgagatgttcatccagaacgtgatcctggtgttcttctgcgtgggcatgatcgccggcgtgttcccctggttcctggtggccgtgggccccctggtgatcctgttcagcgtgctgcacatcgtgagcagagtgctgatcagagagctgaagagactggacaacatcacccagagccccttcctgagccacatcaccagcagcatccagggcctggccaccatccacgcctacaacaagggccaggagttcctgcacagataccaggagctgctggacgacaaccaggcccccttcttcctgttcacctgcgccatgagatggctggccgtgagactggacctgatcagcatcgccctgatcaccaccaccggcctgatgatcgtgctgatgcacggccagatcccccccgcctacgccggcctggccatcagctacgccgtgcagctgaccggcctgttccagttcaccgtgagactggccagcgagaccgaggccagattcaccagcgtggagagaatcaaccactacatcaagaccctgagcctggaggcccccgccagaatcaagaacaaggcccccagccccgactggccccaggagggcgaggtgaccttcgagaacgccgagatgagatacagagagaacctgcccctggtgctgaagaaggtgagcttcaccatcaagcccaaggagaagatcggcatcgtgggcagaaccggcagcggcaagagcagcctgggcatggccctgttcagactggtggagctgagcggcggctgcatcaagatcgacggcgtgagaatcagcgacatcggcctggccgacctgagaagcaagctgagcatcatcccccaggagcccgtgctgttcagcggcaccgtgagaagcaacctggaccccttcaaccagtacaccgaggaccagatctgggacgccctggagagaacccacatgaaggagtgcatcgcccagctgcccctgaagctggagagcgaggtgatggagaacggcgacaacttcagcgtgggcgagagacagctgctgtgcatcgccagagccctgctgagacactgcaagatcctgatcctggacgaggccaccgccgccatggacaccgagaccgacctgctgatccaggagaccatcagagaggccttcgccgactgcaccatgctgaccatcgcccacagactgcacaccgtgctgggcagcgacagaatcatggtgctggcccagggccaggtggtggagttcgacacccccagcgtgctgctgagcaacgacagcagcagattctacgccatgttcgccgccgccgagaacaaggtggccgtgaagggctag

SEQ ID NO: 158476 - DNA, 2511 bp, Artificial Sequence
  derived and/or modified sequence
atgcacagccagctgagaatcctggacgaggagcaccccaagggcaagtaccaccacggcctgagcgccctgaagcccatcagaaccaccagcaagcaccagcaccccgtggacaacgccggcctgttcagctgcatgaccttcagctggctgagcagcctggccagagtggcccacaagaagggcgagctgagcatggaggacgtgtggagcctgagcaagcacgagagcagcgacgtgaactgcagaagactggagagactgtggcaggaggagctgaacgaggtgggccccgacgccgccagcctgagaagagtggtgtggatcttctgcagaaccagactgatcctgagcatcgtgtgcctgatgatcacccagctggccggcttcagcggccccgccttcatggtgaagcacctgctggagtacacccaggccaccgagagcaacctgcagtacagcctgctgctggtgctgggcctgctgctgaccgagatcgtgagaagctggagcctggccctgacctgggccctgaactacagaaccggcgtgagactgagaggcgccatcctgaccatggccttcaagaagatcctgaagctgaagaacatcaaggagaagagcctgggcgagctgatcaacatctgcagcaacgacggccagagaatgttcgaggccgccgccgtgggcagcctgctggccggcggccccgtggtggccatcctgggcatgatctacaacgtgatcatcctgggccccaccggcttcctgggcagcgccgtgttcatcctgttctaccccgccatgatgttcgccagcagactgaccgcctacttcagaagaaagtgcgtggccgccaccgacgagagagtgcagaagatgaacgaggtgctgacctacatcaagttcatcaagatgtacgcctgggtgaaggccttcagccagagcgtgcagaagatcagagaggaggagagaagaatcctggagaaggccggctacttccagagcatcaccgtgggcgtggcccccatcgtggtggtgatcgccagcgtggtgaccttcagcgtgcacatgaccctgggcttcgacctgaccgccgcccaggccttcaccgtggtgaccgtgttcaacagcatgaccttcgccctgaaggtgacccccttcagcgtgaagagcctgagcgaggccagcgtggccgtggacagattcaagagcctgttcctgatggaggaggtgcacatgatcaagaacaagcccgccagcccccacatcaagatcgagatgaagaacgccaccctggcctgggacagcagccacagcagcatccagaacagccccaagctgacccccaagatgaagaaggacaagagagccagcagaggcaagaaggagaaggtgagacagctgcagagaaccgagcaccaggccgtgctggccgagcagaagggccacctgctgctggacagcgacgagagacccagccccgaggaggaggagggcaagcacatccacctgggccacctgagactgcagagaaccctgcacagcatcgacctggagatccaggagggcaagctggtgggcatctgcggcagcgtgggcagcggcaagaccagcctgatcagcgccatcctgggccagatgaccctgctggagggcagcatcgccatcagcggcaccttcgcctacgtggcccagcaggcctggatcctgaacgccaccctgagagacaacatcctgttcggcaaggagtacgacgaggagagatacaacagcgtgctgaacagctgctgcctgagacccgacctggccatcctgcccagcagcgacctgaccgagatcggcgagagaggcgccaacctgagcggcggccagagacagagaatcagcctggccagagccctgtacagcgacagaagcatctacatcctggacgaccccctgagcgccctggacgcccacgtgggcaaccacatcttcaacagcgccatcagaaagcacctgaagagcaagaccgtgctgttcgtgacccaccagctgcagtacctggtggactgcgacgaggtgatcttcatgaaggagggctgcatcaccgagagaggcacccacgaggagctgatgaacctgaacggcgactacgccaccatcttcaacaacctgctgctgggcgagaccccccccgtggagatcaacagcaagaaggagaccagcggcagccagaagaagagccaggacaagggccccaagaccggcagcgtgaagaaggagaaggccgtgaagcccgaggagggccagctggtgcagctggaggagaagggccagggcagcgtgccctggagcgtgtacggccaccccggctgctggggccccctgggcatccccggctactacggccccttccacgccgagtgcagacagcacagactgcagcacctggtggtggagctgctggaccaggccagaaagagagagcaccactgcgacagcagagagagagacctgggcgagtag

SEQ ID NO: 158477 - protein, 842 aa, Artificial Sequence
  derived and/or modified sequence
MVTVGNYCEAEGPVGPAWMQDGLSPCFFFTLVPSTRMALGTLALVLALPCRRRERPAGADSLSWGAGPRISPYVLQLLLATLQAALPLAGLAGRVGTARGAPLPSYLLLASVLESLAGACGLWLLVVERSQARQRLAMGIWIKFRHSPGLLLLWTVAFAAENLALVSWNSPQWWWARADLGQQVQFSLWVLRYVVSGGLFVLGLWAPGLRPQSYTLQVHEEDQDVERSQVRSAAQQSTWRDFGRKLRLLSGYLWPRGSPALQLVVLICLGLMGLERALNVLVPIFYRNIVNLLTEKAPWNSLAWTVTSYVFLKFLQGGGTGSTGFVSNLRTFLWIRVQQFTSRRVELLIFSHLHELSLRWHLGRRTGEVLRIADRGTSSVTGLLSYLVFNVIPTLADIIIGIIYFSMFFNAWFGLIVFLCMSLYLTLTIVVTEWRTKFRRAMNTQENATRARAVDSLLNFETVKYYNAESYEVERYREAIIKYQGLEWKSSASLVLLNQTQNLVIGLGLLAGSLLCAYFVTEQKLQVGDYVLFGTYIIQLYMPLNWFGTYYRMIQTNFIDMENMFDLLKEETEVKDLPGAGPLRFQKGRIEFENVHFSYADGRETLQDVSFTVMPGQTLALVGPSGAGKSTILRLLFRFYDISSGCIRIDGQDISQVTQASLRSHIGVVPQDTVLFNDTIADNIRYGRVTAGNDEVEAAAQAAGIHDAIMAFPEGYRTQVGERGLKLSGGEKQRVAIARTILKAPGIILLDEATSALDTSNERAIQASLAKVCANRTTIVVAHRLSTVVNADQILVIKDGCIVERGRHEALLSRGGVYADMWQLQQGQEETSEDTKPQTMER

SEQ ID NO: 158478 - protein, 211 aa, Artificial Sequence
  derived and/or modified sequence
MVTVGNYCEAEGPVGPAWMQDGLSPCFFFTLVPSTRMALGTLALVLALPCRRRERPAGADSLSWGAGPRISPYALPGGPHCQAIYFWPPCWRVWPAPVACGCLSWSGARHGSVWQWASGSSSGTALVSCSSGLWRLQLRTWPWCLGTAHSGGGQGQTWASRFSLACGCCGMWSLEGCLSWVSGPLDFVPSPIHCRFMKRTKMWKGASELAD

SEQ ID NO: 158479 - protein, 796 aa, Artificial Sequence
  derived and/or modified sequence
MVTVGNYCEAEGPVGPAWMQDGLSPCFFFTLVPSTRMALGTLALVLALPCRRRERPAGADSLSWGAGPRISPYVLQLLLATLQAALPLAGLAGRVGTARGAPLPSYLLLASVLESLAGACGLWLLVVERSQARQRLAMGIWIKFRHSPGLLLLWTVAFAAENLALVSWNSPQWWWARADLGQQVRSAAQQSTWRDFGRKLRLLSGYLWPRGSPALQLVVLICLGLMGLERALNVLVPIFYRNIVNLLTEKAPWNSLAWTVTSYVFLKFLQGGGTGSTGFVSNLRTFLWIRVQQFTSRRVELLIFSHLHELSLRWHLGRRTGEVLRIADRGTSSVTGLLSYLVFNVIPTLADIIIGIIYFSMFFNAWFGLIVFLCMSLYLTLTIVVTEWRTKFRRAMNTQENATRARAVDSLLNFETVKYYNAESYEVERYREAIIKYQGLEWKSSASLVLLNQTQNLVIGLGLLAGSLLCAYFVTEQKLQVGDYVLFGTYIIQLYMPLNWFGTYYRMIQTNFIDMENMFDLLKEETEVKDLPGAGPLRFQKGRIEFENVHFSYADGRETLQDVSFTVMPGQTLALVGPSGAGKSTILRLLFRFYDISSGCIRIDGQDISQVTQASLRSHIGVVPQDTVLFNDTIADNIRYGRVTAGNDEVEAAAQAAGIHDAIMAFPEGYRTQVGERGLKLSGGEKQRVAIARTILKAPGIILLDEATSALDTSNERAIQASLAKVCANRTTIVVAHRLSTVVNADQILVIKDGCIVERGRHEALLSRGGVYADMWQLQQGQEETSEDTKPQTMER

SEQ ID NO: 158480 - DNA, 2529 bp, Artificial Sequence
  derived and/or modified sequence
atggtcactgttggcaattattgcgaggctgaagggccagtgggccctgcttggatgcaggacggattatccccctgtttctttttcacactggtgccgtctaccaggatggccctgggcacgttagccctggtgctggccctgccttgcagaaggagggagcgccctgccggcgctgactctctgtcttggggcgccggtccccgcatctcaccctatgtgcttcagctactattggccactctgcaggcggcactgcctcttgcgggcctggcaggacgtgtgggcacagctcgcggggcgcccctgcctagttatttactactcgcttccgtgctggagtctctggccggggcctgcgggctgtggttacttgtagtggagagatcccaggcacggcaaaggctggccatgggaatctggattaagttccggcactccccagggctcctgctgctctggaccgtagccttcgccgcggaaaaccttgctctggtgtcgtggaatagtccccagtggtggtgggctcgcgctgatctcggtcagcaggttcagtttagcctttgggtcttaagatatgtcgtgagtggcggcctctttgtcctcggcctctgggctcctggattgcgcccccaaagttacacattacaggtgcatgaagaagatcaggacgtggagagaagccaggtccgatctgcagcacaacaatccacctggcgtgattttggcagaaaattgcggttgttgtccgggtatctgtggccccgaggctcccctgccctccaattggtggttctgatctgcttgggactcatgggactcgagcgtgccctcaatgtgttagtccccatcttttacagaaatattgtgaacctgctgaccgagaaggccccctggaattctcttgcctggaccgttacctcatatgtttttttgaaattcttgcaagggggcgggacagggtccacaggctttgtgagcaacctcaggacattcctgtggatccgggtccaacagttcacctcacgtcgcgtggaacttctgatcttctctcacctccacgagctttccctgcgatggcacctagggaggaggacaggcgaggtcttaaggatcgccgaccgcggaacgtcttcagtgactggcctgctgtcttacttggtgttcaatgtgattccgacactggcagacattattattggcattatatatttctccatgtttttcaacgcctggttcggcctgattgtcttcctgtgtatgtccctatacttaacactgactattgttgtcaccgagtggcggactaagttccgcagagcaatgaacacccaagaaaacgccacgcgggcgcgcgcagtggattctctactgaacttcgaaactgtcaaatactacaatgccgagagctacgaggtggaaaggtaccgtgaggctatcatcaagtaccagggtctggagtggaagagctcagctagtttagtcttgctcaatcagactcagaatttggtgatcggcctgggcctgcttgccgggtctcttctgtgtgcatatttcgtgactgagcagaagctgcaagtgggcgattatgtgcttttcggaacttacattatacagctctatatgcccttgaattggttcggcacatactaccgtatgattcagacaaacttcattgatatggagaacatgtttgatctcttgaaagaagaaactgaagtgaaggacctccccggtgcgggacccctgcgcttccagaaaggacggattgagtttgagaacgtgcattttagctatgctgacggacgagagaccctgcaggatgtgtccttcacagtgatgcctggacaaaccctcgcattggtgggcccctctggggcggggaagtcaactatcctccggctcctttttagattctatgatattagcagcggctgcatacggatcgatggacaagatatcagccaagtcacccaggctagcttgcgatctcacataggcgtggtaccacaggataccgtgctgttcaatgacactatcgctgacaacattcgatatggcagggtcacagcaggcaatgatgaggttgaagcggccgcgcaggccgcaggcattcacgacgccataatggcatttccagagggataccgaactcaggtgggagagcgcggactcaaactctctgggggggaaaaacagagagtggcaatcgcccgtacgatccttaaggctccagggatcattctgctggacgaagcgaccagtgccttagataccagtaatgaacgggccattcaggcttctttggccaaggtctgtgccaatcgcaccacaatcgtggtcgcacatcggctctctaccgtggtcaatgccgatcagattctggtgattaaagatgggtgcatcgtggaacgtggcagacatgaagctttgctgagtcggggcggagtctacgccgacatgtggcaattgcagcaggggcaagaagagaccagtgaggatacaaaaccgcagactatggaacgctag

SEQ ID NO: 158481 - DNA, 636 bp, Artificial Sequence
  derived and/or modified sequence
atggttacagtgggcaattactgtgaggcagagggacctgtcggccccgcctggatgcaggacggactttcgccttgctttttttttaccttggtgccctccacccgcatggccctgggtaccctcgcgctggtcctggctctgccctgtcggagacgggagagacctgccggtgccgatagcctctcctggggcgccgggccccgaatcagtccatacgctctccccgggggaccccattgtcaggccatctacttttggcccccctgttggagagtgtggcccgcaccggttgcctgcggctgcctgagctggtctggggctcggcacggatcggtgtggcagtgggcgtcgggctcctcatcagggaccgccctggtttcttgctccagtggtctgtggagactacagctgaggacatggccctggtgtttaggcaccgcccacagcggtgggggacaaggccaaacgtgggcttcccgattcagtctggcctgcggatgctgcggtatgtggtcccttgaagggtgtttgagctgggtttccggcccacttgattttgtgccgagcccaattcactgcagattcatgaagcgcacaaagatgtggaagggggcctcagaactcgcagactag

SEQ ID NO: 158482 - DNA, 2391 bp, Artificial Sequence
  derived and/or modified sequence
atggtgaccgtgggcaactattgtgaggccgagggccctgtcgggcccgcatggatgcaggacggactgagcccatgcttctttttcacactcgtgccttctaccagaatggcgctgggaacactcgccctggtcttagctctcccctgccgccgccgtgagagaccagccggggcagatagtctgagctggggcgccgggccaaggatcagtccctacgttttgcagctactgctggcaaccctccaggcagccctgcccctcgctggacttgctgggagagtgggcacagcacgtggggctcctcttccatcttacctcctcctagcaagtgtgctggagagcctcgccggcgcatgtggactgtggctgctagtggtcgaacgatctcaggcacgccagcggctcgctatggggatttggatcaagttcagacatagccccggtctccttctactctggacagttgccttcgcagctgagaatttggccctggtgtcatggaacagcccccagtggtggtgggcgcgcgccgatctcggacaacaggtgcgatccgccgcacaacagtctacttggagagacttcgggcgcaagctaaggctcctttccggttacctgtggcctaggggctcccccgccctccagctggtcgtgctgatctgcctgggtctgatggggctcgagagagccctcaacgtcttggtaccgatcttttacagaaatatcgtgaacctcctgacagagaaggccccttggaactctctggcctggacagttacttcttatgtgttcctgaaatttctgcagggcggcggtactggttctaccggatttgttagtaacctccgcacattcttgtggattcgggtacaacaattcacttcgcgccgggttgaactcttaattttctcacatctccacgagttatcgttgcggtggcatttgggcaggaggacaggcgaagttctacgtatcgccgaccgagggacatcaagcgtgaccggcctcctgagttacctagtgtttaacgtgatcccaacactcgccgacatcattatcggaatcatttactttagcatgttcttcaacgcttggtttggactgatagtgtttctttgtatgagtctatacctgacccttaccattgttgtgacagaatggcgcacaaagtttcgcagggcaatgaatacccaggagaatgctacccgggcccgcgcagttgactctctcttgaattttgagactgtaaagtactataacgccgaaagctacgaggtggagcggtatcgtgaggctattatcaaataccagggacttgaatggaaaagctccgcgagcctggtgctgctaaaccagactcagaacttggtcattgggcttggactcttagcaggtagtctcctttgcgcctactttgtcactgaacagaagctccaggtaggggactatgtgctgtttggcacttatatcatccaactgtacatgccattgaactggttcggcacctattaccgcatgatccagaccaacttcattgatatggagaacatgttcgatcttctgaaggaggagaccgaagtgaaagacctgccgggcgccggcccccttcggttccaaaaaggtagaattgaattcgagaacgtccacttctcttatgcggatggacgcgagaccttgcaggatgtaagtttcacagtgatgcctggtcagaccttggccttagtaggaccctccggtgcgggtaagagcacaattctcaggctattattccgattctatgatatttccagcggatgcatccgtatcgatgggcaggatataagtcaggttactcaggcatccctcagatcccatatcggggtcgtgccccaagacaccgtcttatttaatgacaccatcgccgataacattagatatggccgagtaacagccggaaacgatgaggtcgaggccgccgctcaagccgccggcatccacgacgccatcatggctttcccagaagggtatcggacccaagttggcgaacgaggcctgaaactttctggtggagagaagcaacgggtggctatcgcacgcacgattctgaaggcccccggaataatactgctggatgaggcaacttccgccttggacacgagcaatgaaagggctatccaggcatccctcgccaaagtctgtgcaaatagaacaactatcgttgtggcacaccggttaagcactgtggtaaacgcagatcagatcctcgtgataaaggacggctgtatagtggagcgtggaagacatgaggccctgctgtcaaggggtggagtttatgcggatatgtggcagctgcagcagggccaggaggagactagcgaggacacgaaaccgcagaccatggagagatag

SEQ ID NO: 158483 - DNA, 2529 bp, Artificial Sequence
  derived and/or modified sequence
atggtgacagtgggcaactactgtgaggccgagggccctgtgggccctgcctggatgcaggacggcctgagcccctgcttcttcttcaccctggtgcccagcaccaggatggccctgggcaccctggccctggtgctggccctgccctgcagaagaagagagaggcctgctggagctgacagcctgtcctggggcgccggcccccgcatcagcccctacgtgctgcagctgctgctggccaccctgcaggccgccctgcccctggccggcctggccggccgggtgggcacagcccggggggcccccctgcccagctacctgctgctggcctctgtgctggagagcctggccggggcctgtggcctgtggctgctggtggtggagaggagccaggcccggcagaggctggccatgggcatctggatcaagttccgccacagccctggcctgctgctgctgtggacagtggcctttgctgctgagaacctggccctggtgtcctggaacagcccccagtggtggtgggcccgggctgacctgggccagcaggtgcagttcagcctgtgggtgctgcgctacgtggtgtctgggggcctgtttgtgctgggcctgtgggcccctggcctgcggccccagagctacaccctgcaggtgcatgaggaggaccaggatgtggagaggagccaggtgcgctctgctgcccagcagagcacctggagggactttggaaggaagctgcggctgctgagcggctacctgtggccccggggcagccctgccctgcagctggtggtgctgatctgcctgggcctgatgggcctggagcgggccctgaatgtgctggtgcccatcttctacagaaatattgtgaacctgctgacagagaaggccccctggaacagcctggcctggacagtgaccagctatgtgttcctgaagttcctgcagggcggcggcaccggcagcactggatttgtgagcaacctgcggaccttcctgtggatccgggtgcagcagttcaccagcagaagagtggagctgctgatcttcagccacctgcacgagctgagcctgcgctggcacctgggccgcaggactggagaggtgctgagaattgctgaccggggcaccagctctgtgacaggcctgctgagctacctggtgttcaacgtcatccccaccctggccgacatcatcatcggcatcatctacttctccatgttcttcaatgcctggtttggcctcatcgtgttcctgtgcatgagcctgtacctgaccctgaccatcgtggtgacagagtggaggaccaagttcagaagagccatgaacacccaggagaatgccacccgggcccgggctgtggacagcctgctgaactttgagaccgtgaagtactacaatgctgagagctatgaggtggagcgctaccgggaggccatcatcaagtaccagggcctggagtggaagagcagcgccagcctggtgctgctgaaccagacccagaacctggtgattggcctgggcctgctggccggcagcctgctgtgtgcctactttgtgacagagcagaagctgcaggtgggggactatgtgctgtttggcacctacatcatccagctgtacatgcccctgaactggtttggcacctactacaggatgatccagaccaacttcatcgacatggagaacatgtttgacctgctgaaggaggagacagaggtgaaggacctgcccggggccggccccctgcgcttccagaagggccgcatcgagtttgaaaatgtgcacttctcctatgcagatggccgggagaccctgcaggatgtgtccttcaccgtgatgcctggccagaccctggccctggtgggccccagcggggccggcaagagcaccatcctgcggctgctcttccgcttctatgacatcagcagcggctgcatcagaattgatggccaggacatcagccaggtgacccaggccagcctgcggagccacatcggcgtggtgccccaggacacagtgctcttcaatgacaccatcgctgacaacatccgctatggccgggtgacagctggaaatgatgaggtggaggccgccgcccaggccgccggcatccatgatgccatcatggccttccctgagggctaccgcacccaggtgggggagcggggcctgaagctgagcggcggggagaagcagagggtggccatcgcccggaccatcctgaaggcccctggcatcatcctgctggatgaggccaccagcgccctggacaccagcaatgaaagagccatccaggccagcctggccaaggtgtgtgccaacagaaccaccatcgtggtggcccaccggctgagcacagtggtgaatgctgaccagatcctggtgatcaaggatggctgcatcgtggagcggggcagacatgaggccctgctgagcagaggaggagtgtatgctgacatgtggcagctgcagcagggccaggaggagaccagcgaggacaccaagccccagaccatggagaggtag

SEQ ID NO: 158484 - DNA, 636 bp, Artificial Sequence
  derived and/or modified sequence
atggtgacagtgggcaactactgtgaggccgagggccctgtgggccctgcctggatgcaggacggcctgagcccctgcttcttcttcaccctggtgcccagcaccaggatggccctgggcaccctggccctggtgctggccctgccctgcagaagaagagagaggcctgctggagctgacagcctgtcctggggcgccggcccccgcatcagcccctatgccctgcccggcggcccccactgccaggccatctacttctggccaccctgctggagggtgtggccagcccctgtggcctgtggctgcctgtcctggagcggggcccggcacggctctgtgtggcagtgggccagcggcagcagcagcggcacagccctggtgtcctgcagcagcggcctgtggaggctgcagctgcggacctggccctggtgcctgggcacagcccacagcggcggcggccagggccagacctgggccagccgcttcagcctggcctgtggctgctgcggcatgtggagcctggagggctgcctgtcctgggtgtctggccccctggactttgtgcccagccccatccactgccgcttcatgaagaggaccaagatgtggaagggggccagcgagctggccgactag

SEQ ID NO: 158485 - DNA, 2391 bp, Artificial Sequence
  derived and/or modified sequence
atggtgacagtgggcaactactgtgaggccgagggccctgtgggccctgcctggatgcaggacggcctgagcccctgcttcttcttcaccctggtgcccagcaccaggatggccctgggcaccctggccctggtgctggccctgccctgcagaagaagagagaggcctgctggagctgacagcctgtcctggggcgccggcccccgcatcagcccctacgtgctgcagctgctgctggccaccctgcaggccgccctgcccctggccggcctggccggccgggtgggcacagcccggggggcccccctgcccagctacctgctgctggcctctgtgctggagagcctggccggggcctgtggcctgtggctgctggtggtggagaggagccaggcccggcagaggctggccatgggcatctggatcaagttccgccacagccctggcctgctgctgctgtggacagtggcctttgctgctgagaacctggccctggtgtcctggaacagcccccagtggtggtgggcccgggctgacctgggccagcaggtgcgctctgctgcccagcagagcacctggagggactttggaaggaagctgcggctgctgagcggctacctgtggccccggggcagccctgccctgcagctggtggtgctgatctgcctgggcctgatgggcctggagcgggccctgaatgtgctggtgcccatcttctacagaaatattgtgaacctgctgacagagaaggccccctggaacagcctggcctggacagtgaccagctatgtgttcctgaagttcctgcagggcggcggcaccggcagcactggatttgtgagcaacctgcggaccttcctgtggatccgggtgcagcagttcaccagcagaagagtggagctgctgatcttcagccacctgcacgagctgagcctgcgctggcacctgggccgcaggactggagaggtgctgagaattgctgaccggggcaccagctctgtgacaggcctgctgagctacctggtgttcaacgtcatccccaccctggccgacatcatcatcggcatcatctacttctccatgttcttcaatgcctggtttggcctcatcgtgttcctgtgcatgagcctgtacctgaccctgaccatcgtggtgacagagtggaggaccaagttcagaagagccatgaacacccaggagaatgccacccgggcccgggctgtggacagcctgctgaactttgagaccgtgaagtactacaatgctgagagctatgaggtggagcgctaccgggaggccatcatcaagtaccagggcctggagtggaagagcagcgccagcctggtgctgctgaaccagacccagaacctggtgattggcctgggcctgctggccggcagcctgctgtgtgcctactttgtgacagagcagaagctgcaggtgggggactatgtgctgtttggcacctacatcatccagctgtacatgcccctgaactggtttggcacctactacaggatgatccagaccaacttcatcgacatggagaacatgtttgacctgctgaaggaggagacagaggtgaaggacctgcccggggccggccccctgcgcttccagaagggccgcatcgagtttgaaaatgtgcacttctcctatgcagatggccgggagaccctgcaggatgtgtccttcaccgtgatgcctggccagaccctggccctggtgggccccagcggggccggcaagagcaccatcctgcggctgctcttccgcttctatgacatcagcagcggctgcatcagaattgatggccaggacatcagccaggtgacccaggccagcctgcggagccacatcggcgtggtgccccaggacacagtgctcttcaatgacaccatcgctgacaacatccgctatggccgggtgacagctggaaatgatgaggtggaggccgccgcccaggccgccggcatccatgatgccatcatggccttccctgagggctaccgcacccaggtgggggagcggggcctgaagctgagcggcggggagaagcagagggtggccatcgcccggaccatcctgaaggcccctggcatcatcctgctggatgaggccaccagcgccctggacaccagcaatgaaagagccatccaggccagcctggccaaggtgtgtgccaacagaaccaccatcgtggtggcccaccggctgagcacagtggtgaatgctgaccagatcctggtgatcaaggatggctgcatcgtggagcggggcagacatgaggccctgctgagcagaggaggagtgtatgctgacatgtggcagctgcagcagggccaggaggagaccagcgaggacaccaagccccagaccatggagaggtag

SEQ ID NO: 158486 - DNA, 2529 bp, Artificial Sequence
  derived and/or modified sequence
atggtgaccgtgggcaactactgcgaggccgagggccccgtgggcccagcttggatgcaagatggcctcagcccatgctttttcttcacacttgtgcctagcacaaggatggcacttggtacactcgccttggtactcgcccttccttgcaggaggcgtgaaaggccagccggcgccgacagcttgtcatggggtgcaggacctagaatcagcccatacgtgcttcagctcctcttagctacactgcaggcagcgctgccattggctggtctggctgggagagtggggaccgcccggggagcacccttgccctcttacctgcttttagcctccgtcttggaatctcttgctggtgcatgcggactgtggctgctggttgtcgagcggtcccaggcacgacagaggctcgccatgggaatctggatcaaattccgtcactctcccggacttctgctcttgtggacagtggcttttgctgcggaaaatctggccctagtcagctggaactctcctcagtggtggtgggctcgcgcagacctcggacagcaggttcagttttctctatgggttttgcgctacgtcgtgtcaggggggcttttcgtgcttggcctatgggcaccaggcttacggccacaaagctatacactgcaggtgcacgaggaggatcaggatgttgagcgcagtcaagtacgttccgccgcacagcagtcaacttggcgagattttggacgcaagctgcgtttactcagcgggtatctgtggccccgcggtagccccgccctgcagttggtggtgctgatctgtttagggctcatgggcctagaaagggccctcaatgttctggttcccattttctatcggaacattgtgaatctgctaacggagaaggctccatggaattcgctcgcctggaccgtgacctcctacgtgttcctgaagttcttgcagggtggcggtaccggctctacggggtttgtaagtaacctgagaaccttcctttggatccgggtgcagcagtttacttcaaggagagttgaattacttatattctctcatctccatgagctgtcactgcggtggcatctgggacggagaacaggcgaagtcctgagaatagccgacaggggcacctctagcgtgaccggattgctgtcctacctggtgtttaatgtcatcccaactttggctgacatcatcatcggaatcatctacttctccatgtttttcaatgcctggttcggcctcatagtgttcctgtgtatgagcttgtatctgacgctaaccatagtggtgacagagtggaggactaaatttagaagggctatgaatacccaggagaacgccaccagagctcgggcagtggacagtctattaaactttgaaaccgtaaagtactacaatgccgagagctacgaagtggaacgatatcgggaggcaatcatcaaatatcagggcctggagtggaaaagcagcgcctctttagtactcctgaaccagacccagaacttggtgattgggctcggactgctggccgggtcgctgctgtgcgcatattttgtgacggagcagaaactgcaggtgggcgactacgtgctgttcggtacctacatcattcagctgtatatgcccctcaactggtttggaacctattacagaatgatacagacaaacttcatcgatatggaaaatatgttcgacctcctcaaagaggaaacagaagtaaaggacttgcccggggctggccctttaagatttcaaaaaggacgaattgagtttgaaaacgtccatttcagctatgccgacgggcgcgagactttacaggatgtctcattcacagtgatgcctggtcaaacactggcactcgttggccccagcggagcaggtaagagcaccatcctgcgactcttgttccggttctacgatatctccagcgggtgcatccgcatcgacggacaagacatcagtcaggtgactcaagcctccctgcgctctcatatcggggtggtcccccaggacacagtcctattcaatgataccatcgcagataatatacggtatggtagagtcacagccggcaacgacgaggtggaggctgccgcccaagctgcagggattcatgacgccatcatggcttttcccgaaggataccgcacacaagtcggagagcgcggactcaagttatcaggaggagaaaaacagcgtgttgcaatcgccaggaccatcctgaaagccccaggcatcatactgctggacgaggccacaagcgcattggacacctccaatgagcgcgctatacaagcctctctcgctaaagtctgcgccaacaggacgactattgtggtcgctcatagactctctacagtggtgaatgccgaccagatcctggtcatcaaggacgggtgtattgtagagcgcggccgacacgaggcccttctgtcccgaggaggagtgtatgctgacatgtggcagctgcagcagggacaggaggagacctctgaagataccaagccccagacaatggaacggtag

SEQ ID NO: 158487 - DNA, 636 bp, Artificial Sequence
  derived and/or modified sequence
atggtgaccgtgggcaactactgcgaggccgagggccccgtgggccccgcttggatgcaggacggcctttctccctgttttttctttactcttgtgccatccacccgcatggccctgggaactctcgctctggtgctcgcattaccgtgccggcgaagagagcgcccagccggggccgacagcctctcgtggggcgccggccctcgcatctccccctacgccctcccaggcggaccccattgtcaagctatctacttctggcctccctgttggcgcgtctggcccgcaccggttgcatgtgggtgtctctcttggagcggcgccagacacggctcggtctggcagtgggcaagtggatcctcctctgggaccgcgctggttagttgttcatcgggcctgtggcgcctccagttgagaacttggccctggtgcctggggactgcccactcaggagggggacagggccagacttgggcttcccgattttccctggcgtgcggatgctgcggcatgtggtctctagaggggtgcctctcttgggtgtctgggccattggactttgtgccgtcacccatccactgtcgattcatgaaacggactaaaatgtggaagggagcttctgagctggcggactag

SEQ ID NO: 158488 - DNA, 2391 bp, Artificial Sequence
  derived and/or modified sequence
atggtgaccgtgggcaactactgcgaggccgagggccccgtgggcccagcctggatgcaggatggactgtctccatgctttttttttaccctcgttccttccacccgcatggccttaggcaccttggccttggtacttgccttgccttgtaggcggcgagagcggcccgccggagctgactccctgagttggggcgctgggcctcgcatttccccatacgtgttgcaacttttactggcaacgctgcaggccgccttacctctggccggactggcaggtcgggtcggtacagctaggggcgcacccctgccatcatacctgctgctcgcctctgtgctggagagtcttgccggcgcctgcggtctttggctgttggtagttgagcgctcacaagccagacagaggttggccatggggatctggattaaattcaggcactcacccggactgctactgctgtggaccgttgccttcgcggcagaaaatctcgccctggttagctggaacagtccacagtggtggtgggcgagggcagatctaggacaacaggtgaggagcgctgcccaacagtcaacatggagagatttcgggcggaagttacgccttctgtcgggctatctctggccacgcggatcgccggccctgcagttagtggtcttgatctgcttgggtttgatgggtctggagagggctctaaatgttttggtgcctattttctaccgaaatatcgtgaatctcctcacggagaaggccccctggaacagcctggcatggactgtgacaagttatgtgttcctcaagttcctgcagggaggcggcaccggatctaccggatttgtgagcaatctgaggacatttctttggatcagggtccagcagttcacctcccggagggtcgagttgctgatcttcagccatcttcacgaactgagtcttcgatggcatctgggtcgtcggactggggaggtgctcagaatcgcggatcggggcacttctagcgtgacaggacttttgagctatcttgtgtttaatgtcataccaacattagccgacatcatcattggcattatctactttagcatgttctttaacgcttggttcggcttaatcgtgtttctgtgtatgtccctgtatctcacgctgactattgttgttaccgagtggcgtactaagttccgcagggccatgaatacacaggaaaatgctaccagggcaagggccgtagattctctgctgaatttcgaaacagtgaagtattataatgcagagtcctatgaagtggaaagatatagggaggccatcataaaataccagggcctggaatggaaatctagcgcttctcttgtcttgctgaatcagacacagaatctcgtcatcgggctcggcttactcgcaggtagtctactatgcgcctattttgtgactgaacaaaagctccaagtcggagactacgtcttgttcgggacctacatcatccagctttacatgccattgaattggttcgggacgtactatagaatgatccaaacaaatttcatcgacatggagaatatgtttgacctgctgaaggaagaaaccgaggtcaaagacctgccaggagccggtcctctccggttccagaagggcagaattgagtttgaaaatgttcactttagctatgccgacgggcgtgaaaccctgcaggatgtcagttttaccgtgatgcccgggcagaccctggcacttgtgggccccagcggggccggaaaatccacgatcctaagactgttatttcgcttctatgatatcagtagtggctgcatccgcatcgacggacaggacatatctcaagtcacacaggctagtcttcggagtcacatcggggtggtgccccaagatactgtgctcttcaacgacaccattgccgacaatatcagatacggcagagtcaccgcgggcaacgatgaagtcgaggccgcagcccaggcagcaggcattcatgacgcaatcatggcgtttcccgagggttacagaacccaggtgggtgaaagaggacttaaattgtcaggtggcgagaaacaacgagtagcgatcgccaggactattttgaaagctccggggatcatactcctagacgaggctacctctgccctcgacacatccaatgagagggctatacaggcctcactagccaaagtctgcgctaaccggaccaccatcgtagttgcacaccgactgtcaacggtcgtgaatgcagaccaaatcctggtgatcaaagacggttgtatcgtggagcgtggccgccatgaggccctgctctcaagaggaggcgtgtatgccgatatgtggcaactgcagcagggccaggaggagaccagtgaggacaccaaaccccagaccatggaaagatag

SEQ ID NO: 158489 - DNA, 2529 bp, Artificial Sequence
  derived and/or modified sequence
atggtgaccgtggggaattactgcgaagccgagggcccagtagggccagcatggatgcaggatggactgagcccctgttttttcttcactttggtcccatcaactaggatggccttaggcaccctggcgctcgtgctggctttgccttgcagacggagagagagaccggcaggcgctgattctctgtcatggggagcaggaccccgaattagtccttatgtattgcaactgcttctcgcaacgttacaggccgctcttccattagcagggctggccggacgcgtggggactgcacggggagctccactgccaagttacctcttactggcaagtgtcctagaatccctcgctggagcctgcgggctgtggctgttggtcgtggagagatctcaggcccgacaacgtctcgccatgggcatctggatcaagtttaggcactcaccgggactgcttctgctatggaccgtagctttcgcagctgaaaacttggcactagtatcgtggaattccccgcagtggtggtgggcgagagcagacttgggccagcaagtgcaatttagcctctgggtcttgaggtatgttgttagcgggggactcttcgtactaggcctgtgggcccctgggctgcgcccacagagctacacattgcaggtgcacgaagaggatcaggatgtcgagcgaagccaagtcagatcagctgcgcagcagtctacttggagagacttcggccgaaagctgcgtttgctgagcggatacctatggcctaggggatccccggcactgcagctggtggtgctgatctgcctgggattgatggggttggagcgtgcactaaacgtgctggtccccatcttttataggaacatagtgaacctgctgaccgagaaggctccgtggaactccctcgcctggactgtgaccagctatgtctttctgaagttcctgcagggaggagggaccggttctaccggttttgtttccaacttgaggacattcttgtggatccgtgtgcagcagttcaccagccggagggtggagctgctgatcttcagccacctgcatgagctttctctgcgctggcacctgggcaggcggaccggcgaagtgctaagaattgctgaccgagggaccagctccgtcaccgggctgctgtcttatctagttttcaatgtcatacctaccttagccgacatcatcattggaataatatatttctctatgttctttaatgcttggttcgggctcatcgtcttcttgtgcatgtctctttatctcaccctgactatcgtggtgacggagtggaggaccaagttcaggcgagcaatgaacacccaggaaaacgccactagagcacgcgctgtggacagcctactgaacttcgagaccgtgaaatattacaatgctgagtcttatgaagtcgaaagatacagagaagccataattaagtatcagggcttagaatggaaaagctcagccagtctggttctgctgaatcagacacagaatctagtcattgggctcggccttctggctggatccctgctctgcgcctatttcgtcacggaacagaaactgcaggtgggcgattacgtactgttcggaacctatatcattcagctatacatgccactgaactggtttgggacatactaccgtatgattcagacaaatttcatcgatatggagaacatgtttgatttgctgaaggaagaaacggaggttaaggatctgcctggagctgggccactgaggtttcaaaaaggtagaatcgaattcgaaaacgtccacttttcttacgctgacggcagagaaactctgcaggatgtctccttcaccgtgatgccgggtcaaaccctggcactggtggggccaagcggagccggtaagagtaccatactgcgcctgctatttcggttctatgacatctcaagtgggtgcattcggatcgacggacaggacatctctcaggtgacccaggccagcctgagatcgcacattggtgtggtgcctcaagataccgttttgtttaatgatactattgccgataatatccggtatggcagagttaccgccggtaatgacgaagtcgaagctgccgctcaagccgctggcattcatgatgccatcatggcattccccgaaggttatcgcacccaggtgggtgaacgcggtctgaagctgagtggcggtgaaaaacaaagagttgccattgccaggacgatcctcaaagcacctggaatcattctgcttgacgaagcgacaagtgccttagatactagcaatgaaagagcaattcaggcaagtctggccaaggtgtgcgctaatcggacgacaattgtagtagcccacagactgagcactgtggttaatgccgaccagatcctggttatcaaggatggatgtatagtagagcggggacgccacgaggccctgctgagccgtgggggagtctacgccgacatgtggcaactccagcagggccaggaggaaacgtcagaggacacgaaaccacagactatggaacgctag

SEQ ID NO: 158490 - DNA, 636 bp, Artificial Sequence
  derived and/or modified sequence
atggtcactgtgggcaactactgtgaggctgaaggaccggtagggccagcatggatgcaagatggcctgagcccatgcttcttttttacacttgtcccctcaactaggatggcactcggaaccttagccttggtcctagctctgccgtgtcgaaggagggaacgcccagcaggtgccgactccttgtcctggggggctggccctagaatttctccttatgcattaccaggaggccctcactgccaggcaatctatttttggcccccatgttggcgggtgtggccggcaccggtagcctgcggctgtctttcatggtcaggcgctagacacggttccgtgtggcagtgggcgagcggttctagttctggcaccgccttggttagctgcagtagcggcctctggcgattacagctgcgcacgtggccgtggtgcctaggtacggcccactcggggggaggtcaggggcagacatgggcgtcaaggttctcgctggcgtgcgggtgctgcggcatgtggtctctcgaagggtgcctgtcctgggtgtccgggccactagactttgtcccttctccgattcattgcaggttcatgaagagaacgaagatgtggaagggtgcttcagaattagcggactag

SEQ ID NO: 158491 - DNA, 2391 bp, Artificial Sequence
  derived and/or modified sequence
atggtcacagtggggaactactgtgaagctgaagggccagtgggaccagcttggatgcaggacgggctcagcccctgcttcttcttcaccctggttccttccaccagaatggcccttggcaccctggcactagtcttggctttgccttgccgcaggagagagcggccagctggcgctgacagcctctcctggggcgctggcccacggattagcccatacgttcttcagctcctcctggccaccctgcaggccgctctgcccctggccggattagccggacgagtcgggacggccaggggcgctcctctcccttcttatcttctccttgcatccgtgctggagagcctggctggggcatgcggattatggctgctagtggtcgagaggtctcaggcaaggcagcggctggccatgggcatctggataaaatttaggcatagccccggactcctactgctgtggactgtggccttcgcagccgaaaacctggccctggtgtcctggaactctccacagtggtggtgggccagggccgatctggggcaacaggtgagaagtgctgcacagcaaagtacatggcgagatttcggcagaaaactgaggctgttgtctggttatttatggcctcgtgggtctcccgcacttcaactggttgtgctcatctgcctaggactaatgggcctggaaagggcattgaacgtgcttgttccaattttttatcgcaacatcgttaatctactcaccgagaaggccccatggaattcactcgcctggaccgtgacatcctacgtgttcttgaagttcttacagggcggtggaaccggcagcaccggcttcgtgagcaacctgcggacattcctctggattcgcgtccaacaatttacctcccgcagagtggagctgcttatttttagtcacttgcacgagctgtctctcaggtggcacttaggacgcaggaccggcgaagtcctgagaatagctgaccgcggaacttcaagtgtaactgggcttctgtcgtacttagtcttcaacgtcatccccacactcgcggacatcattattgggattatttattttagcatgttcttcaacgcctggttcggtctgatagttttcctctgcatgagcctgtacttaaccctgactatagtggtaacggaatggcgcacaaagtttcgcagggccatgaatacgcaggagaacgctacccgcgcacgcgctgtggactccctcttaaattttgagaccgtgaaatactacaatgctgagtcctatgaagtcgagagatatagggaagctatcattaagtaccagggactggagtggaaatcttctgcatcactggtgctgctgaatcagacacagaatctcgtcataggactgggcctcttagctggcagtctgttgtgcgcctacttcgtcactgagcaaaaactgcaggtgggtgactacgtcttgttcggtacctacataatccagctgtatatgccgttgaattggttcggaacctactaccggatgattcagaccaattttattgatatggagaatatgtttgacctgctgaaagaagagacagaggtgaaagacttgcctggggctggtcctttgcgcttccaaaaggggagaatagagtttgaaaacgttcacttctcttacgcagacggcagagagactctacaggacgtgtccttcacagtgatgcctggccagactctcgcattggtcggcccatccggcgcaggcaagtccacgatcctgcgactgctctttaggttctacgatatttccagcggatgcatccgcattgatggccaggatattagccaagtgacccaggcgtctttgcgctcacacattggtgtggtaccacaggataccgtactatttaacgacacaatcgcagataacattagatacggcagagtgaccgcaggcaatgacgaggttgaggcagcagcacaggcggctggaatccatgatgctattatggccttccctgaaggatacagaacacaggtgggagaaaggggcctcaagctctcagggggagagaagcagcgcgtcgcaattgccagaacgattctgaaagccccaggtatcatcctgctggatgaagctacaagcgcactggatacatctaatgaacgtgccatccaggcttccctcgcaaaagtgtgcgcgaaccggaccacaatcgtcgtggcccacaggctgagtactgtcgtgaacgccgaccaaattttggtgattaaagacggctgcattgttgagcgcggaaggcatgaagctctcctaagccggggaggggtttatgcagatatgtggcagttacagcagggccaggaggaaacaagcgaagacaccaaacctcagacaatggagcggtag

SEQ ID NO: 158492 - DNA, 3016 bp, Artificial Sequence
  derived and/or modified sequence
ccgtggagcgcggtgcgagtccaacaccgagcattcccgtgggcctgcagttggcaggagggtcccgggcccagagccagcggggccgtgctgagacggcgtacgtgccctgcgtgagtgcgtggcggcggcgcgtgcgctaggggagtgggcggtgaggcctggtccacgtgcgtcccttcccgggacccccgcagcttggcgcccagcggctacgtgagccaaggcacccggatgtccgcgcccctctccgagtgaccagtcccggcctccggtcccgcagtgcccgcagcctcggccggcgtccacgcattgccatggtgactgtgggcaactactgcgaggccgaagggcccgtgggtccggcctggatgcaggatggcctgagtccctgcttcttcttcacgctcgtgccctcgacgcggatggctctggggactctggccttggtgctggctcttccctgcagacgccgggagcggcccgctggtgctgattcgctgtcttggggggccggccctcgcatctctccctacgtgctgcagctgcttctggccacacttcaggcggcgctgcccctggccggcctggctggccgggtgggcactgcccggggggccccactgccaagctatctacttctggcctccgtgctggagagtctggccggcgcctgtggcctgtggctgcttgtcgtggagcggagccaggcacggcagcgtctggcaatgggcatctggatcaagttcaggcacagccctggtctcctgctcctctggactgtggcgtttgcagctgagaacttggccctggtgtcttggaacagcccacagtggtggtgggcaagggcagacttgggccagcaggttcagtttagcctgtgggtgctgcggtatgtggtctctggagggctgtttgtcctgggtctctgggcccctggacttcgtccccagtcctatacattgcaggttcatgaagaggaccaagatgtggaaaggagccaggttcggtcagcagcccaacagtctacctggcgagattttggcaggaagctccgcctcctgagtggctacctgtggcctcgagggagtccagctctgcagctggtggtgctcatctgcctggggctcatgggtttggaacgggcactcaatgtgttggtgcctatattctataggaacattgtgaacttgctgactgagaaggcaccttggaactctctggcctggactgttaccagttacgtcttcctcaagttcctccaggggggtggcactggcagtacaggcttcgtgagcaacctgcgcaccttcctgtggatccgggtgcagcagttcacgtctcggcgggtggagctgctcatcttctcccacctgcacgagctctcactgcgctggcacctggggcgccgcacaggggaggtgctgcggatcgcggatcggggcacatccagtgtcacagggctgctcagctacctggtgttcaatgtcatccccacgctggccgacatcatcattggcatcatctacttcagcatgttcttcaacgcctggtttggcctcattgtgttcctgtgcatgagtctttacctcaccctgaccattgtggtcactgagtggagaaccaagtttcgtcgtgctatgaacacacaggagaacgctacccgggcacgagcagtggactctctgctaaacttcgagacggtgaagtattacaacgccgagagttacgaagtggaacgctatcgagaggccatcatcaaatatcagggtttggagtggaagtcgagcgcttcactggttttactaaatcagacccagaacctggtgattgggctcgggctcctcgccggctccctgctttgcgcatactttgtcactgagcagaagctacaggttggggactatgtgctctttggcacctacattatccagctgtacatgcccctcaattggtttggcacctactacaggatgatccagaccaacttcattgacatggagaacatgtttgacttgctgaaagaggagacagaagtgaaggaccttcctggagcagggccccttcgctttcagaagggccgtattgagtttgagaacgtgcacttcagctatgccgatgggcgggagactctgcaggacgtgtctttcactgtgatgcctggacagacacttgccctggtgggcccatctggggcagggaagagcacaattttgcgcctgctgtttcgcttctacgacatcagctctggctgcatccgaatagatgggcaggacatttcacaggtgacccaggcctctctccggtctcacattggagttgtgccccaagacactgtcctctttaatgacaccatcgccgacaatatccgttacggccgtgtcacagctgggaatgatgaggtggaggctgctgctcaggctgcaggcatccatgatgccattatggctttccctgaagggtacaggacacaggtgggcgagcggggactgaagctgagcggcggggagaagcagcgcgtcgccattgcccgcaccatcctcaaggctccgggcatcattctgctggatgaggcaacgtcagcgctggatacatctaatgagagggccatccaggcttctctggccaaagtctgtgccaaccgcaccaccatcgtagtggcacacaggctctcaactgtggtcaatgctgaccagatcctcgtcatcaaggatggctgcatcgtggagaggggacgacacgaggctctgttgtcccgaggtggggtgtatgctgacatgtggcagctgcagcagggacaggaagaaacctctgaagacactaagcctcagaccatggaacggtgacaaaagtttggccacttccctctcaaagactaacccagaagggaataagatgtgtctcctttccctggcttatttcatcctggtcttggggtatggtgctagctatggtaagggaaagggacctttccgaaaaacatcttttggggaaataaaaatgtggactgtgcgag

SEQ ID NO: 158493 - DNA, 1258 bp, Artificial Sequence
  derived and/or modified sequence
attcccgtgggcctgcagttggcaggagggtcccgggcccagagccagcggggccgtgctgagacggcgtacgtgccctgcgtgagtgcgtggcggcggcgcgtgcgctaggggagtgggcggtgaggcctggtccacgtgcgtcccttcccgggacccccgcagcttggcgcccagcggctacgtgagccaaggcacccggatgtccgcgcccctctccgagtgaccagtcccggcctccggtcccgcagtgcccgcagcctcggccggcgtccacgcattgccatggtgactgtgggcaactactgcgaggccgaagggcccgtgggtccggcctggatgcaggatggcctgagtccctgcttcttcttcacgctcgtgccctcgacgcggatggctctggggactctggccttggtgctggctcttccctgcagacgccgggagcggcccgctggtgctgattcgctgtcttggggggccggccctcgcatctctccctacgcactgcccggggggccccactgccaagctatctacttctggcctccgtgctggagagtctggccggcgcctgtggcctgtggctgcttgtcgtggagcggagccaggcacggcagcgtctggcaatgggcatctggatcaagttcaggcacagccctggtctcctgctcctctggactgtggcgtttgcagctgagaacttggccctggtgtcttggaacagcccacagtggtggtgggcaagggcagacttgggccagcaggttcagtttagcctgtgggtgctgcggtatgtggtctctggagggctgtttgtcctgggtctctgggcccctggacttcgtccccagtcctatacattgcaggttcatgaagaggaccaagatgtggaaaggagccagtgaacttgctgactgagaaggcaccttggaactctctggcctggactgttaccagttacgtcttcctcaagttcctccaggggggtggcactggcagtacagctacctggtgttcaatgtcatccccacgctggccgacatcatcattggcatcatctacttcagcatgttcttcaacgcctggtttggcctcattgtgttcctgtgcatgagtctttacctcaccctgaccattgtggtcactgagtggagaaccaagtttcgtcgtgctatgaacacacaggagaacgctacccgggcacgagcagtggactctctgctaaacttcgagacggtgaagtattacaacgccg

SEQ ID NO: 158494 - DNA, 2834 bp, Artificial Sequence
  derived and/or modified sequence
gggcctgcagttggcaggagggtcccgggcccagagccagcggggccgtgctgagacggcgtacgtgccctgcgtgagtgcgtggcggcggcgcgtgcgctaggggagtgggcggtgaggcctggtccacgtgcgtcccttcccgggacccccgcagcttggcgcccagcggctacgtgagccaaggcacccggatgtccgcgcccctctccgagtgaccagtcccggcctccggtcccgcagtgcccgcagcctcggccggcgtccacgcattgccatggtgactgtgggcaactactgcgaggccgaagggcccgtgggtccggcctggatgcaggatggcctgagtccctgcttcttcttcacgctcgtgccctcgacgcggatggctctggggactctggccttggtgctggctcttccctgcagacgccgggagcggcccgctggtgctgattcgctgtcttggggggccggccctcgcatctctccctacgtgctgcagctgcttctggccacacttcaggcggcgctgcccctggccggcctggctggccgggtgggcactgcccggggggccccactgccaagctatctacttctggcctccgtgctggagagtctggccggcgcctgtggcctgtggctgcttgtcgtggagcggagccaggcacggcagcgtctggcaatgggcatctggatcaagttcaggcacagccctggtctcctgctcctctggactgtggcgtttgcagctgagaacttggccctggtgtcttggaacagcccacagtggtggtgggcaagggcagacttgggccagcaggttcggtcagcagcccaacagtctacctggcgagattttggcaggaagctccgcctcctgagtggctacctgtggcctcgagggagtccagctctgcagctggtggtgctcatctgcctggggctcatgggtttggaacgggcactcaatgtgttggtgcctatattctataggaacattgtgaacttgctgactgagaaggcaccttggaactctctggcctggactgttaccagttacgtcttcctcaagttcctccaggggggtggcactggcagtacaggcttcgtgagcaacctgcgcaccttcctgtggatccgggtgcagcagttcacgtctcggcgggtggagctgctcatcttctcccacctgcacgagctctcactgcgctggcacctggggcgccgcacaggggaggtgctgcggatcgcggatcggggcacatccagtgtcacagggctgctcagctacctggtgttcaatgtcatccccacgctggccgacatcatcattggcatcatctacttcagcatgttcttcaacgcctggtttggcctcattgtgttcctgtgcatgagtctttacctcaccctgaccattgtggtcactgagtggagaaccaagtttcgtcgtgctatgaacacacaggagaacgctacccgggcacgagcagtggactctctgctaaacttcgagacggtgaagtattacaacgccgagagttacgaagtggaacgctatcgagaggccatcatcaaatatcagggtttggagtggaagtcgagcgcttcactggttttactaaatcagacccagaacctggtgattgggctcgggctcctcgccggctccctgctttgcgcatactttgtcactgagcagaagctacaggttggggactatgtgctctttggcacctacattatccagctgtacatgcccctcaattggtttggcacctactacaggatgatccagaccaacttcattgacatggagaacatgtttgacttgctgaaagaggagacagaagtgaaggaccttcctggagcagggccccttcgctttcagaagggccgtattgagtttgagaacgtgcacttcagctatgccgatgggcgggagactctgcaggacgtgtctttcactgtgatgcctggacagacacttgccctggtgggcccatctggggcagggaagagcacaattttgcgcctgctgtttcgcttctacgacatcagctctggctgcatccgaatagatgggcaggacatttcacaggtgacccaggcctctctccggtctcacattggagttgtgccccaagacactgtcctctttaatgacaccatcgccgacaatatccgttacggccgtgtcacagctgggaatgatgaggtggaggctgctgctcaggctgcaggcatccatgatgccattatggctttccctgaagggtacaggacacaggtgggcgagcggggactgaagctgagcggcggggagaagcagcgcgtcgccattgcccgcaccatcctcaaggctccgggcatcattctgctggatgaggcaacgtcagcgctggatacatctaatgagagggccatccaggcttctctggccaaagtctgtgccaaccgcaccaccatcgtagtggcacacaggctctcaactgtggtcaatgctgaccagatcctcgtcatcaaggatggctgcatcgtggagaggggacgacacgaggctctgttgtcccgaggtggggtgtatgctgacatgtggcagctgcagcagggacaggaagaaacctctgaagacactaagcctcagaccatggaacggtgacaaaagtttggccacttccctctcaaagactaacccagaagggaataagatgtgtctcctttccctggcttatttcatcctggtcttggggtatggtgctagctatggtaagggaaagggacctttccgaaaaacatcttttggggaaataaaaatgtggactgtg

SEQ ID NO: 158495 - DNA, 2529 bp, Artificial Sequence
  derived and/or modified sequence
atggtgaccgtgggcaactactgcgaggccgagggccccgtgggccccgcctggatgcaggacggcctgagcccctgcttcttcttcaccctggtgcccagcaccagaatggccctgggcaccctggccctggtgctggccctgccctgcagaagaagagagagacccgccggcgccgacagcctgagctggggcgccggccccagaatcagcccctacgtgctgcagctgctgctggccaccctgcaggccgccctgcccctggccggcctggccggcagagtgggcaccgccagaggcgcccccctgcccagctacctgctgctggccagcgtgctggagagcctggccggcgcctgcggcctgtggctgctggtggtggagagaagccaggccagacagagactggccatgggcatctggatcaagttcagacacagccccggcctgctgctgctgtggaccgtggccttcgccgccgagaacctggccctggtgagctggaacagcccccagtggtggtgggccagagccgacctgggccagcaggtgcagttcagcctgtgggtgctgagatacgtggtgagcggcggcctgttcgtgctgggcctgtgggcccccggcctgagaccccagagctacaccctgcaggtgcacgaggaggaccaggacgtggagagaagccaggtgagaagcgccgcccagcagagcacctggagagacttcggcagaaagctgagactgctgagcggctacctgtggcccagaggcagccccgccctgcagctggtggtgctgatctgcctgggcctgatgggcctggagagagccctgaacgtgctggtgcccatcttctacagaaacatcgtgaacctgctgaccgagaaggccccctggaacagcctggcctggaccgtgaccagctacgtgttcctgaagttcctgcagggcggcggcaccggcagcaccggcttcgtgagcaacctgagaaccttcctgtggatcagagtgcagcagttcaccagcagaagagtggagctgctgatcttcagccacctgcacgagctgagcctgagatggcacctgggcagaagaaccggcgaggtgctgagaatcgccgacagaggcaccagcagcgtgaccggcctgctgagctacctggtgttcaacgtgatccccaccctggccgacatcatcatcggcatcatctacttcagcatgttcttcaacgcctggttcggcctgatcgtgttcctgtgcatgagcctgtacctgaccctgaccatcgtggtgaccgagtggagaaccaagttcagaagagccatgaacacccaggagaacgccaccagagccagagccgtggacagcctgctgaacttcgagaccgtgaagtactacaacgccgagagctacgaggtggagagatacagagaggccatcatcaagtaccagggcctggagtggaagagcagcgccagcctggtgctgctgaaccagacccagaacctggtgatcggcctgggcctgctggccggcagcctgctgtgcgcctacttcgtgaccgagcagaagctgcaggtgggcgactacgtgctgttcggcacctacatcatccagctgtacatgcccctgaactggttcggcacctactacagaatgatccagaccaacttcatcgacatggagaacatgttcgacctgctgaaggaggagaccgaggtgaaggacctgcccggcgccggccccctgagattccagaagggcagaatcgagttcgagaacgtgcacttcagctacgccgacggcagagagaccctgcaggacgtgagcttcaccgtgatgcccggccagaccctggccctggtgggccccagcggcgccggcaagagcaccatcctgagactgctgttcagattctacgacatcagcagcggctgcatcagaatcgacggccaggacatcagccaggtgacccaggccagcctgagaagccacatcggcgtggtgccccaggacaccgtgctgttcaacgacaccatcgccgacaacatcagatacggcagagtgaccgccggcaacgacgaggtggaggccgccgcccaggccgccggcatccacgacgccatcatggccttccccgagggctacagaacccaggtgggcgagagaggcctgaagctgagcggcggcgagaagcagagagtggccatcgccagaaccatcctgaaggcccccggcatcatcctgctggacgaggccaccagcgccctggacaccagcaacgagagagccatccaggccagcctggccaaggtgtgcgccaacagaaccaccatcgtggtggcccacagactgagcaccgtggtgaacgccgaccagatcctggtgatcaaggacggctgcatcgtggagagaggcagacacgaggccctgctgagcagaggcggcgtgtacgccgacatgtggcagctgcagcagggccaggaggagaccagcgaggacaccaagccccagaccatggagagatag

SEQ ID NO: 158496 - DNA, 636 bp, Artificial Sequence
  derived and/or modified sequence
atggtgaccgtgggcaactactgcgaggccgagggccccgtgggccccgcctggatgcaggacggcctgagcccctgcttcttcttcaccctggtgcccagcaccagaatggccctgggcaccctggccctggtgctggccctgccctgcagaagaagagagagacccgccggcgccgacagcctgagctggggcgccggccccagaatcagcccctacgccctgcccggcggcccccactgccaggccatctacttctggcccccctgctggagagtgtggcccgcccccgtggcctgcggctgcctgagctggagcggcgccagacacggcagcgtgtggcagtgggccagcggcagcagcagcggcaccgccctggtgagctgcagcagcggcctgtggagactgcagctgagaacctggccctggtgcctgggcaccgcccacagcggcggcggccagggccagacctgggccagcagattcagcctggcctgcggctgctgcggcatgtggagcctggagggctgcctgagctgggtgagcggccccctggacttcgtgcccagccccatccactgcagattcatgaagagaaccaagatgtggaagggcgccagcgagctggccgactag

SEQ ID NO: 158497 - DNA, 2391 bp, Artificial Sequence
  derived and/or modified sequence
atggtgaccgtgggcaactactgcgaggccgagggccccgtgggccccgcctggatgcaggacggcctgagcccctgcttcttcttcaccctggtgcccagcaccagaatggccctgggcaccctggccctggtgctggccctgccctgcagaagaagagagagacccgccggcgccgacagcctgagctggggcgccggccccagaatcagcccctacgtgctgcagctgctgctggccaccctgcaggccgccctgcccctggccggcctggccggcagagtgggcaccgccagaggcgcccccctgcccagctacctgctgctggccagcgtgctggagagcctggccggcgcctgcggcctgtggctgctggtggtggagagaagccaggccagacagagactggccatgggcatctggatcaagttcagacacagccccggcctgctgctgctgtggaccgtggccttcgccgccgagaacctggccctggtgagctggaacagcccccagtggtggtgggccagagccgacctgggccagcaggtgagaagcgccgcccagcagagcacctggagagacttcggcagaaagctgagactgctgagcggctacctgtggcccagaggcagccccgccctgcagctggtggtgctgatctgcctgggcctgatgggcctggagagagccctgaacgtgctggtgcccatcttctacagaaacatcgtgaacctgctgaccgagaaggccccctggaacagcctggcctggaccgtgaccagctacgtgttcctgaagttcctgcagggcggcggcaccggcagcaccggcttcgtgagcaacctgagaaccttcctgtggatcagagtgcagcagttcaccagcagaagagtggagctgctgatcttcagccacctgcacgagctgagcctgagatggcacctgggcagaagaaccggcgaggtgctgagaatcgccgacagaggcaccagcagcgtgaccggcctgctgagctacctggtgttcaacgtgatccccaccctggccgacatcatcatcggcatcatctacttcagcatgttcttcaacgcctggttcggcctgatcgtgttcctgtgcatgagcctgtacctgaccctgaccatcgtggtgaccgagtggagaaccaagttcagaagagccatgaacacccaggagaacgccaccagagccagagccgtggacagcctgctgaacttcgagaccgtgaagtactacaacgccgagagctacgaggtggagagatacagagaggccatcatcaagtaccagggcctggagtggaagagcagcgccagcctggtgctgctgaaccagacccagaacctggtgatcggcctgggcctgctggccggcagcctgctgtgcgcctacttcgtgaccgagcagaagctgcaggtgggcgactacgtgctgttcggcacctacatcatccagctgtacatgcccctgaactggttcggcacctactacagaatgatccagaccaacttcatcgacatggagaacatgttcgacctgctgaaggaggagaccgaggtgaaggacctgcccggcgccggccccctgagattccagaagggcagaatcgagttcgagaacgtgcacttcagctacgccgacggcagagagaccctgcaggacgtgagcttcaccgtgatgcccggccagaccctggccctggtgggccccagcggcgccggcaagagcaccatcctgagactgctgttcagattctacgacatcagcagcggctgcatcagaatcgacggccaggacatcagccaggtgacccaggccagcctgagaagccacatcggcgtggtgccccaggacaccgtgctgttcaacgacaccatcgccgacaacatcagatacggcagagtgaccgccggcaacgacgaggtggaggccgccgcccaggccgccggcatccacgacgccatcatggccttccccgagggctacagaacccaggtgggcgagagaggcctgaagctgagcggcggcgagaagcagagagtggccatcgccagaaccatcctgaaggcccccggcatcatcctgctggacgaggccaccagcgccctggacaccagcaacgagagagccatccaggccagcctggccaaggtgtgcgccaacagaaccaccatcgtggtggcccacagactgagcaccgtggtgaacgccgaccagatcctggtgatcaaggacggctgcatcgtggagagaggcagacacgaggccctgctgagcagaggcggcgtgtacgccgacatgtggcagctgcagcagggccaggaggagaccagcgaggacaccaagccccagaccatggagagatag

SEQ ID NO: 158498 - protein, 575 aa, Artificial Sequence
  derived and/or modified sequence
MEALIPVINKLQDVFNTVGADIIQLPQIVVVGTQSSGKSSVLESLVGRDLLPRGTGIVTRRPLILQLVHVSQEDKRKTTGEENGVEAEEWGKFLHTKNKLYTDFDEIRQEIENETERISGNNKGVSPEPIHLKIFSPNVVNLTLVDLPGMTKVPVGDQPKDIELQIRELILRFISNPNSIILAVTAANTDMATSEALKISREVDPDGRRTLAVITKLDLMDAGTDAMDVLMGRVIPVKLGIIGVVNRSQLDINNKKSVTDSIRDEYAFLQKKYPSLANRNGTKYLARTLNRLLMHHIRDCLPELKTRINVLAAQYQSLLNSYGEPVDDKSATLLQLITKFATEYCNTIEGTAKYIETSELCGGARICYIFHETFGRTLESVDPLGGLNTIDILTAIRNATGPRPALFVPEVSFELLVKRQIKRLEEPSLRCVELVHEEMQRIIQHCSNYSTQELLRFPKLHDAIVEVVTCLLRKRLPVTNEMVHNLVAIELAYINTKHPDFADACGLMNNNIEEQRRNRLARELPSAVSRDKVASGGGGVGDGVQEPTTGNWRGMLKTSKAEELLAEKKKKKKKK

SEQ ID NO: 158499 - protein, 699 aa, Artificial Sequence
  derived and/or modified sequence
MEALIPVINKLQDVFNTVGADIIQLPQIVVVGTQSSGKSSVLESLVGRDLLPRGTGIVTRRPLILQLVHVSQEDKRKTTGEENGVEAEEWGKFLHTKNKLYTDFDEIRQEIENETERISGNNKGVSPEPIHLKIFSPNVVNLTLVDLPGMTKVPVGDQPKDIELQIRELILRFISNPNSIILAVTAANTDMATSEALKISREVDPDGRRTLAVITKLDLMDAGTDAMDVLMGRVIPVKLGIIGVVNRSQLDINNKKSVTDSIRDEYAFLQKKYPSLANRNGTKYLARTLNRLLMHHIRDCLPELKTRINVLAAQYQSLLNSYGEPVDDKSATLLQLITKFATEYCNTIEGTAKYIETSELCGGARICYIFHETFGRTLESVDPLGGLNTIDILTAIRNATGPRPALFVPEVSFELLVKRQIKRLEEPSLRCVELVHEEMQRIIQHCSNYSTQELLRFPKLHDAIVEVVTCLLRKRLPVTNEMVHNLVAIELAYINTKHPDFADACGLMNNNIEEQRRNRLARELPSAVSRDKVASGGGGVGDGVQEPTTGNWRGMLKTSKAEELLAEEKSKPIPIMPASPQKGHAVNLLDVPVPVARKLSAREQRDCEVIERLIKSYFLIVRKNIQDSVPKAVMHFLVNHVKDTLQSELVGQLYKSSLLDDLLTESEDMAQRRKEAADMLKALQGASQIIAEIRETHLW

SEQ ID NO: 158500 - DNA, 1728 bp, Artificial Sequence
  derived and/or modified sequence
atggaggctctgattcccgtgatcaacaagctgcaggacgtattcaacaccgtgggggcggatattatacagctgcctcagatcgtggtggtcgggactcagtcttctggtaaatctagtgtgctagagtcacttgtgggcagagatctgctcccccgtgggactgggatcgtgactcgccgcccactgattctccaactagtccacgtctcccaggaagacaagcgcaaaactactggcgaggagaacggggtggaggctgaggaatggggcaagttcctgcacaccaaaaacaaattgtatactgactttgacgaaattcgccaggagatagaaaatgagactgagaggatctccggaaacaataaaggagtgtcaccggagccgattcatttgaagattttcagtcccaatgtggtcaatctgactctggtcgatctacccggcatgaccaaagtgccagtcggcgatcagccaaaggatatcgagttgcagatccgggagcttatcttgcggttcattagtaatccgaattccatcattctagccgttaccgctgcaaacaccgatatggctacctcagaagccctgaagatttcacgcgaggttgacccagatggtcggcggacactggctgtcatcactaaactcgacttaatggatgctggcacagatgctatggatgtgttgatgggcagggtgattccagtgaagcttggaattattggcgtggtcaacaggtcccaactggacatcaataataagaagtccgtgaccgactctatccgagatgaatatgctttcttgcagaaaaaatatccctccctagcaaaccggaacgggacaaagtacctggccagaacccttaatcgcttactcatgcatcacataagagactgtttgccagaactgaagacgcgcatcaatgttctcgctgcgcaatatcagtctctgctgaactcatatggagagccagttgacgacaagtctgccacactgctgcaactcatcactaaattcgccactgagtactgcaacactattgagggtacagccaagtacatcgagacatctgaactgtgcggcggcgctcggatttgctatatctttcacgagacatttggacggacactcgagtctgtcgatcccttaggggggcttaacacgatcgacatccttacagcaattcgtaatgcgactggcccacgccccgccctctttgtgcctgaagtgagcttcgagcttctggtgaaacgccagatcaaaagactggaagaacccagcctacggtgtgtggaactggtgcatgaggagatgcagcgtattatccagcattgcagcaattacagtacacaggagttgttgcgctttccgaagttgcatgacgctattgtggaagtggtgacttgtctcctaagaaagcgcctgcccgtcacaaacgaaatggttcataacttagtggctatagagctcgcctatatcaataccaagcatcccgactttgcggatgcctgcggacttatgaacaataatatagaggaacaaaggcgcaacaggctggcgcgggagctacccagcgccgttagccgtgataaagttgcgtcgggaggcggtggcgtgggcgacggggtacaggagccaaccaccggcaactggagaggtatgcttaagacctccaaggccgaagagttgttggccgagaaaaagaagaagaagaagaagaagtag

SEQ ID NO: 158501 - DNA, 2100 bp, Artificial Sequence
  derived and/or modified sequence
atggaagccctcatcccagtaattaataagctgcaagacgtgtttaataccgtgggtgccgatattatccagcttccccagatcgttgtcgtcggaacccaaagctcaggcaagtccagcgtcctggagtctctcgttggaagagacttattacccagaggcaccggcattgtcacccggcgaccattaattctccaactggtgcatgtgtcacaggaggacaagcgaaaaacgaccggtgaagaaaatggagtagaggcagaagagtggggcaagtttttgcacacaaaaaataaactctataccgattttgacgaaatccggcaggaaatcgaaaatgagacagaaagaataagtggtaataacaagggtgtgtctcctgagcccattcacctgaaaattttctcgccaaatgttgtgaacctgactctggtagacctccccggcatgacaaaggtacccgtgggagatcaaccaaaagatattgagcttcagataagggagcttattctgagatttatatctaatccaaacagtattatcctggctgtcactgctgctaataccgacatggcaactagtgaggcgctgaagatttctcgggaggtcgacccagatgggagacgtaccctggctgttatcacgaaacttgacctgatggatgccggaactgacgcaatggacgtgcttatggggcgggtgattcccgtgaagctgggaatcatcggcgtggtgaatcgatcccagctggacatcaataataagaagtcagtgacagactcgattcgggacgagtatgccttccttcagaagaagtacccttctctggccaataggaatggcaccaagtaccttgccagaaccctgaacagattactcatgcaccatattcgtgattgtctgccggagctcaagaccagaatcaacgtcctagcagcccagtaccaatctctcctgaattcgtacggcgaacccgtcgacgacaagagcgcgacactcctgcagctaatcaccaagtttgcaacagaatattgtaacaccattgaaggaacagcaaagtatattgagacttctgagctgtgtggaggcgctaggatctgctacatctttcacgaaacctttggaagaactttagaaagtgtggatcctctgggggggctgaacacaattgacatcctaacagctatccgaaatgcaaccgggccaaggcctgcactgttcgtgcctgaagtgtccttcgaactgttagtgaaaagacaaattaaacgtctcgaagagcccagtttacgatgcgtggaattagtccatgaggagatgcagaggataattcaacactgcagtaactatagtacccaggaattacttcgattccccaaactccatgatgctattgtagaggtggttacttgtttgctgcgtaaaagacttccagtcactaacgaaatggtgcacaacctcgtggcgatcgaactcgcatacatcaataccaagcatcccgactttgctgacgcgtgcgggctgatgaataataatatagaggagcaacgtcggaatcgccttgctcgtgagttgccaagcgcggttagccgtgacaaggtggcctctggaggtggtggtgtgggtgatggggtccaagagcctaccactggtaactggagagggatgttgaaaacttccaaagcagaagaactcttggcagaagaaaagtctaagcccattcctatcatgcctgcttcaccacagaaaggccatgccgtgaacttacttgacgtacccgtgcccgtagcaagaaagctgtcggcaagggaacagcgagactgcgaggtgatagagcgcctgataaaatcatacttcctcattgtgagaaaaaatatccaggattccgtcccaaaagctgtgatgcacttccttgtgaaccacgtcaaggacacccttcaatctgagcttgtgggccaattatataaaagcagtcttctcgatgacctactcactgaaagtgaggatatggcacagcggcggaaagaggcagctgatatgttgaaggcactacagggagcctctcagatcatagcagaaattagggagacacatctgtggtag

SEQ ID NO: 158502 - DNA, 1728 bp, Artificial Sequence
  derived and/or modified sequence
atggaggccctgatccctgtgatcaacaagctgcaggatgtgttcaacacagtgggcgctgacatcatccagctgccccagatcgtggtggtgggcacccagagcagcggcaagagctctgtgctggagagcctggtgggccgggacctgctgccccggggcactggaattgtgacccggcggcccctcatcctgcagctggtgcacgtgtcccaggaggacaagaggaagaccactggagaggagaatggagtggaggccgaggagtggggcaagttcctgcacaccaagaacaagctgtacacagactttgatgagatccggcaggagattgaaaatgaaacagagcgcatcagcggcaacaacaagggcgtgtccccagagcccatccacctgaagatcttcagccccaacgtggtgaacctgaccctggtggacctgcccggcatgaccaaggtgcctgtgggggaccagcccaaggacatcgagctgcagatccgggagctgatcctgcgcttcatcagcaaccccaacagcatcatcctggccgtgacagctgccaacacagacatggccaccagcgaggccctgaagatcagccgggaggtggaccctgatggccgccgcaccctggccgtcatcaccaagctggacctgatggatgctggaacagatgccatggatgtgctgatgggccgggtcatccctgtgaagctgggcatcatcggcgtggtgaacagaagccagctggacatcaacaacaagaagtctgtgacagacagcatcagagatgaatatgccttcctgcagaagaagtaccccagcctggccaacagaaatggcaccaagtacctggcccggaccctgaaccggctgctgatgcaccacatccgggactgcctgcctgagctgaagacccgcatcaacgtgctggccgcccagtaccagagcctgctgaacagctatggagagcctgtggatgacaagagcgccaccctgctgcagctgatcaccaagtttgccacagagtactgcaacaccatcgagggcacagccaagtacatcgagaccagcgagctgtgtggcggggcccgcatctgctacatcttccacgagaccttcggccgcaccctggagagcgtggaccccctgggcggcctgaacaccatcgacatcctgacagccatcagaaatgccaccggccccaggcctgccctgtttgtgcctgaggtgtcctttgagctgctggtgaagaggcagatcaagaggctggaggagcccagcctgcgctgtgtggagctggtgcatgaggagatgcagaggatcatccagcactgcagcaactacagcacccaggagctgctgcgcttccccaagctgcatgatgccatcgtggaggtggtgacctgcctgctgaggaagaggctgcctgtgaccaatgagatggtgcacaacctggtggccatcgagctggcctacatcaacaccaagcacccagactttgctgatgcctgtggcctgatgaacaacaacatcgaggagcagaggaggaaccggctggcccgggagctgcccagcgctgtgtcccgggacaaggtggccagcggcggcggcggcgtgggagatggagtgcaggagcccaccactggaaactggaggggcatgctgaagaccagcaaggccgaggagctgctggccgagaagaagaagaagaagaagaagaagtag

SEQ ID NO: 158503 - DNA, 2100 bp, Artificial Sequence
  derived and/or modified sequence
atggaggccctgatccctgtgatcaacaagctgcaggatgtgttcaacacagtgggcgctgacatcatccagctgccccagatcgtggtggtgggcacccagagcagcggcaagagctctgtgctggagagcctggtgggccgggacctgctgccccggggcactggaattgtgacccggcggcccctcatcctgcagctggtgcacgtgtcccaggaggacaagaggaagaccactggagaggagaatggagtggaggccgaggagtggggcaagttcctgcacaccaagaacaagctgtacacagactttgatgagatccggcaggagattgaaaatgaaacagagcgcatcagcggcaacaacaagggcgtgtccccagagcccatccacctgaagatcttcagccccaacgtggtgaacctgaccctggtggacctgcccggcatgaccaaggtgcctgtgggggaccagcccaaggacatcgagctgcagatccgggagctgatcctgcgcttcatcagcaaccccaacagcatcatcctggccgtgacagctgccaacacagacatggccaccagcgaggccctgaagatcagccgggaggtggaccctgatggccgccgcaccctggccgtcatcaccaagctggacctgatggatgctggaacagatgccatggatgtgctgatgggccgggtcatccctgtgaagctgggcatcatcggcgtggtgaacagaagccagctggacatcaacaacaagaagtctgtgacagacagcatcagagatgaatatgccttcctgcagaagaagtaccccagcctggccaacagaaatggcaccaagtacctggcccggaccctgaaccggctgctgatgcaccacatccgggactgcctgcctgagctgaagacccgcatcaacgtgctggccgcccagtaccagagcctgctgaacagctatggagagcctgtggatgacaagagcgccaccctgctgcagctgatcaccaagtttgccacagagtactgcaacaccatcgagggcacagccaagtacatcgagaccagcgagctgtgtggcggggcccgcatctgctacatcttccacgagaccttcggccgcaccctggagagcgtggaccccctgggcggcctgaacaccatcgacatcctgacagccatcagaaatgccaccggccccaggcctgccctgtttgtgcctgaggtgtcctttgagctgctggtgaagaggcagatcaagaggctggaggagcccagcctgcgctgtgtggagctggtgcatgaggagatgcagaggatcatccagcactgcagcaactacagcacccaggagctgctgcgcttccccaagctgcatgatgccatcgtggaggtggtgacctgcctgctgaggaagaggctgcctgtgaccaatgagatggtgcacaacctggtggccatcgagctggcctacatcaacaccaagcacccagactttgctgatgcctgtggcctgatgaacaacaacatcgaggagcagaggaggaaccggctggcccgggagctgcccagcgctgtgtcccgggacaaggtggccagcggcggcggcggcgtgggagatggagtgcaggagcccaccactggaaactggaggggcatgctgaagaccagcaaggccgaggagctgctggccgaggagaagagcaagcccatccccatcatgcctgccagcccccagaagggccatgctgtgaacctgctggatgtgcctgtgcctgtggccaggaagctgagcgcccgggagcagagggactgtgaggtgattgaaagactcatcaagagctacttcctgattgtgaggaagaacatccaggacagcgtgcccaaggctgtgatgcacttcctggtgaaccacgtgaaggacaccctgcagagcgagctggtgggccagctgtacaagagcagcctgctggatgacctgctgacagaaagtgaggacatggcccagaggaggaaggaggccgctgacatgctgaaggccctgcagggcgccagccagatcatcgccgagatccgggagacccacctgtggtag

SEQ ID NO: 158504 - DNA, 1728 bp, Artificial Sequence
  derived and/or modified sequence
atggaggccctgatccccgtgatcaacaagctgcaggacgtgttcaacaccgtgggagccgatataatccagctgcctcagatcgtggttgtcggcacccagtccagcgggaagtccagtgtactcgagagcctggttggccgggacttattgccgcgcggcactggcattgtcacacgacgcccactgatcctccagttggtccacgtgagccaggaggataaacgcaaaacaacaggagaggaaaatggtgtcgaggccgaagaatggggcaaatttctgcatactaaaaacaagctttacaccgactttgatgagatacggcaggaaattgaaaatgagaccgaacgcatttcaggaaacaataagggggtgtcccccgaacccatccaccttaagatcttctcaccaaatgtggtaaacctcacgctcgtcgacctaccaggaatgactaaagtgcctgtgggtgatcagcccaaggacatagagctacagatacgggaattgattttacggttcatcagtaatcctaactctataatacttgccgtaaccgccgccaacaccgatatggccacctctgaggctctgaagattagtcgggaggtcgaccccgacggccgacgcaccctggcagtgattactaagttagatctcatggatgcagggaccgacgccatggacgtactgatgggccgcgtgatccccgtgaaactgggaattatcggcgtggtcaacagatctcaactggacatcaataacaagaaaagcgttacggattccattagagacgagtacgccttcctccagaaaaagtaccccagcctggccaaccggaacggaactaaatacctggcccgaaccctgaacaggttgttgatgcaccatatacgcgactgcctaccagagttaaaaacccggatcaacgttttggcagcacaataccagtctttgctgaattcctatggggagcccgtcgatgataaaagtgccacccttctgcaactcattacaaaattcgcaaccgaatattgtaatactatcgaaggtactgctaagtatatagagacatctgaactgtgtggaggcgcgagaatttgctacattttccacgagacatttggccggaccctggaatccgttgacccactggggggccttaacacaatcgacattttaactgctattagaaatgccactggcccacgccccgccttatttgtgccagaggttagttttgaattgcttgttaagagacagataaaacggctggaagaaccttcactcagatgcgtagagctggtccacgaggaaatgcagcggattatccagcattgtagtaattatagcacacaggagcttctgaggtttccaaagcttcacgatgccatagtcgaggtagttacttgcctgctccgtaaacgtctcccagtcaccaacgaaatggtccataacctcgttgccattgagctggcttatattaataccaagcacccagatttcgccgacgcatgtggactgatgaataacaatatcgaagaacagcggcgtaataggctggctagagaactaccaagtgcagtctccagagataaagtagcctctggtgggggcggggttggcgatggcgtacaggagcctacaaccggaaactggcggggaatgctgaagaccagcaaagccgaggaactcctggccgagaagaaaaagaagaaaaaaaaaaaatag

SEQ ID NO: 158505 - DNA, 2100 bp, Artificial Sequence
  derived and/or modified sequence
atggaggccctgatccccgtgatcaacaagctgcaggacgtgttcaatacagtgggtgcagatattattcaactcccacagattgtggtggttgggactcagagctccggaaaatcctctgtgctggagtcactagtggggagggacttgttgccacgtggcacaggtatcgtgactaggcgacctttgattttacagctggtccacgtgagtcaggaggataaacgcaaaacgacaggagaggaaaacggtgtggaggccgaggagtggggcaagtttctccatacgaagaacaagctttacaccgattttgacgaaatacgacaggagattgaaaatgagactgaaaggatctccggaaataataagggggtgtcccccgaacctatccacttgaaaatcttctccccaaacgtggtgaatttaacattggtggatctgccgggaatgaccaaagtgcccgttggagaccaacccaaggacatcgaactgcaaattcgcgaactgatcttgcggtttatcagcaatcccaattctataatcctcgccgtcactgccgccaacacagacatggccacatctgaggcacttaagatcagcagggaggtcgaccccgatggacgccgaaccctggcggtaattacaaaattggatctcatggacgcgggcactgacgccatggacgtgctcatgggccgagtgattcccgttaaactaggcatcattggcgttgttaacagatctcagctcgatattaataataaaaagagcgttactgactccatccgagacgagtacgccttcctccagaagaaatacccaagtctggccaatcgcaacggaacaaagtatctcgcccgtacccttaacagactgcttatgcaccacatcagagactgtctcccagagcttaaaactcgcatcaacgtgctggctgctcagtaccaatctctgttgaactcctacggcgagcccgtggatgataaatcggccactctcctgcagttgattacaaagtttgccactgagtactgcaacaccatcgaaggaaccgctaagtatatagaaactagtgaactctgcggcggagccaggatctgttatatattccacgaaaccttcggcaggaccctggagagtgttgatcctctgggaggactaaataccattgacatcctcactgcaatcagaaacgcgacgggcccccggcccgccctgttcgtcccagaggttagctttgaactgctggtgaaaaggcagatcaagcgcctagaggaaccctccctgaggtgcgttgagttggtccacgaagagatgcagagaataatccagcattgctcaaattacagtacacaggagcttctgcgcttccctaagcttcacgatgctattgtggaggttgttacctgcttactacgaaaaaggctgcctgttaccaatgaaatggtccacaacctcgtggccatagagcttgcctatatcaacaccaagcatccggacttcgccgacgcatgcggcttaatgaacaataatatcgaagaacagagaaggaatagacttgctcgagagctcccgtctgcagtgtcccgagataaagtagcctcaggtggcgggggagtgggggacggcgtccaagagccaaccaccggcaactggcgcggcatgcttaagacaagcaaggctgaggaattgctagccgaggagaagagcaaacctattccaatcatgcccgcttcaccacagaaaggccacgcggtcaatcttttggacgtacccgtgcccgtggcccggaaactgagcgcccgggagcagcgcgattgcgaggtgatcgagcgcctgataaaatcctatttcttgatcgtgcgcaagaatatacaggactccgtgcctaaagccgttatgcactttctcgttaaccacgttaaagacactctgcaaagcgagctggtagggcagttatacaagtcatcgctgctggatgacctcttgaccgagtccgaggatatggctcagcggcggaaggaagccgccgacatgctgaaagccttacaaggcgcttctcaaatcatcgctgagattcgcgaaacgcacctctggtag

SEQ ID NO: 158506 - DNA, 1728 bp, Artificial Sequence
  derived and/or modified sequence
atggaggccctgatccctgtgattaacaaactgcaggatgtcttcaacacagtgggagcagacatcatacagctgccacagatcgtggtggtcggaacccagagctcgggaaaaagctccgtgctggagtcactagtcggacgcgacttgctgcccagagggacaggaatagtaaccagaaggcctctaatccttcagcttgtccacgtgtctcaggaggataagcggaagaccactggagaggagaacggagtagaggctgaggaatgggggaaattcctgcacacaaaaaacaagctttacaccgactttgatgaaataagacaagagattgagaacgagaccgagcggataagtgggaacaataagggagttagccccgaacctatccacctgaaaattttttcacccaacgtggtgaaccttactctcgttgacttgcccggtatgactaaagtgcccgtgggcgatcagccaaaggacatcgagctccagattcgtgaactcattttgcgctttatatccaatccgaacagcattatcctagccgttacagctgcaaataccgacatggccacttctgaggccttaaaaatctcaagagaggtcgacccggacggacggaggaccctcgctgtgatcacgaaacttgacttgatggatgcaggtacagacgcaatggatgtcttgatgggaagagttatccctgtgaagctgggcattattggcgtggtgaaccggagccagttagacatcaataataagaagtccgtgacagactccattagggacgaatacgccttcttgcagaaaaaatatccttcactagctaaccggaatggaaccaagtacctggcgagaaccctgaatcgactcctgatgcatcacattcgcgattgcctgccagaactgaaaactcgcataaatgtactggccgctcagtatcaatcgttactgaatagttatggcgagcctgtggacgacaaaagcgccaccctcctgcagcttatcaccaagtttgccaccgagtactgtaataccatcgaaggtacagccaaatatattgagactagcgagctttgtggtggggcaaggatttgctacatatttcatgaaaccttcggtcgcacactcgagtctgtggatcccttagggggactgaatacaatagatatcctaacagcgatcagaaatgccactggccctcggccagctctgttcgtacccgaggtgtcattcgagctgttggtgaagagacagatcaagcgactagaagagccgtcgttaaggtgcgtagagttagtacacgaggaaatgcagcgaataattcaacattgttccaattacagcacccaggaacttctaaggttccctaagctgcacgacgctatagtggaagtggtgacctgtctgctgagaaagcgccttcccgtcacaaacgaaatggtgcacaacctggtggccatcgaattagcttatatcaatactaaacaccctgacttcgcagacgcttgcgggctaatgaacaataacatcgaggagcagcggcgtaataggcttgccagagaattgccctccgcagtgagccgggacaaggtggcctctgggggaggcggagtgggcgacggcgttcaagaacctacaaccgggaattggcgaggcatgcttaagacaagcaaggccgaggagctactagccgagaagaagaaaaaaaagaaaaaaaaatag

SEQ ID NO: 158507 - DNA, 2100 bp, Artificial Sequence
  derived and/or modified sequence
atggaggctttaatccccgtgattaataagctgcaagatgtgttcaacaccgtgggagcagatatcattcagctgccacagattgttgtggtaggtacacaaagctcaggtaagtcttcggtgctggagtctctggtcggcagagacctgctgccgagaggaacaggcatcgtcacgcggcgtcctctaatactgcagctggtccacgtttctcaggaggacaagcgcaagacaacgggagaggagaacggcgtcgaggcggaggagtggggaaaatttttgcacaccaaaaataagctgtacacagattttgacgagatacgccaggagattgaaaacgaaaccgaacgtatttctggcaataacaagggagtgtcccccgagcccatacacttgaagatctttagccctaatgtcgtcaacttgacactggtggatttgccagggatgaccaaggtccccgtgggcgaccaaccaaaagatattgaactgcagatccgggagttgatcctgcgctttatctccaatccaaacagtatcatcctggcagtgactgcagctaatactgacatggctacctccgaagctctgaagatctctagggaagtcgaccctgacggccgacgaaccctggccgtgataaccaagcttgatctcatggacgcaggcactgacgctatggacgttctcatgggcagagtgatccccgtcaagctcggtattattggcgtcgttaacaggtcccagctggatataaacaacaaaaaatccgttaccgatagtataagagatgagtatgcatttttgcaaaagaaatatcccagtctcgcgaataggaatggaacaaagtatctggcacgtaccctgaaccgcctgctcatgcatcacattagagactgtctaccagagctcaaaacccgtataaacgtcctggcagctcagtaccagagtctgttgaactcctacggcgagcccgtggatgacaagtcggccacattactgcaattaataaccaagtttgcaaccgagtattgcaatacgatcgagggcacagccaagtacattgagacgagcgaactctgcgggggagctcggatatgttatatcttccacgagaccttcggcagaacgctggagagtgtggatccacttggtggcttgaacacaattgatattcttaccgctatacggaatgcaactggcccaaggcctgcgctgttcgttcctgaagtttccttcgaactccttgtgaagcgccagattaagcggctggaggaaccctccctccgctgcgttgagctcgtgcatgaggagatgcaacggataatccagcactgctctaattacagcactcaagagctgctacggttccctaaactgcacgacgctattgttgaagtggtcacctgtctcctccgcaagagactgcccgtcacgaacgagatggttcacaacctggtcgctattgagcttgcctatattaacactaagcacccagatttcgcggatgcttgcgggctgatgaacaataatatcgaagagcaaagacgcaaccggctggccagggaactgcccagcgcagttagtagggacaaggtggcttccggagggggaggggtaggcgatggggttcaagaaccaacaaccggcaactggcggggaatgttaaagaccagtaaggccgaggaactgctcgcagaggaaaagtcaaaaccaatccccataatgccagcatcccctcagaaggggcatgcagtcaatctactcgacgttccagtgccggtcgccaggaaattatccgcgcgtgagcagcgggattgtgaagtgatcgaacgtctgatcaagtcctatttcctcatcgttagaaaaaatatccaagatagtgtccccaaggccgtaatgcacttccttgtcaaccacgtcaaagataccctgcagtctgagttggtggggcagctttacaaatccagcctgctggacgacctccttactgaatcagaggatatggcccagcgtcgcaaggaagcagccgatatgctgaaagcccttcagggcgctagccagatcatcgccgaaataagggaaacacatttatggtag

SEQ ID NO: 158508 - DNA, 1728 bp, Artificial Sequence
  derived and/or modified sequence
atggaggccctgatccccgtgatcaacaagctgcaggacgtgttcaacaccgtgggcgccgacatcatccagctgccccagatcgtggtggtgggcacccagagcagcggcaagagcagcgtgctggagagcctggtgggcagagacctgctgcccagaggcaccggcatcgtgaccagaagacccctgatcctgcagctggtgcacgtgagccaggaggacaagagaaagaccaccggcgaggagaacggcgtggaggccgaggagtggggcaagttcctgcacaccaagaacaagctgtacaccgacttcgacgagatcagacaggagatcgagaacgagaccgagagaatcagcggcaacaacaagggcgtgagccccgagcccatccacctgaagatcttcagccccaacgtggtgaacctgaccctggtggacctgcccggcatgaccaaggtgcccgtgggcgaccagcccaaggacatcgagctgcagatcagagagctgatcctgagattcatcagcaaccccaacagcatcatcctggccgtgaccgccgccaacaccgacatggccaccagcgaggccctgaagatcagcagagaggtggaccccgacggcagaagaaccctggccgtgatcaccaagctggacctgatggacgccggcaccgacgccatggacgtgctgatgggcagagtgatccccgtgaagctgggcatcatcggcgtggtgaacagaagccagctggacatcaacaacaagaagagcgtgaccgacagcatcagagacgagtacgccttcctgcagaagaagtaccccagcctggccaacagaaacggcaccaagtacctggccagaaccctgaacagactgctgatgcaccacatcagagactgcctgcccgagctgaagaccagaatcaacgtgctggccgcccagtaccagagcctgctgaacagctacggcgagcccgtggacgacaagagcgccaccctgctgcagctgatcaccaagttcgccaccgagtactgcaacaccatcgagggcaccgccaagtacatcgagaccagcgagctgtgcggcggcgccagaatctgctacatcttccacgagaccttcggcagaaccctggagagcgtggaccccctgggcggcctgaacaccatcgacatcctgaccgccatcagaaacgccaccggccccagacccgccctgttcgtgcccgaggtgagcttcgagctgctggtgaagagacagatcaagagactggaggagcccagcctgagatgcgtggagctggtgcacgaggagatgcagagaatcatccagcactgcagcaactacagcacccaggagctgctgagattccccaagctgcacgacgccatcgtggaggtggtgacctgcctgctgagaaagagactgcccgtgaccaacgagatggtgcacaacctggtggccatcgagctggcctacatcaacaccaagcaccccgacttcgccgacgcctgcggcctgatgaacaacaacatcgaggagcagagaagaaacagactggccagagagctgcccagcgccgtgagcagagacaaggtggccagcggcggcggcggcgtgggcgacggcgtgcaggagcccaccaccggcaactggagaggcatgctgaagaccagcaaggccgaggagctgctggccgagaagaagaagaagaagaagaagaagtag

SEQ ID NO: 158509 - DNA, 2100 bp, Artificial Sequence
  derived and/or modified sequence
atggaggccctgatccccgtgatcaacaagctgcaggacgtgttcaacaccgtgggcgccgacatcatccagctgccccagatcgtggtggtgggcacccagagcagcggcaagagcagcgtgctggagagcctggtgggcagagacctgctgcccagaggcaccggcatcgtgaccagaagacccctgatcctgcagctggtgcacgtgagccaggaggacaagagaaagaccaccggcgaggagaacggcgtggaggccgaggagtggggcaagttcctgcacaccaagaacaagctgtacaccgacttcgacgagatcagacaggagatcgagaacgagaccgagagaatcagcggcaacaacaagggcgtgagccccgagcccatccacctgaagatcttcagccccaacgtggtgaacctgaccctggtggacctgcccggcatgaccaaggtgcccgtgggcgaccagcccaaggacatcgagctgcagatcagagagctgatcctgagattcatcagcaaccccaacagcatcatcctggccgtgaccgccgccaacaccgacatggccaccagcgaggccctgaagatcagcagagaggtggaccccgacggcagaagaaccctggccgtgatcaccaagctggacctgatggacgccggcaccgacgccatggacgtgctgatgggcagagtgatccccgtgaagctgggcatcatcggcgtggtgaacagaagccagctggacatcaacaacaagaagagcgtgaccgacagcatcagagacgagtacgccttcctgcagaagaagtaccccagcctggccaacagaaacggcaccaagtacctggccagaaccctgaacagactgctgatgcaccacatcagagactgcctgcccgagctgaagaccagaatcaacgtgctggccgcccagtaccagagcctgctgaacagctacggcgagcccgtggacgacaagagcgccaccctgctgcagctgatcaccaagttcgccaccgagtactgcaacaccatcgagggcaccgccaagtacatcgagaccagcgagctgtgcggcggcgccagaatctgctacatcttccacgagaccttcggcagaaccctggagagcgtggaccccctgggcggcctgaacaccatcgacatcctgaccgccatcagaaacgccaccggccccagacccgccctgttcgtgcccgaggtgagcttcgagctgctggtgaagagacagatcaagagactggaggagcccagcctgagatgcgtggagctggtgcacgaggagatgcagagaatcatccagcactgcagcaactacagcacccaggagctgctgagattccccaagctgcacgacgccatcgtggaggtggtgacctgcctgctgagaaagagactgcccgtgaccaacgagatggtgcacaacctggtggccatcgagctggcctacatcaacaccaagcaccccgacttcgccgacgcctgcggcctgatgaacaacaacatcgaggagcagagaagaaacagactggccagagagctgcccagcgccgtgagcagagacaaggtggccagcggcggcggcggcgtgggcgacggcgtgcaggagcccaccaccggcaactggagaggcatgctgaagaccagcaaggccgaggagctgctggccgaggagaagagcaagcccatccccatcatgcccgccagcccccagaagggccacgccgtgaacctgctggacgtgcccgtgcccgtggccagaaagctgagcgccagagagcagagagactgcgaggtgatcgagagactgatcaagagctacttcctgatcgtgagaaagaacatccaggacagcgtgcccaaggccgtgatgcacttcctggtgaaccacgtgaaggacaccctgcagagcgagctggtgggccagctgtacaagagcagcctgctggacgacctgctgaccgagagcgaggacatggcccagagaagaaaggaggccgccgacatgctgaaggccctgcagggcgccagccagatcatcgccgagatcagagagacccacctgtggtag

SEQ ID NO: 158510 - DNA, 1886 bp, Artificial Sequence
  derived and/or modified sequence
gcatggcctgccgggagggggcaggtagccggcgggcccggtccaatgggtgccggcttccgaggagagggcggaggagaggaggaaggaggcgaactgtgggccccggccccattcattgccgtggccggcgggcactggggccccgtgttttcagagtcatggaggcgctaattcctgtcataaacaagctccaggacgtcttcaacacggtgggcgccgacatcatccagctgcctcaaatcgtcgtagtgggaacgcagagcagcggaaagagctcagtgctagaaagcctggtggggagggacctgcttcccagaggtactggaattgtcacccggagacctctcattctgcaactggtccatgtttcacaagaagataaacggaaaacaacaggagaagaaaatggggtggaagcagaagaatggggtaaatttcttcacaccaaaaataagctttacacggattttgatgaaattcgacaagaaattgaaaatgaaacagaaagaatttcaggaaataataagggagtaagccctgaaccaattcatcttaagattttttcacccaacgttgtcaatttgacacttgtggatttgccaggaatgaccaaggtgcctgtaggtgatcaacctaaggatattgagcttcaaatcagagagctcattcttcggttcatcagtaatcctaattccattatcctcgctgtcactgctgctaatacagatatggcaacatcagaggcacttaaaatttcaagagaggtagatccagatggtcgcagaaccctagctgtaatcactaaacttgatctcatggatgcgggtactgatgccatggatgtattgatgggaagggttattccagtcaaacttggaataattggagtagttaacaggagccagctagatattaacaacaagaagagtgtaactgattcaatccgtgatgagtatgcttttcttcaaaagaaatatccatctctggccaatagaaatggaacaaagtatcttgctaggactctaaacaggttactgatgcatcacatcagagattgtttaccagagttgaaaacaagaataaatgttctagctgctcagtatcagtctcttctaaatagctacggtgaacccgtggatgataaaagtgctactttactccaacttattaccaaatttgccacagaatattgtaacactattgaaggaactgcaaaatatattgaaacttcggagctatgcggtggtgctagaatttgttatattttccatgagacttttgggcgaaccttagaatctgttgatccacttggtggccttaacactattgacattttgactgccattagaaatgctactggtcctcgtcctgctttatttgtgcctgaggtttcatttgagttactggtgaagcggcaaatcaaacgtctagaagagcccagcctccgctgtgtggaactggttcatgaggaaatgcaaaggatcattcagcactgtagcaattacagtacacaggaattgttacgatttcctaaacttcatgatgccatagttgaagtggtgacttgtcttcttcgtaaaaggttgcctgttacaaatgaaatggtccataacttagtggcaattgaactggcttatatcaacacaaaacatccagactttgctgatgcttgtgggctaatgaacaataatatagaggaacaaaggagaaacaggctagccagagaattaccttcagctgtatcacgagacaaggttgcatctggaggtggtggggttggagatggtgttcaagaaccaaccacaggcaactggagaggaatgctgaaaacttcaaaagctgaagagttattagcagaaaaaaaaaaaaaaaaaaaaaaaaag

SEQ ID NO: 158511 - DNA, 3101 bp, Artificial Sequence
  derived and/or modified sequence
gggccccggccccattcattgccgtggccggcgggcactggggccccgtgttttcagagtcatggaggcgctaattcctgtcataaacaagctccaggacgtcttcaacacggtgggcgccgacatcatccagctgcctcaaatcgtcgtagtgggaacgcagagcagcggaaagagctcagtgctagaaagcctggtggggagggacctgcttcccagaggtactggaattgtcacccggagacctctcattctgcaactggtccatgtttcacaagaagataaacggaaaacaacaggagaagaaaatggggtggaagcagaagaatggggtaaatttcttcacaccaaaaataagctttacacggattttgatgaaattcgacaagaaattgaaaatgaaacagaaagaatttcaggaaataataagggagtaagccctgaaccaattcatcttaagattttttcacccaacgttgtcaatttgacacttgtggatttgccaggaatgaccaaggtgcctgtaggtgatcaacctaaggatattgagcttcaaatcagagagctcattcttcggttcatcagtaatcctaattccattatcctcgctgtcactgctgctaatacagatatggcaacatcagaggcacttaaaatttcaagagaggtagatccagatggtcgcagaaccctagctgtaatcactaaacttgatctcatggatgcgggtactgatgccatggatgtattgatgggaagggttattccagtcaaacttggaataattggagtagttaacaggagccagctagatattaacaacaagaagagtgtaactgattcaatccgtgatgagtatgcttttcttcaaaagaaatatccatctctggccaatagaaatggaacaaagtatcttgctaggactctaaacaggttactgatgcatcacatcagagattgtttaccagagttgaaaacaagaataaatgttctagctgctcagtatcagtctcttctaaatagctacggtgaacccgtggatgataaaagtgctactttactccaacttattaccaaatttgccacagaatattgtaacactattgaaggaactgcaaaatatattgaaacttcggagctatgcggtggtgctagaatttgttatattttccatgagacttttgggcgaaccttagaatctgttgatccacttggtggccttaacactattgacattttgactgccattagaaatgctactggtcctcgtcctgctttatttgtgcctgaggtttcatttgagttactggtgaagcggcaaatcaaacgtctagaagagcccagcctccgctgtgtggaactggttcatgaggaaatgcaaaggatcattcagcactgtagcaattacagtacacaggaattgttacgatttcctaaacttcatgatgccatagttgaagtggtgacttgtcttcttcgtaaaaggttgcctgttacaaatgaaatggtccataacttagtggcaattgaactggcttatatcaacacaaaacatccagactttgctgatgcttgtgggctaatgaacaataatatagaggaacaaaggagaaacaggctagccagagaattaccttcagctgtatcacgagacaaggttgcatctggaggtggtggggttggagatggtgttcaagaaccaaccacaggcaactggagaggaatgctgaaaacttcaaaagctgaagagttattagcagaagaaaaatcaaaacccattccaattatgccagccagtccacaaaaaggtcatgccgtgaacctgctagatgtgccagttcctgttgcacgaaaactatctgctcgggaacagcgagattgtgaggttattgaacgactcattaaatcatattttctcattgtcagaaagaatattcaagacagtgtgccaaaggcagtaatgcattttttggttaatcatgtgaaagacactcttcagagtgagctagtaggccagctgtataaatcatccttattggatgatcttctgacagaatctgaggacatggcacagcgcaggaaagaagcagctgatatgctaaaggcattacaaggagccagtcaaattattgctgaaatccgggagactcatctttggtgaagagaactatgtaatactgagactttgttgactcaaaacttgctagttactgcctacctgagtagaatcttatttatgaactcctgtgtattgcaatggtatgaatctgctcatgtggagactggctataaactgaaaagtgtattccaaattgcagaacacatcacacatttaatccaaataataaatggctgtttctaaagtttcccagtatatataaaatacatcaagtctgtcttgtgacagtttcatctgaacttaacttaaaaacaactgttaatgttctagttgtgcaaagcagtttgcctgtggataagatgacctgtgtaataatctttgttagtagtcttaaagctgctgccatagtcctccaagaagaaagcaccaagacaacatttcatatgactataatgcatgtactatataagctgatctggctttgaaagatgtgagttggcaagttcctcacatagagtcattgtattccacctgtccttcaatttagttttttctgagcttctttgcagcctttgatgtgtttttaagaaagctgaatgcacaagaggatctgtgacactgacatggctgtggtgtgcatactgtgtagttacatagcccttccaattctgggtccatttgcactagcaaattaaaatatgctttgattcatacttaaacctgaaagcaggaatgcctacattaattcctacattaaaaacagccatctacccttgattatctagaaagacttggtaatgatggtcagttccttttagatttcagaaaatcaaatgatgacctaaatttcccttaatttgcaaatacagtagtaattaaggtacatctctaaagtggagcacttacaccaggctctaagattcactttgaggtggaacttaaaaccagtgtactgtatgtatgcattggtaatagctacttt

SEQ ID NO: 158512 - protein, 1549 aa, Artificial Sequence
  derived and/or modified sequence
MSLSFCGNNISSYNINDGVLQNSCFVDALNLVPHVFLLFITFPILFIGWGSQSSKVQIHHNTWLHFPGHNLRWILTFALLFVHVCEIAEGIVSDSRRESRHLHLFMPAVMGFVATTTSIVYYHNIETSNFPKLLLALFLYWVMAFITKTIKLVKYCQSGLDISNLRFCITGMMVILNGLLMAVEINVIRVRRYVFFMNPQKVKPPEDLQDLGVRFLQPFVNLLSKATYWWMNTLIISAHKKPIDLKAIGKLPIAMRAVTNYVCLKDAYEEQKKKVADHPNRTPSIWLAMYRAFGRPILLSSTFRYLADLLGFAGPLCISGIVQRVNETQNGTNNTTGISETLSSKEFLENAYVLAVLLFLALILQRTFLQASYYVTIETGINLRGALLAMIYNKILRLSTSNLSMGEMTLGQINNLVAIETNQLMWFLFLCPNLWAMPVQIIMGVILLYNLLGSSALVGAAVIVLLAPIQYFIATKLAEAQKSTLDYSTERLKKTNEILKGIKLLKLYAWEHIFCKSVEETRMKELSSLKTFALYTSLSIFMNAAIPIAAVLATFVTHAYASGNNLKPAEAFASLSLFHILVTPLFLLSTVVRFAVKAIISVQKLNEFLLSDEIGDDSWRTGESSLPFESCKKHTGVQPKTINRKQPGRYHLDSYEQSTRRLRPAETEDIAIKVTNGYFSWGSGLATLSNIDIRIPTGQLTMIVGQVGCGKSSLLLAILGEMQTLEGKVHWSNVNESEPSFEATRSRNRYSVAYAAQKPWLLNATVEENITFGSPFNKQRYKAVTDACSLQPDIDLLPFGDQTEIGERGINLSGGQRQRICVARALYQNTNIVFLDDPFSALDIHLSDHLMQEGILKFLQDDKRTLVLVTHKLQYLTHADWIIAMKDGSVLREGTLKDIQTKDVELYEHWKTLMNRQDQELEKDMEADQTTLERKTLRRAMYSREAKAQMEDEDEEEEEEEDEDDNMSTVMRLRTKMPWKTCWRYLTSGGFFLLILMIFSKLLKHSVIVAIDYWLATWTSEYSINNTGKADQTYYVAGFSILCGAGIFLCLVTSLTVEWMGLTAAKNLHHNLLNKIILGPIRFFDTTPLGLILNRFSADTNIIDQHIPPTLESLTRSTLLCLSAIGMISYATPVFLVALLPLGVAFYFIQKYFRVASKDLQELDDSTQLPLLCHFSETAEGLTTIRAFRHETRFKQRMLELTDTNNIAYLFLSAANRWLEVRTDYLGACIVLTASIASISGSSNSGLVGLGLLYALTITNYLNWVVRNLADLEVQMGAVKKVNSFLTMESENYEGTMDPSQVPEHWPQEGEIKIHDLCVRYENNLKPVLKHVKAYIKPGQKVGICGRTGSGKSSLSLAFFRMVDIFDGKIVIDGIDISKLPLHTLRSRLSIILQDPILFSGSIRFNLDPECKCTDDRLWEALEIAQLKNMVKSLPGGLDAVVTEGGENFSVGQRQLFCLARAFVRKSSILIMDEATASIDMATENILQKVVMTAFADRTVVTIAHRVSSIMDAGLVLVFSEGILVECDTVPNLLAHKNGLFSTLVMTNK

SEQ ID NO: 158513 - protein, 1513 aa, Artificial Sequence
  derived and/or modified sequence
MSLSFCGNNISSYNINDGVLQNSCFVDALNLVPHVFLLFITFPILFIGWGSQSSKVQIHHNTWLHFPGHNLRWILTFALLFVHVCEIAEGIVSDSRRESRHLHLFMPAVMGFVATTTSIVYYHNIETSNFPKLLLALFLYWVMAFITKTIKLVKYCQSGLDISNLRFCITGMMVILNGLLMAVEINVIRVRRYVFFMNPQKVKPPEDLQDLGVRFLQPFVNLLSKATYWWMNTLIISAHKKPIDLKAIGKLPIAMRAVTNYVCLKDAYEEQKKKVADHPNRTPSIWLAMYRAFGRPILLSSTFRYLADLLGFAGPLCISGIVQRVNETQNGTNNTTGISETLSSKEFLENAYVLAVLLFLALILQRTFLQASYYVTIETGINLRGALLAMIYNKILRLSTSNLSMGEMTLGQINNLVAIETNQLMWFLFLCPNLWAMPVQIIMGVILLYNLLGSSALVGAAVIVLLAPIQYFIATKLAEAQKSTLDYSTERLKKTNEILKGIKLLKLYAWEHIFCKSVEETRMKELSSLKTFALYTSLSIFMNAAIPIAAVLATFVTHAYASGNNLKPAEAFASLSLFHILVTPLFLLSTVVRFAVKAIISVQKLNEFLLSDEIGDDSWRTGESSLPFESCKKHTGVVTNGYFSWGSGLATLSNIDIRIPTGQLTMIVGQVGCGKSSLLLAILGEMQTLEGKVHWSNVNESEPSFEATRSRNRYSVAYAAQKPWLLNATVEENITFGSPFNKQRYKAVTDACSLQPDIDLLPFGDQTEIGERGINLSGGQRQRICVARALYQNTNIVFLDDPFSALDIHLSDHLMQEGILKFLQDDKRTLVLVTHKLQYLTHADWIIAMKDGSVLREGTLKDIQTKDVELYEHWKTLMNRQDQELEKDMEADQTTLERKTLRRAMYSREAKAQMEDEDEEEEEEEDEDDNMSTVMRLRTKMPWKTCWRYLTSGGFFLLILMIFSKLLKHSVIVAIDYWLATWTSEYSINNTGKADQTYYVAGFSILCGAGIFLCLVTSLTVEWMGLTAAKNLHHNLLNKIILGPIRFFDTTPLGLILNRFSADTNIIDQHIPPTLESLTRSTLLCLSAIGMISYATPVFLVALLPLGVAFYFIQKYFRVASKDLQELDDSTQLPLLCHFSETAEGLTTIRAFRHETRFKQRMLELTDTNNIAYLFLSAANRWLEVRTDYLGACIVLTASIASISGSSNSGLVGLGLLYALTITNYLNWVVRNLADLEVQMGAVKKVNSFLTMESENYEGTMDPSQVPEHWPQEGEIKIHDLCVRYENNLKPVLKHVKAYIKPGQKVGICGRTGSGKSSLSLAFFRMVDIFDGKIVIDGIDISKLPLHTLRSRLSIILQDPILFSGSIRFNLDPECKCTDDRLWEALEIAQLKNMVKSLPGGLDAVVTEGGENFSVGQRQLFCLARAFVRKSSILIMDEATASIDMATENILQKVVMTAFADRTVVTIAHRVSSIMDAGLVLVFSEGILVECDTVPNLLAHKNGLFSTLVMTNK

SEQ ID NO: 158514 - DNA, 4650 bp, Artificial Sequence
  derived and/or modified sequence
atgagcttatctttctgcggaaataatatctcgagctacaacattaacgacggggtgttgcagaactcatgtttcgtcgatgcattaaacctggtccctcatgttttcctactgttcatcactttccccatcctcttcattggctggggttctcagtcttcaaaggtgcagatccatcacaacacttggttgcattttccaggccataaccttaggtggatactcacattcgctcttctgttcgtgcacgtgtgcgagatcgctgaaggcattgtttccgatagtcggcgggaatctcggcacctccatctctttatgcccgctgtgatgggcttcgttgctactaccacatccatagtctattaccataacatagagacatccaacttccctaaactactgttggccctgtttctctactgggtgatggccttcatcaccaagaccatcaagttggttaaatactgccaatcgggcttagacatatctaatctgaggttctgcatcactgggatgatggtgatccttaatggactactcatggccgtggagattaacgtcataagagtacgcaggtatgtgtttttcatgaatcctcagaaagttaaaccccccgaagacctccaagatctaggggttcggtttttgcaacccttcgtgaacctcctatctaaggcgacctactggtggatgaacactctgatcatatcagcccacaaaaagccgatcgacctcaaagcaatcggcaaacttccgatcgccatgcgagctgtgacaaactatgtttgtcttaaggacgcttatgaagaacagaaaaaaaaagtggccgaccatcccaataggacgccctctatttggctcgctatgtacagggctttcgggcgccccatcctcctgagttccacgttccgctatctggctgacctactggggtttgccgggcccctgtgcatctctggtattgtgcagagggtgaatgagacgcagaatggaaccaataatacgacggggatctcagaaactctcagcagcaaggagtttctggagaacgcttacgtccttgcagttctgctgttccttgccctgatcctacagcggacattcctccaggcaagttattacgtcaccatcgagacagggatcaatttgagaggagcactcctggccatgatttacaacaagatcctcaggctatcaacgtctaacctgagcatgggagagatgactttgggccaaataaataatctggtggccatcgaaacaaaccagctcatgtggttcctctttctgtgtcctaacttgtgggcgatgccagtgcaaatcatcatgggcgtgattttgttgtataatcttctgggctctagtgccctagtgggagctgccgttattgtcctgctggctcctatccagtatttcattgccactaagctggcagaggcacaaaagtccaccctggattactcgaccgaacgactgaaaaagaccaacgaaatcctgaaggggatcaagttgctgaaattgtatgcttgggaacacatattctgcaaaagtgtggaagagacaagaatgaaggagttgtccagtctgaagacttttgccctctacaccagcctgagcatttttatgaatgctgcgatccccatcgcagccgtgctggccacttttgtgactcatgcttacgcctcaggaaacaatctcaagcccgcagaagctttcgcttcgctctctctgtttcatatactggtcactcctttgtttcttctcagcacagtcgtccgctttgccgtgaaggccatcatttccgtgcaaaagttgaacgaattcctactgtctgacgagataggcgacgacagctggagaactggagaatctagcctacctttcgaatcatgtaagaaacatacgggagtccagcctaaaacgattaaccggaagcaacccgggcggtatcacctggatagttacgaacagagcacgaggcggctgcggcctgccgagactgaggacatcgctataaaggttactaatggctactttagctggggatccggactcgctactttgagtaacatagacatccgtattcccacgggacagctcacgatgattgttggccaggtgggctgtgggaagtcaagccttcttcttgccatactcggagagatgcagaccctcgagggcaaagttcattggagtaacgtcaacgaatctgagcctagtttcgaggcgaccaggtctcgtaacagatacagtgtagcttacgctgcccagaagccttggctgcttaacgcaaccgtcgaagagaacatcacttttggatctccgttcaacaaacagagatataaagctgtgactgacgcttgtagcctgcagccagacattgatctgctgccattcggcgatcagaccgaaatcggagaacggggtattaacctttccggcgggcagcgccagaggatctgtgtggctagagcactttaccagaatactaacattgtcttcctcgatgacccctttagtgcgctcgacatccatttaagcgatcatctgatgcaagaaggaatcctgaagtttctccaggacgataaaaggaccctagttctcgtcacccacaaactgcagtacttgacccatgcagattggattatcgcaatgaaggatggctccgttctacgagaaggcacattgaaagacattcagaccaaggatgtcgaactctacgaacactggaagactttgatgaaccgccaggatcaggaattggagaaggatatggaggcagatcagaccaccctggaacgaaaaacactacgtagggccatgtactcccgggaggccaaggcacagatggaagacgaggacgaagaagaggaggaagaggaagatgaggacgacaatatgagcaccgtgatgaggctgcgaactaaaatgccctggaaaacctgttggaggtacttgacaagcggtggattcttcctgcttatcctgatgatattctcgaaattgctcaagcattctgtcatcgtggcgattgactactggctcgctacttggaccagtgaatacagcattaacaatacgggaaaagcggaccagacatactatgttgctggcttctccattctgtgtggggcaggcattttcctgtgtctggtcacgtcccttacggtggaatggatgggcttgactgctgcaaagaatctccatcataatctgctgaacaagatcatactgggacccatccgattcttcgacacgaccccgcttggactgatcctcaatagattctcagccgatactaatatcattgaccaacatatccctccaactcttgagagtctgacgaggtcaaccctcctctgcctaagcgctatcgggatgattagctatgcgacacccgtgttcctggtcgccttactgccactgggcgtcgcgttctacttcattcagaaatatttcagggtagcatcaaaggacctgcaggagctggatgactcaacccagctgcccctgctgtgccattttagcgagacagccgagggactgactacgatcagggctttccgccatgagacacgatttaaacagagaatgctggagctcaccgacaccaataatatcgcatatctgttcctgagcgccgcaaataggtggctcgaggtgaggaccgactatctgggggcatgcatcgtccttaccgcttcaatagcttctatttcaggctctagcaattccggactggtcgggctaggccttctgtacgccctgaccatcacgaactatctcaactgggtcgtgcgcaacttggccgatctggaagtgcagatgggcgctgtcaaaaaggtgaatagctttctaactatggaatccgaaaactatgagggcacaatggacccctcacaggtgcccgaacactggcctcaggaaggggagataaagatccacgacctgtgtgtgagatatgaaaacaaccttaagcccgtcttgaagcatgtcaaggcatacataaaacctggccagaaggtgggaatttgcggcaggaccggctccggaaaatcctctttgtccctggccttctttagaatggtggacatcttcgacgggaaaatagtgatcgacggtatcgatattagtaagctccccctgcacactttacgttcacggctttctataatcctccaggatcctatcttgttttccggctctatccggttcaaccttgaccccgaatgcaaatgtacagacgaccggctctgggaagcacttgagattgctcagctcaagaatatggttaagtcgttgcctggaggtcttgacgctgttgtgaccgaagggggcgagaatttcagtgtcgggcagcggcagctcttctgtctggcacgcgcattcgttcgtaaaagcagcatcctgattatggacgaagcaaccgcctccatcgatatggcaactgagaacatactgcagaaggtggtcatgaccgcctttgccgacagaaccgtagttacaatagcacatcgagtttcctccatcatggacgctggcctagtcctggtcttctctgaaggcattctagtggagtgcgacaccgtgccgaacctgctggcccataagaacggcctgttttcaaccttggtaatgactaataagtag

SEQ ID NO: 158515 - DNA, 4542 bp, Artificial Sequence
  derived and/or modified sequence
atgtccctgtcattctgcggaaacaatatttcatcttataatattaacgacggcgtgctgcagaactcctgttttgtcgacgctttgaacctcgtgcctcatgtgtttctgttatttatcacctttcctattttatttatcgggtggggttcccagtcaagcaaggtgcagattcaccacaatacctggctgcatttcccaggacacaaccttcgatggatccttacattcgctctgctgttcgtgcacgtgtgcgagattgctgagggcatcgtgtccgattcaagacgtgagagccgacacttgcatctatttatgcctgcagtgatgggattcgtggcaaccaccacgtctattgtctactatcacaatatcgaaacatcaaatttccctaagctgttgctggccttgttcctctattgggtcatggcctttattaccaagaccatcaaactggtcaaatattgccagtctggtcttgacattagcaacctgcggttctgtatcaccggaatgatggtgatactgaatggtctgcttatggcggttgaaatcaacgtcattagagtgcggaggtacgtgttttttatgaatccccagaaggtaaaacctccagaagatctccaggacctgggtgtgagattcttgcaaccattcgtgaatttattgtcaaaggcgacttattggtggatgaacactctgatcatcagtgctcacaaaaagcctattgatctgaaagccatcggcaaactcccaatcgccatgcgggctgtgactaattacgtctgtctcaaagacgcttatgaggagcagaaaaagaaggtagccgaccaccccaatagaacaccgtcgatttggcttgcgatgtaccgcgcctttggccggcccatcttactgagcagcacatttcggtatttggcagacctccttggattcgcagggcctctctgcatctcaggaattgtgcagagggtaaacgaaacacagaacgggactaataatacaactgggatttctgagacactcagctcaaaagaatttttagaaaacgcctatgttctggccgttctcctgtttcttgccctcatcttgcagagaaccttcctccaggcctcatattatgtcaccattgagacaggaataaacctaagaggggccctgctggctatgatttataacaagatcttgaggctgagcacttcaaatctgtctatgggcgaaatgactctgggccagattaacaaccttgtggctatcgaaaccaaccagctgatgtggtttctttttctgtgtccaaatctttgggccatgcctgtacagatcataatgggtgtgatcttactttacaacctattggggtccagcgcattggtcggcgccgccgtgatagtgctgttagcgcccatccagtacttcattgccacaaaattggcggaggctcagaaatcaacgctggactatagcacagaaaggctcaagaaaacgaatgaaatcctcaagggcatcaagcttttaaaactatacgcctgggaacatattttctgcaaatccgttgaagagaccagaatgaaagaactgagctcactgaagacatttgctctctacaccagtttgtcaatctttatgaatgctgcgatccctatcgcggctgtcctcgcgacattcgtgacccacgcctatgcgagtggcaacaatttgaagcctgctgaagctttcgcctctttgagcttgtttcacatattggtgactcccctgttcctcctgtcaacggtggtacgcttcgccgtgaaggctataatttcagttcagaagctgaatgaatttcttctgtccgatgaaatcggcgacgatagctggagaactggggagtcatctctcccttttgaatcgtgcaagaagcacacgggggttgttacaaacggctacttctcgtgggggtccgggcttgccaccctgtcaaacatcgatattcggatccctaccggacagctcactatgatcgtcggccaagttgggtgcggaaaaagctctctgctgctagcaatactcggagaaatgcagactctggaagggaaagtacactggtctaatgttaatgagtccgagcctagttttgaagccaccaggagccggaacagatatagtgtggcctatgctgcccagaaaccctggctcctgaacgccaccgtcgaagagaacatcaccttcggtagcccgttcaataaacaaaggtataaagcggtgaccgatgcctgctctctacagcctgatatcgatttactgccatttggagaccagactgagatcggggagcgaggaatcaacctaagtggcggacagaggcaaaggatttgtgtggctagagcgctatatcagaacacaaatattgtgttcctcgatgacccattttctgccctggatatccatctcagcgaccatctgatgcaggaaggaatcttgaaattcttgcaggatgataagagaaccctggtgttggtgacccataaacttcaatacctgacccacgctgactggattatcgctatgaaagatggaagtgtactgagggaaggcaccctcaaggatatacaaacaaaagatgtggaactctatgaacattggaaaactctgatgaaccgccaggatcaggagcttgaaaaagatatggaagccgatcagacaaccctggagaggaagactttaagacgagctatgtactcgcgtgaggctaaagctcagatggaagatgaagatgaggaggaagaggaggaggaagacgaggatgacaacatgtctaccgtgatgcgtctgcgcacaaagatgccatggaagacctgttggaggtacctgacttcaggcgggtttttcttactgatcctcatgattttcagtaaactgctcaagcatagcgtcatagtggcgatcgactattggcttgcgacctggacttctgaatattccattaacaacaccggaaaggcagaccagacttattacgtggctggattcagcatcctgtgtggtgccggaatattcctttgtttagtaactagccttactgtggaatggatgggcctaaccgcagccaaaaatcttcatcataaccttcttaataaaattatcctgggtccaattcgattttttgacaccacccctctaggactcattttgaacaggttctccgccgacactaatataatcgaccagcacataccacctaccctcgaatcccttaccagatctacgctactatgcctcagcgctatcggaatgatctcttatgccactcccgttttcctggtggctcttttgccacttggtgtggctttctatttcatccagaaatatttcagagtggcttccaaagatctgcaggaactggacgattctacccaactgccgctgctgtgccacttctcagaaacagctgagggcctgaccaccatccgcgcgtttaggcatgagacacgcttcaaacaaaggatgttggagctgaccgataccaataacattgcctacctctttctgtcagcagccaatcgctggctcgaagtcaggacagattatctgggggcatgtattgtgttgaccgcctcaatcgcctccatatccggctctagcaatagtggactggtggggttgggtttgctttacgcactcacaattaccaattatctcaattgggtcgtgcgcaacctggccgatctcgaggtgcaaatgggggctgtgaagaaggtgaacagctttctgactatggagagcgagaactacgagggcactatggatccaagccaggtgccagaacattggcctcaggaaggcgaaatcaaaatccacgatctatgtgtgcgctacgaaaacaacctgaagcccgtgctcaagcacgtgaaagcatatatcaagccgggccagaaggttggtatctgtggccgaaccggtagcggcaagagttccctcagtcttgccttttttcgcatggtggatatttttgacggaaagatcgtgatcgatgggattgatattagtaaattgcccttacacactctccgatcacgcttaagtatcattcttcaggatccaatcttatttagcgggagtattcgcttcaacctcgaccctgaatgtaaatgtaccgacgataggctgtgggaagccctcgagattgcccagttgaaaaacatggtgaagagcctgcccggagggctggacgcagtggttactgaaggcggcgagaatttctccgttggccagcgccagctgttctgcctcgctagggcattcgtgaggaagagctcaatccttatcatggacgaagcaacggcatcaatcgacatggctacggagaatatcctgcagaaggtggtcatgactgcatttgcggataggacagtcgtcacaattgcgcaccgcgttagcagtattatggacgccggtctcgtgctggttttctcagaggggatcctagtagaatgcgataccgtgccgaacctgttggcccataagaacggtctcttcagcacactggtcatgacaaacaagtag

SEQ ID NO: 158516 - DNA, 4650 bp, Artificial Sequence
  derived and/or modified sequence
atgagcctgtccttctgtggcaacaacatcagcagctacaacatcaatgatggagtgctgcagaacagctgctttgtggatgccctgaacctggtgccccacgtgttcctgctcttcatcaccttccccatcctcttcatcggctggggcagccagagcagcaaggtgcagatccaccacaacacctggctgcacttccctggccacaacctgcgctggatcctgacctttgccctgctgtttgtgcacgtgtgtgaaattgctgagggcatcgtgtctgacagccggcgggagagccgccacctgcacctgttcatgcctgctgtgatgggctttgtggccaccaccaccagcatcgtgtactaccacaacatcgagaccagcaacttccccaagctgctgctggccctcttcctgtactgggtgatggccttcatcaccaagaccatcaagctggtgaagtactgccagagcggcctggacatcagcaacctgcgcttctgcatcaccggcatgatggtgatcctgaatggcctgctgatggctgtggagatcaacgtcatccgggtgagaagatatgtgttcttcatgaacccccagaaggtgaagcccccagaggacctgcaggacctgggcgtgcgcttcctgcagccctttgtgaacctgctgagcaaggccacctactggtggatgaacaccctcatcatcagcgcccacaagaagcccatcgacctgaaggccatcggcaagctgcccatcgccatgagagctgtgaccaactacgtgtgcctgaaggatgcctatgaggagcagaagaagaaggtggccgaccaccccaacagaacacccagcatctggctggccatgtaccgggccttcggccggcccatcctgctgagcagcaccttccgctacctggccgacctgctgggctttgctggccccctgtgcatctctggaattgtgcagagggtgaatgagacccagaatggcaccaacaacaccaccggcatcagcgagaccctgagcagcaaggagttcctggagaatgcctacgtgctggccgtgctgctcttcctggccctgatcctgcagaggaccttcctgcaggccagctactacgtgaccattgaaacaggcatcaacctgcggggggccctgctggccatgatctacaacaagatcctgcggctgagcaccagcaacctgtccatgggagagatgaccctgggccagatcaacaacctggtggccatcgagaccaaccagctgatgtggttcctgttcctgtgccccaacctgtgggccatgcctgtgcagatcatcatgggcgtcatcctgctgtacaacctgctgggcagcagcgccctggtgggcgctgctgtgattgtgctgctggcccccatccagtacttcatcgccaccaagctggccgaggcccagaagagcaccctggactacagcacagagcggctgaagaagaccaatgagatcctgaagggcatcaagctgctgaagctgtatgcctgggagcacatcttctgcaagtctgtggaggagaccaggatgaaggagctgagcagcctgaagacctttgccctgtacaccagcctgagcatcttcatgaatgctgccatccccatcgctgctgtgctggccacctttgtgacccacgcctatgccagcggcaacaacctgaagccagctgaggcctttgccagcctgagcctcttccacatcctggtgacccccctcttcctgctgagcacagtggtgcgctttgctgtgaaggccatcatctctgtgcagaagctgaatgagttcctgctgagtgatgaaattggagatgacagctggaggactggagagagcagcctgccctttgagagctgcaagaagcacactggagtgcagcccaagaccatcaacaggaagcagcccggccgctaccacctggacagctatgagcagagcacccggcggctgcggcctgctgagacagaggacatcgccatcaaggtgaccaacggctacttctcctggggcagcggcctggccaccctgagcaacatcgacatccgcatccccaccggccagctgaccatgattgtgggccaggtgggctgcggcaagagcagcctgctgctggccatcctgggggagatgcagaccctggagggcaaggtgcactggagcaatgtgaatgaaagtgagcccagctttgaggccaccaggagcaggaaccgctacagcgtggcctatgctgcccagaagccctggctgctgaatgccaccgtggaggagaacatcaccttcggcagccccttcaacaagcagcgctacaaggctgtgacagatgcctgcagcctgcagcctgacatcgacctgctgccctttggagaccagacagaaattggagagcggggcatcaacctgagcggcggccagaggcagaggatctgtgtggcccgggccctgtaccagaacaccaacatcgtgttcctggatgaccccttcagcgccctggacatccacctgagtgaccacctgatgcaggagggcatcctgaagttcctgcaggatgacaagaggaccctggtgctggtgacccacaagctgcagtacctgacccatgctgactggatcatcgccatgaaggatggctctgtgctgcgggagggcaccctgaaggacatccagaccaaggatgtggagctgtatgagcactggaagaccctgatgaaccggcaggaccaggagctggagaaggacatggaggccgaccagaccaccctggagaggaagaccctgcggcgggccatgtacagccgggaggccaaggcccagatggaggatgaagatgaggaggaggaggaggaggaggatgaagatgacaacatgagcacagtgatgaggctgcggaccaagatgccctggaagacctgctggagatacctgaccagcggcggcttcttcctgctgatcctgatgatcttcagcaagctgctgaagcacagcgtcatcgtggccatcgactactggctggccacctggaccagcgagtacagcatcaacaacacaggcaaggctgaccagacctactacgtggccggcttcagcatcctgtgtggggccggcatcttcctgtgcctggtgaccagcctgactgtggagtggatgggcctgacagctgccaagaacctgcaccacaacctgctgaacaagatcatcctgggccccatccgcttctttgacaccacccccctgggcctcatcctgaaccgcttctctgctgacaccaacatcatcgaccagcacatcccccccaccctggagagcctgaccaggagcaccctgctgtgcctgagcgccatcggcatgatctcctatgccacccctgtgttcctggtggccctgctgcccctgggcgtggccttctacttcatccagaagtacttccgggtggccagcaaggacctgcaggagctggatgacagcacccagctgcccctgctgtgccacttcagcgagacagctgagggcctgaccaccatccgggccttcagacatgagacccgcttcaagcagaggatgctggagctgacagacaccaacaacatcgcctacctgttcctgtctgctgccaaccgctggctggaggtgaggacagactacctgggcgcctgcatcgtgctgacagccagcatcgccagcatcagcggcagcagcaacagcggcctggtgggcctgggcctgctgtatgccctgaccatcaccaactacctgaactgggtggtgaggaacctggccgacctggaggtgcagatgggcgctgtgaagaaggtgaacagcttcctgaccatggagagtgaaaattatgagggcaccatggaccccagccaggtgcctgagcactggccccaggagggggagatcaagatccatgacctgtgtgtgcgctatgagaacaacctgaagcctgtgctgaagcacgtgaaggcctacatcaagccaggccagaaggtgggcatctgtggccgcacaggcagcggcaagagcagcctgagcctggccttcttcaggatggtggacatctttgatggcaagatcgtgattgatggcatcgacatcagcaagctgcccctgcacaccctgcggagccggctgagcatcatcctgcaggaccccatcctcttcagcggcagcatccgcttcaacctggaccctgagtgcaagtgcacagatgaccggctgtgggaggccctggagatcgcccagctgaagaacatggtgaagagcctgcccggcggcctggatgctgtggtgacagaaggaggagagaacttctctgtgggccagaggcagctgttctgcctggcccgggcctttgtgaggaagagcagcatcctgatcatggatgaggccacagccagcattgacatggccacagagaacatcctgcagaaggtggtgatgacagcctttgctgacagaacagtggtgaccatcgcccaccgggtgagcagcatcatggatgctggcctggtgctggtgttcagcgagggcatcctggtggagtgtgacacagtgcccaacctgctggcccacaagaatggcctcttcagcaccctggtgatgaccaacaagtag

SEQ ID NO: 158517 - DNA, 4542 bp, Artificial Sequence
  derived and/or modified sequence
atgagcctgtccttctgtggcaacaacatcagcagctacaacatcaatgatggagtgctgcagaacagctgctttgtggatgccctgaacctggtgccccacgtgttcctgctcttcatcaccttccccatcctcttcatcggctggggcagccagagcagcaaggtgcagatccaccacaacacctggctgcacttccctggccacaacctgcgctggatcctgacctttgccctgctgtttgtgcacgtgtgtgaaattgctgagggcatcgtgtctgacagccggcgggagagccgccacctgcacctgttcatgcctgctgtgatgggctttgtggccaccaccaccagcatcgtgtactaccacaacatcgagaccagcaacttccccaagctgctgctggccctcttcctgtactgggtgatggccttcatcaccaagaccatcaagctggtgaagtactgccagagcggcctggacatcagcaacctgcgcttctgcatcaccggcatgatggtgatcctgaatggcctgctgatggctgtggagatcaacgtcatccgggtgagaagatatgtgttcttcatgaacccccagaaggtgaagcccccagaggacctgcaggacctgggcgtgcgcttcctgcagccctttgtgaacctgctgagcaaggccacctactggtggatgaacaccctcatcatcagcgcccacaagaagcccatcgacctgaaggccatcggcaagctgcccatcgccatgagagctgtgaccaactacgtgtgcctgaaggatgcctatgaggagcagaagaagaaggtggccgaccaccccaacagaacacccagcatctggctggccatgtaccgggccttcggccggcccatcctgctgagcagcaccttccgctacctggccgacctgctgggctttgctggccccctgtgcatctctggaattgtgcagagggtgaatgagacccagaatggcaccaacaacaccaccggcatcagcgagaccctgagcagcaaggagttcctggagaatgcctacgtgctggccgtgctgctcttcctggccctgatcctgcagaggaccttcctgcaggccagctactacgtgaccattgaaacaggcatcaacctgcggggggccctgctggccatgatctacaacaagatcctgcggctgagcaccagcaacctgtccatgggagagatgaccctgggccagatcaacaacctggtggccatcgagaccaaccagctgatgtggttcctgttcctgtgccccaacctgtgggccatgcctgtgcagatcatcatgggcgtcatcctgctgtacaacctgctgggcagcagcgccctggtgggcgctgctgtgattgtgctgctggcccccatccagtacttcatcgccaccaagctggccgaggcccagaagagcaccctggactacagcacagagcggctgaagaagaccaatgagatcctgaagggcatcaagctgctgaagctgtatgcctgggagcacatcttctgcaagtctgtggaggagaccaggatgaaggagctgagcagcctgaagacctttgccctgtacaccagcctgagcatcttcatgaatgctgccatccccatcgctgctgtgctggccacctttgtgacccacgcctatgccagcggcaacaacctgaagccagctgaggcctttgccagcctgagcctcttccacatcctggtgacccccctcttcctgctgagcacagtggtgcgctttgctgtgaaggccatcatctctgtgcagaagctgaatgagttcctgctgagtgatgaaattggagatgacagctggaggactggagagagcagcctgccctttgagagctgcaagaagcacactggagtggtgaccaacggctacttctcctggggcagcggcctggccaccctgagcaacatcgacatccgcatccccaccggccagctgaccatgattgtgggccaggtgggctgcggcaagagcagcctgctgctggccatcctgggggagatgcagaccctggagggcaaggtgcactggagcaatgtgaatgaaagtgagcccagctttgaggccaccaggagcaggaaccgctacagcgtggcctatgctgcccagaagccctggctgctgaatgccaccgtggaggagaacatcaccttcggcagccccttcaacaagcagcgctacaaggctgtgacagatgcctgcagcctgcagcctgacatcgacctgctgccctttggagaccagacagaaattggagagcggggcatcaacctgagcggcggccagaggcagaggatctgtgtggcccgggccctgtaccagaacaccaacatcgtgttcctggatgaccccttcagcgccctggacatccacctgagtgaccacctgatgcaggagggcatcctgaagttcctgcaggatgacaagaggaccctggtgctggtgacccacaagctgcagtacctgacccatgctgactggatcatcgccatgaaggatggctctgtgctgcgggagggcaccctgaaggacatccagaccaaggatgtggagctgtatgagcactggaagaccctgatgaaccggcaggaccaggagctggagaaggacatggaggccgaccagaccaccctggagaggaagaccctgcggcgggccatgtacagccgggaggccaaggcccagatggaggatgaagatgaggaggaggaggaggaggaggatgaagatgacaacatgagcacagtgatgaggctgcggaccaagatgccctggaagacctgctggagatacctgaccagcggcggcttcttcctgctgatcctgatgatcttcagcaagctgctgaagcacagcgtcatcgtggccatcgactactggctggccacctggaccagcgagtacagcatcaacaacacaggcaaggctgaccagacctactacgtggccggcttcagcatcctgtgtggggccggcatcttcctgtgcctggtgaccagcctgactgtggagtggatgggcctgacagctgccaagaacctgcaccacaacctgctgaacaagatcatcctgggccccatccgcttctttgacaccacccccctgggcctcatcctgaaccgcttctctgctgacaccaacatcatcgaccagcacatcccccccaccctggagagcctgaccaggagcaccctgctgtgcctgagcgccatcggcatgatctcctatgccacccctgtgttcctggtggccctgctgcccctgggcgtggccttctacttcatccagaagtacttccgggtggccagcaaggacctgcaggagctggatgacagcacccagctgcccctgctgtgccacttcagcgagacagctgagggcctgaccaccatccgggccttcagacatgagacccgcttcaagcagaggatgctggagctgacagacaccaacaacatcgcctacctgttcctgtctgctgccaaccgctggctggaggtgaggacagactacctgggcgcctgcatcgtgctgacagccagcatcgccagcatcagcggcagcagcaacagcggcctggtgggcctgggcctgctgtatgccctgaccatcaccaactacctgaactgggtggtgaggaacctggccgacctggaggtgcagatgggcgctgtgaagaaggtgaacagcttcctgaccatggagagtgaaaattatgagggcaccatggaccccagccaggtgcctgagcactggccccaggagggggagatcaagatccatgacctgtgtgtgcgctatgagaacaacctgaagcctgtgctgaagcacgtgaaggcctacatcaagccaggccagaaggtgggcatctgtggccgcacaggcagcggcaagagcagcctgagcctggccttcttcaggatggtggacatctttgatggcaagatcgtgattgatggcatcgacatcagcaagctgcccctgcacaccctgcggagccggctgagcatcatcctgcaggaccccatcctcttcagcggcagcatccgcttcaacctggaccctgagtgcaagtgcacagatgaccggctgtgggaggccctggagatcgcccagctgaagaacatggtgaagagcctgcccggcggcctggatgctgtggtgacagaaggaggagagaacttctctgtgggccagaggcagctgttctgcctggcccgggcctttgtgaggaagagcagcatcctgatcatggatgaggccacagccagcattgacatggccacagagaacatcctgcagaaggtggtgatgacagcctttgctgacagaacagtggtgaccatcgcccaccgggtgagcagcatcatggatgctggcctggtgctggtgttcagcgagggcatcctggtggagtgtgacacagtgcccaacctgctggcccacaagaatggcctcttcagcaccctggtgatgaccaacaagtag

SEQ ID NO: 158518 - DNA, 4650 bp, Artificial Sequence
  derived and/or modified sequence
atgagcctgagcttctgcggcaacaacatcagcagctacaacatcaatgacggagtgctgcagaactcctgcttcgtcgacgccttaaacctggtccctcacgtgtttctgctgttcatcacatttcccatcctgttcatcggctggggctcccaatcgagtaaggtccaaatccatcacaatacttggctgcatttccccgggcacaacctacggtggatccttactttcgctctgctgtttgtacatgtgtgcgagattgcagagggcatcgtgagcgattcacggagggagtctaggcatctacacttgttcatgccagccgtgatgggctttgtagccactactacctccatcgtttattaccacaatatagagactagcaattttcccaaactgttgttggctctcttcctatattgggtgatggcctttatcacaaaaacgataaaactcgtcaagtattgtcaatctggactggacatttccaatctccggttttgtatcaccggcatgatggtcattctgaacggtctcctgatggccgttgagattaatgtgatccgggtaagacggtatgtctttttcatgaaccctcagaaggtcaagcctcctgaagacttgcaagatcttggggtgcggttccttcagcccttcgtgaacctattatctaaagcaacctattggtggatgaacaccctcattatttcagctcataaaaagcccattgatctgaaggcgatcgggaagctgcctattgcaatgcgtgccgtaacgaactatgtatgcttgaaggatgcttatgaggagcaaaaaaagaaagttgctgaccacccaaatcggacaccttccatctggctggcgatgtatcgcgcatttgggagacccattcttctgagtagcaccttcagatacctggcagacctgttaggtttcgctgggcccctgtgcatctccggtattgttcaaagggtgaatgaaacccagaacggcacaaataataccactggaatcagcgagactttgtctagtaaggagttccttgagaacgcttacgtgctggccgtgctgctgttcctggctctcattctgcaaagaaccttcctgcaagcttcatattacgtgactatcgagactggcatcaatctgcgcggggccttgctagccatgatctacaataagattctgcggctaagcaccagtaatctgtccatgggtgagatgaccttgggccagattaacaatcttgtggccatcgagactaatcagctcatgtggttcctgtttctgtgccctaatctatgggcaatgcccgtgcaaattataatgggcgtaattctgctgtacaatctgctgggctcctccgcgttggtaggtgctgctgtgattgtgttgctggcacccatccaatacttcattgccacgaagctggccgaggcacagaagtctaccctggactacagtaccgaaaggctgaagaagaccaacgaaatacttaagggaatcaagctcctcaagctgtatgcctgggagcacattttctgtaagtctgtagaagaaacccggatgaaagagctgtcctccttgaaaacctttgcactgtatacgtctctatctatctttatgaacgctgccatcccaatagcggctgtcctcgccaccttcgtcacccatgcctatgcctctggcaataacctgaagccagccgaggcgtttgccagtctgtctctcttccatattttggtgacacctctgtttcttctgtctaccgtagtacggtttgccgtgaaagccatcatcagcgttcagaaacttaatgaattcctgctctcagatgaaatcggtgatgacagctggcgtactggagagagtagcctgcctttcgagagctgtaaaaaacatacaggggtccaaccgaaaaccatcaaccggaagcagccagggaggtatcatctcgactcctatgaacagagcacaagacgcttgagacccgcagaaaccgaagatatcgccatcaaggtaacgaatggatatttctcctggggttcggggttggcgacgctgtcaaatatcgatattcgaatccctactggtcaactcactatgatagttggacaagtcggttgcggaaaatccagtctgcttctcgcaatccttggagaaatgcagacacttgagggaaaagtccattggagcaacgtgaatgagagtgaaccatcatttgaagcaactagatctaggaatagatattcagttgcttacgccgcccagaagccctggcttctaaacgctaccgttgaagagaacataacctttggcagtcctttcaacaagcagcggtataaggctgtgacagacgcgtgctccctgcagcccgacatcgatctactgccctttggagaccagactgagattggcgagaggggaatcaatctctcaggcggtcaaaggcaacggatttgcgtcgctcgtgccttgtatcaaaatacaaacatcgtctttctggatgacccttttagtgccctggacatccatttgagcgatcacttgatgcaggaggggatcctaaagttcctacaggatgataagaggaccctagttctcgtgacccataaattacagtatctgactcatgcagattggattattgcaatgaaagacggcagtgttctgagggagggcactctcaaggatatccagactaaagacgtggagctttatgagcattggaaaaccctgatgaaccgccaagatcaggagttggaaaaagatatggaagctgaccagaccactctggagcgaaaaactctgagacgagcaatgtacagtcgtgaggcaaaagcccagatggaagatgaagatgaggaggaggaggaggaggaagacgaggatgacaatatgtccactgtgatgaggctgcgcactaagatgccatggaaaacttgctggcgctacctcacctctggcggcttttttctgctcatcctcatgatcttttctaaactgctgaagcatagtgtaatagtggccatcgattattggttggccacatggacaagcgagtatagcatcaacaacacagggaaggccgatcaaacgtattatgtggctgggttctccatcctgtgcggtgcagggatttttttgtgcctggtcacctctctcacagtagagtggatggggctcaccgccgcaaaaaatctgcaccacaaccttctcaataagattatcctgggacctattagatttttcgatactaccccactgggtctgatactgaaccggttttccgcggatacgaatatcatcgaccagcatatccctcccactctcgaatctttgacccggtcgaccttgctgtgtctttccgccattggaatgattagctatgccacccccgtgtttttggtggctctgcttcctctcggggtggctttctactttattcagaaatatttccgggtggccagtaaagaccttcaggaattggacgactctacccagcttcctttattgtgtcatttcagtgaaacagccgaaggtttgactacaattcgcgcctttcggcatgagacacgatttaaacagaggatgctcgaactgacggatactaataacattgcttatctattcttgagcgccgctaaccggtggctggaggtgaggacggattacctgggggcttgcattgtcctcaccgcatcaattgctagcatcagtgggagcagcaattcaggcttggttggcctgggactgttgtacgctctcacaattactaattatctcaattgggtcgtaagaaacctggccgatctggaagtccagatgggtgccgttaaaaaggtaaactcttttctcacaatggagagtgagaactatgagggcaccatggatcccagtcaggtcccagaacattggccgcaggagggtgagatcaagatccatgacctttgcgtaaggtatgagaacaatctcaagcccgtgcttaaacatgtaaaggcctatataaagccagggcaaaaggttgggatctgcggccggaccggatccggaaagagttccctctctttggcttttttcagaatggtggacatttttgacggaaaaatcgtgatcgacggcatagatatctccaagctgcccttacataccttaaggagccgtctgagcattatcctgcaggaccctatacttttcagtgggtctattcggttcaatcttgatcccgaatgtaaatgtaccgacgaccggctctgggaagccctagagatcgcccagctgaagaacatggtcaaaagccttcctggcggacttgatgcagtggttaccgaaggaggcgagaacttcagtgtgggccagaggcagctgttctgcctcgcccgggcttttgtgcgtaagagctccatcctaatcatggatgaggccaccgcgagcattgacatggccaccgagaacatcctacagaaggttgtaatgactgcatttgccgatcggactgttgttaccatagcccacagggtgagttccatcatggacgcgggattggtgctggttttctccgaaggcatcttagttgaatgtgataccgtgccaaatctcctcgcacataaaaacggactgttcagtacactggtgatgactaacaagtag

SEQ ID NO: 158519 - DNA, 4542 bp, Artificial Sequence
  derived and/or modified sequence
atgagcctgagcttctgcggcaacaacatcagcagctacaacatcaacgacggtgtcctgcagaactcgtgttttgtagatgctttaaacctcgttcctcacgtcttcctactttttatcaccttccctatcttattcatcggatgggggagccaaagctccaaggtccagatccaccacaatacctggctccatttcccaggacacaacttgagatggatccttacattcgccctgctcttcgtacacgtatgcgagatagccgaagggattgtgagtgacagcaggagggagtcaagacacctccatctgttcatgccagccgtgatggggttcgtcgccaccaccaccagcatcgtgtattaccacaacatagagacgtcaaatttccctaaattgcttttggccctgtttctgtactgggtgatggcattcattaccaagaccataaaattagtgaagtactgtcaaagtggactcgatatcagtaacctgaggttctgtatcacagggatgatggtgatcctgaacggactgttgatggcagttgaaatcaatgtgatccgtgtgcggagatatgtattcttcatgaatccacagaaagtgaaacctccagaggatctgcaggacctcggcgtccgctttctgcaaccctttgtgaacctcttgagcaaggccacttactggtggatgaacacactgatcatctctgcgcataagaagccaatagacctcaaagctatcggaaagttaccaattgccatgcgagccgtcaccaattatgtgtgcctgaaggatgcctatgaggagcagaagaaaaaggtcgcagaccaccctaacaggacccccagtatttggttagctatgtaccgggctttcggccgtcccattttgctgtcttctacctttcgttatctggctgacctgttggggttcgctgggcctctctgtatctccggcatcgtgcagcgggtgaacgaaacccaaaatgggacgaacaacacaaccggaatcagcgagactctgtctagcaaggaattccttgagaatgcctacgttctcgcagtgttgctgtttctcgcacttattctccagaggactttcctgcaagcttcatactacgtcacaattgagacgggcataaacttacggggcgccctcttagccatgatctacaataaaattctcaggctgagcacttctaatctttcaatgggggaaatgaccctggggcaaatcaacaatctggtcgctatcgagaccaaccagttaatgtggtttctgtttctttgtcctaacctatgggctatgcccgtgcaaattatcatgggggttatcctgctgtataacctactcggttcttccgctttagtgggagccgcagttatcgtcttgctggcccccatccagtatttcattgccacaaagctggctgaagcacaaaagtctactttggactatagtactgagcggctgaaaaagactaacgagattttaaaaggcatcaaactactgaaattgtacgcctgggagcatattttttgcaaatcagttgaagagaccagaatgaaagagttgtcctccttgaaaacctttgctctgtacacctcgctctccatcttcatgaatgcggccatccctattgccgctgtgctggcaacattcgtaacacacgcttacgcatctggtaataaccttaagcctgcggaggcgttcgccagcctgtccctgtttcacatcctggttactcccctcttccttttgtcaactgtagtgcggtttgccgtgaaagccatcattagtgttcagaaactcaacgaattcttgctgtccgatgagattggagacgacagttggcggactggggagtcgtccctgccattcgagtcctgtaagaagcataccggtgtcgtgacaaacgggtacttttcgtggggctccggtcttgcgaccctgagtaatatcgatatccggatccccactggccagctcactatgatcgttggtcaggtaggctgcggaaaatcaagtctgctgctcgctattcttggcgagatgcagacgttggagggaaaggtgcactggtcaaacgtgaatgaatccgagccttccttcgaggcgacaaggtcaaggaatcggtactctgtggcctacgcagcccagaaaccctggctgcttaatgcaactgtggaagagaatattacttttgggagccctttcaacaagcagagatacaaggccgtgacagacgcgtgctctcttcaacctgacatcgaccttcttccgtttggtgatcagacagaaatcggtgagcgagggatcaacctgagcggcggtcagcgacagcggatatgcgtcgctagagctctatatcaaaataccaatatcgtctttctggacgaccccttctcagcgctggatatccacttgagcgatcaccttatgcaagaaggaatactgaagttccttcaagatgataagaggactctagtgctggtgacccacaaactgcaatacctaacccacgccgattggatcatagcgatgaaggacggcagtgtactgcgcgagggaacactaaaggatattcagactaaagacgttgagctctacgagcactggaaaaccctaatgaacaggcaagatcaggaattagagaaggacatggaagcagaccagacaacactcgaaagaaagacgcttcgaagggcgatgtattccagggaagccaaggcacagatggaggacgaagacgaagaagaggaggaagaggaggatgaagatgacaacatgagtaccgtgatgaggttacgaactaagatgccatggaagacctgctggagatacctgacgtcagggggttttttcctcctcattctaatgattttctcaaagcttctgaagcacagtgtcatcgtggcaatagactactggctggcgacgtggacaagtgaatactcgatcaataacacgggaaaggccgaccagacttattatgtggccgggtttagcattctgtgcggtgccgggattttcctctgtctcgttacatctttaacagtagaatggatgggattgaccgcagccaaaaatcttcatcacaatctcttaaacaaaattatcctgggccctataaggttctttgacacaacccctctggggctgattttgaatcggttctccgcggacactaatatcatcgatcagcacatacccccaaccctggaatctctcacccgcagcacattattatgcctgagtgccatcggcatgattagctatgccacaccagttttccttgtggcactgctgcccctgggagtggccttctacttcatccagaagtacttccgcgtggcctccaaagatcttcaggaattggacgatagtacccagcttcctttgttgtgtcatttttccgaaaccgcagaagggttgacaacaatacgggcattccgccatgagactcggtttaagcagaggatgcttgagttgaccgatacaaacaacattgcctacctgttcttgtccgctgctaaccgatggttggaagtcaggactgactatttgggagcctgcatcgtgctcaccgcttcaatcgccagcatcagcggcagcagcaatagtgggctggtcggtttgggcctcctgtacgctttgacaattaccaattatcttaactgggtggtcagaaacctcgccgacttagaggtgcagatgggggcagtgaagaaagtcaattccttcctgactatggaaagcgagaactacgaaggcacaatggacccttcacaagtgccagaacattggccacaggaaggcgaaattaagatccatgatctttgcgttagatatgagaataatttaaaacccgtgcttaaacacgtgaaagcctatattaagccagggcagaaggtgggcatctgcggtcgcacagggtctgggaagagcagtctgagtctggcattctttcgaatggtcgacattttcgatggcaaaattgttatcgatgggatagatatcagcaagctcccattacataccttgcgcagcaggttatccatcatattgcaggatccaatcctgtttagtggctccattaggtttaatctcgacccggagtgtaagtgcacggacgaccggctctgggaagccctggagatcgctcagttgaaaaatatggtgaagtccctgcccggtggactcgacgccgtggtcaccgagggcggcgaaaatttttctgtgggccagaggcagttattctgtttagctcgcgcgttcgttcggaagagctccattctcattatggatgaagccactgccagtattgacatggcaacagaaaatatcctgcagaaggtggtaatgactgccttcgccgaccgaaccgtggtcacgatagctcacagggtgagctcaattatggatgccggattagtcctagtatttagcgagggaatcttagttgaatgcgacactgtgcctaatctgctggcccataagaacgggttattcagtactctggtgatgacaaacaagtag

SEQ ID NO: 158520 - DNA, 4650 bp, Artificial Sequence
  derived and/or modified sequence
atgagcctctccttttgcggtaataacatatcttcctataacatcaacgacggggtgctccagaactcttgcttcgtcgatgctttgaacctggttccacacgtgtttctcctgttcataacctttcccatactgtttattgggtggggatcccagagttccaaggtgcaaatccaccacaatacctggcttcactttcctggacataatctgaggtggatcctcacatttgcactgctgtttgtgcacgtttgcgagattgccgagggaattgtatccgatagccgccgagagtcaaggcacctgcatctcttcatgcctgctgtgatgggtttcgtcgctacgacgacatccatcgtgtattatcacaatatcgaaacgtccaacttccctaagctgctgctggctctctttctgtattgggtcatggcctttatcacaaagacgatcaagctagttaaatactgtcagtcggggttggacatatcaaacctgcgcttctgcatcactggcatgatggtgattctgaatggattgttgatggccgtcgagatcaacgttatccgggttcgccgatatgtgtttttcatgaatcctcaaaaggtaaaaccgccagaggatcttcaggatctcggggttagatttctgcagccttttgtaaatctcctatctaaagccacttattggtggatgaacaccctaatcattagtgctcacaagaagcccattgatctgaaagccatagggaagcttcccatagctatgcgagctgtgaccaactacgtttgcctcaaggatgcctatgaagagcagaaaaagaaagttgcagatcacccaaaccggaccccctcaatctggctggctatgtatagggcatttggccgtccgatcttgttaagtagtaccttccgttatttagcagatctgcttggtttcgccggtcccctctgcattagcggcatcgtccagcgcgtgaatgagacccagaatggcactaataatacgactggcatttcagaaactctatcttctaaggaattcctggaaaacgcttacgtactggccgtgcttctcttcttggccttaatcttgcagcgcacgtttctgcaagctagttattacgtgacgatcgagaccggcatcaacttgcgcggagccctgctagcaatgatctataataaaatactgagactgtccacctctaacttgtcgatgggagagatgaccctgggacagattaataacctggtggctatcgaaacaaatcaactgatgtggtttctgtttctctgtccaaatctgtgggccatgcccgttcagatcatcatgggagtgatattactgtacaacctcctcgggtccagcgccctggtcggtgcggctgttattgtgctcctcgcccctatacagtactttatcgccacaaaattagcagaggcacagaagtcaacacttgactacagtaccgagcggcttaaaaaaaccaatgagatcttgaaaggaattaagctgttaaagctctacgcatgggaacatatattttgcaagtccgtggaagaaacccgaatgaaagagttaagttccctgaagacctttgctttatatacctccctcagcatcttcatgaacgccgctattccgatcgccgcagtcctggccacctttgtaactcacgcctatgctagtggcaataaccttaaaccagccgaggccttcgctagtctgtccctgttccacattcttgttaccccgctctttctcctatcaactgttgtgcgcttcgccgtgaaggccattatttccgttcaaaagttgaacgagttcctattgagtgatgagattggagatgatagttggcgcactggggaaagcagccttccgttcgagagctgtaagaaacacaccggcgtgcaaccaaagacgattaaccgcaaacagcctggacggtatcatctcgacagttacgagcaaagcacaaggcgcctccggccagctgagacagaggacattgccattaaggtgacaaatggctattttagttggggctccggcctcgccaccctttctaatatagatattagaatccccactggtcagctgacgatgatcgtaggacaggtggggtgtggaaagtcctccttacttctcgcaatacttggcgagatgcaaaccttagaagggaaggtacattggagcaatgttaatgagtccgagccaagctttgaagcaacacggagcaggaatagatactcagtggcatacgcggctcagaaaccgtggcttctcaatgcaacggtggaggagaatattacctttggctccccatttaataagcagagatataaggccgtaacggatgcttgctccttacaaccagacatcgacttgcttccattcggggaccagacggagattggagagcgcggtattaaccttagtgggggacagagacagagaatctgtgtggcaagagccctttatcagaatacaaatattgtgtttctggacgaccctttttcagctctcgacatccatctctctgaccatctgatgcaggagggaatccttaagtttctccaggatgataagagaacactggttcttgtaacacataagttacaatacctcacccacgcagactggatcattgccatgaaagacgggtccgtgctgcgagaaggtactctgaaagacattcaaaccaaagacgtggaattgtacgagcattggaagacgctgatgaataggcaggaccaagagctggagaaggacatggaagccgaccagactacactagagaggaaaacacttaggcgggctatgtattcccgggaggctaaggctcaaatggaggatgaagacgaggaggaggaagaggaagaggatgaggatgataatatgtcaactgtgatgaggctgagaacaaaaatgccttggaagacttgttggcgataccttaccagtggcggttttttcctcctgattctgatgattttttccaaactgctgaagcatagtgtgatcgtggccatagattattggctggccacctggacaagtgagtactcgattaacaacactgggaaggccgaccagacgtattatgtggctggattctcaattctttgcggtgcaggtatcttcttgtgcctggtcacaagccttacagtggaatggatgggactcaccgccgctaaaaatctgcatcacaatctcttgaacaagatcattctgggccctatcaggttttttgacactactcctctcggacttatcttaaaccgcttctcagccgatacgaacatcatcgatcagcacatcccccctacactggaatcactgacgagaagcactcttctctgtctctcagctatcggaatgatttcttatgcaactcccgtgtttctcgtagccttactacctttaggcgtggccttttactttatccagaagtatttccgggtagcttcaaaggacctccaggagcttgacgactctacccagctccctctgctgtgccacttcagcgagacagccgagggactgacgaccattagagcattcaggcacgaaactcgctttaagcagcggatgctcgagctgacagatacgaacaacattgcttacttgtttctcagcgcagccaacagatggctcgaagtgcggaccgattatttaggcgcatgcatagtattgacggcctcaatcgcgagtatctctgggagttcaaattcaggtctcgtgggcttggggttactctacgccttaacgattaccaattacctgaattgggtcgtgaggaacctggccgacttggaggttcagatgggggctgtgaaaaaggtgaacagttttctcacaatggagagcgaaaattacgaggggaccatggatccaagccaggttcccgaacactggccacaggaaggagagatcaaaatacacgacttatgtgtccgatatgaaaataacctcaagccagtgctgaagcacgttaaggcctatataaaaccaggccagaaggttggaatttgtggtcggactgggagcggcaagtcctcgctgagcttggcctttttcagaatggtagacatctttgacgggaaaattgtgatcgatgggatcgatatttcaaaactgccactacatacactacggtcacgattgtctattatacttcaggatccaattttgttctcaggctcaataaggttcaacctcgatcccgaatgcaaatgcaccgacgacagactgtgggaggctctggagatcgctcagctgaagaacatggtaaagtcattgccagggggtttggacgcagttgttactgaagggggagagaatttctcggtcgggcaaagacagctcttttgtttggcgcgagcctttgttcgaaagtcctcaattttaatcatggatgaagccacggcatcaatcgacatggcgacagagaacattctgcagaaagtggtcatgaccgcgtttgccgacagaaccgtcgtcaccatcgcgcacagggtcagcagcatcatggacgccggtttagttctggtgttctcagaagggatcctcgttgagtgcgacacggtgcccaacctccttgcccataaaaacggactgttttctaccctcgttatgacgaacaagtag

SEQ ID NO: 158521 - DNA, 4542 bp, Artificial Sequence
  derived and/or modified sequence
atgtccctgtcattctgcggcaataacataagttcttataatatcaacgatggagtgcttcagaactcctgcttcgttgacgctttaaatttggtgcctcatgtgtttttgttattcattaccttcccgattctttttattgggtgggggtcccagagctctaaagtgcagatccaccacaatacgtggctccacttccccggacacaatctcaggtggatactgacttttgccctactatttgtccacgtgtgcgaaatagctgaggggatcgtgtccgattctaggagggagtcgcgacatttacatcttttcatgccagcggtaatgggatttgtagcaactaccacctcaatcgtgtactaccataacattgaaacttctaattttcctaagctccttttggccttgttcctgtactgggtcatggcatttatcacgaagacgatcaaactcgtgaagtactgccagtccggacttgatatctctaaccttcgtttctgcataaccggcatgatggtgatcttgaacgggctgcttatggcagtggagatcaatgtcatccgtgtgcggaggtacgtcttcttcatgaacccccagaaggttaaacccccagaggacctgcaggacctcggggttcggtttttgcaaccgttcgtgaacctgctctctaaggcaacgtattggtggatgaatacactgataatttccgcacataaaaagcccatagatctgaaggcaatcggcaaactgccaatagctatgcgggctgttacgaattatgtttgccttaaggatgcctacgaagaacagaaaaagaaagttgctgatcatcctaaccggacccctagtatctggctggctatgtatcgagcctttgggaggcctatcctcttgagctccacctttagatatcttgctgatctcctgggattcgctggccctttgtgcatcagcgggatcgtacagcgggtgaatgaaacacaaaacgggaccaacaatactaccgggatcagtgaaacccttagtagcaaggagttccttgagaatgcttatgtgctggctgtactcctctttctggcattgatccttcagcggacatttctgcaggcaagttactacgtgactattgagacgggcatcaacctcagaggtgcattactggcgatgatttacaataaaatcttacgactgtctacatccaacctgagtatgggggaaatgacacttggccagatcaataatctggttgctatcgaaacgaaccagcttatgtggtttcttttcttgtgccctaacctgtgggccatgccagtgcagattatcatgggcgtaatcctcctttacaatctgctggggtcctccgctctggtgggagccgctgtgatcgtgctgctggcccctatccagtactttattgcaaccaagttggcagaagcccaaaaaagcaccctggattactccaccgaacgcctaaagaaaactaatgagatcctgaaaggaatcaagctccttaagctgtacgcttgggaacatatcttctgcaagtccgttgaggaaacacggatgaaagagctgagttccctgaaaacttttgcgctgtatacatcactcagcattttcatgaatgcggcaattcctatagccgcagtcctggctaccttcgtgacacacgcctatgcatccggcaacaatcttaagcccgcagaggccttcgcttcgctgtctttgtttcacatccttgtcactcccctgttcctcctcagtaccgtggtgcgttttgctgttaaggcgatcatatccgtgcaaaagctgaacgagtttctcttgtctgacgagatcggggacgactcctggcgaaccggagaaagcagtctcccttttgaatcctgcaaaaagcatactggtgtagtcaccaatggttacttttcttggggttcaggtctggccaccctttccaacatcgatatcaggattcccactggccagttaactatgattgtgggacaggtcggatgtggaaaaagctctctgcttcttgccatactcggggagatgcagacactggagggtaaggttcactggtccaatgtgaatgaatctgagcccagctttgaggcaacgagatctcgcaacagatatagcgtagcttacgccgctcagaagccatggcttctcaatgcgaccgtagaggaaaacattactttcggttcccccttcaataaacagcgctataaggcagtgactgatgcctgtagccttcaacctgacattgatctgttgcccttcggagaccagaccgagatcggcgaaagaggaataaatctttccggtggacaacggcagaggatctgcgtggcaagagccctctaccagaatacaaacatcgtgtttctggacgacccgttcagcgccctggatatacacttaagcgaccacctcatgcaggaggggattctgaaattccttcaggacgacaagcggaccctggtgctggtgacccacaagctgcaatacctcacccatgccgattggatcatagcaatgaaggacgggagtgtgctgcgtgaaggcaccctgaaggacatccagaccaaggacgtggaactgtatgagcattggaaaacacttatgaacaggcaggatcaggaacttgaaaaggatatggaagcagaccagacgacgctggagagaaaaacactgcggcgagctatgtactctagggaggccaaggcacagatggaggatgaggatgaggaagaggaagaagaggaggatgaagatgataacatgtcgaccgtgatgcggcttagaactaaaatgccctggaaaacctgctggcggtatctgactagtggaggattctttctgctgattttaatgattttttcgaagctgctaaagcattccgtgatcgtggctattgactactggttagcgacctggacctctgagtattcaataaacaatacaggcaaggccgaccagacctattacgtggcaggcttttctatactctgcggcgcagggatcttcctttgtctcgtcacatctctgaccgtcgagtggatgggtctgactgcagcaaaaaaccttcatcataacctgcttaataagatcatcttgggtccaattcggttttttgacacaaccccgctcgggttaattttgaatcgattttccgccgataccaatatcatcgatcagcacattcccccaaccctggagtcattaacccgatccacattgttatgtctttcagccatcggcatgatatcttatgccacgcctgtctttttggtcgcactgttgccactgggtgttgccttctacttcatccaaaagtacttccgggtcgcatctaaggacttacaagagctggacgactcgacgcagctgccacttctgtgccacttctctgaaaccgctgaagggctgacgactatccgcgcttttcggcacgagacacggtttaagcagagaatgcttgagctgacggacaccaacaacatcgcgtatttattcctgtccgccgctaataggtggctcgaagtgcgaaccgattacctgggcgcatgtatcgtactgaccgcgagcattgcatcaattagcggatcttccaattcaggtttagtcggattggggctgctgtatgcgctaaccattaccaactacctcaactgggtggtgcggaatctggccgacctggaggtacagatgggggcagtgaaaaaggttaactctttcctcacaatggagtcagaaaattacgagggaactatggacccttctcaggtgcctgagcactggccacaagagggggagatcaaaattcatgacctgtgcgtgcggtatgaaaataacctcaagcccgtcctaaaacatgtgaaagcctatatcaagccaggacagaaggtgggcatctgtgggagaaccggaagtggcaagtcttcactgagcctggcctttttcagaatggtggatatattcgatggtaagatagtgattgatggcatcgatatttccaaactgcccctgcatactttgcgctcccgattatccattatcctccaggatccgattctgttctctggatccatccggtttaatcttgacccggagtgcaagtgcaccgatgaccgcctgtgggaggctttggaaatagcacagcttaaaaacatggtgaaatccctgccaggtggcctggacgccgtggttacggagggtggggagaatttctctgtgggacagcgccaactgttttgcttggcacgcgcttttgtgcggaagagcagtatcctgattatggacgaggctaccgcctctatcgacatggccaccgagaacatcctacagaaagtggtcatgactgcattcgccgacagaaccgtcgtgacaatcgcccacagagtgtcctccatcatggacgctggcctcgttctggtcttctctgaagggatcctggttgagtgcgatactgtgcccaacctgcttgcacacaaaaacggcctcttcagtactctggtcatgaccaataaatag

SEQ ID NO: 158522 - DNA, 4650 bp, Artificial Sequence
  derived and/or modified sequence
atgagcctttcattttgtggtaacaacatttcttcatataatatcaacgatggtgtactacaaaattcctgctttgtggatgccctcaacctggtccctcatgtctttctgttgtttatcacttttccaatattgtttattgggtgggggagccaaagctcaaaagtacaaattcaccacaacacatggcttcattttccgggacataacctgagatggattcttacattcgctctcctgtttgtgcatgtctgtgaaatagcagaaggcattgtttcagactcgcggcgggaatcaaggcacctccacctctttatgccagccgtgatgggattcgttgccactacaacatcgatagtgtattatcataatatcgaaacatcaaattttcctaaattacttttagccctgttcctgtattgggtaatggcctttattacaaaaacaataaaattggttaagtactgtcagtctggcttggacatatcaaacctgcgtttctgcatcacaggcatgatggtcatcttgaatgggctcttgatggctgtggagatcaatgtcattcgagtcaggagatatgtatttttcatgaatcctcagaaagtaaagcctcctgaagacctccaggatctgggagtgagatttcttcaaccatttgtgaatttgctgtcaaaagcaacatactggtggatgaacacacttattatatctgctcacaaaaagcctattgatctgaaggcaattggaaaattgccaatagcaatgagagcagtaacaaattatgtttgcctgaaagatgcatatgaagaacaaaagaaaaaagttgcagatcatccaaatcggactccatctatatggcttgcaatgtacagagcttttgggcgaccaattctacttagtagcacattccgctatctggctgatttactgggttttgctggacctctttgtatttctggaatagttcagcgtgtgaatgaaacccagaatgggacaaataacacaactggaatttcagaaaccctctcatcaaaggaatttcttgaaaacgcttacgttctagcagttcttctcttcttggctcttattctgcaaaggacatttttgcaggcttcctactatgtaaccatagagactggcattaacctccgtggagctctgctggccatgatttataataaaatccttaggctctctacgtctaacttatccatgggggagatgactctggggcagatcaacaacttagtcgccattgaaactaatcaactcatgtggtttttgttcctgtgtcctaatctatgggctatgcctgttcagatcataatgggcgtgattctgctctataatttacttggatcaagtgcattggtcggtgcagctgtcattgtgctccttgcgccaattcagtactttattgctacaaagttggcagaggctcagaaaagtacacttgattattccactgagagactcaagaaaacaaatgaaatattgaaaggcatcaaacttctaaaattgtatgcctgggaacacattttctgcaaaagtgtggaggaaacaagaatgaaagaactatctagtctcaaaacctttgcactatatacatcactctccatcttcatgaatgcagcaattcccatagcagctgttcttgctacatttgtgacccatgcgtatgccagtggaaacaatctgaaacctgcagaggcctttgcttcactgtctctcttccatatcctggtcacaccactgttcctgctctccacggtggtcagatttgcagtcaaagccatcataagtgttcaaaagctgaatgagtttctcttgagtgatgagattggtgacgacagttggcgaactggtgaaagttcgcttccttttgagtcctgtaagaagcacactggagttcagccaaaaactataaacaggaaacagcctggaagatatcacctggacagctatgagcaatcaacacggcgtctacgtcccgcagaaacagaggacattgcaataaaggtcacaaatggatacttttcatggggcagtggtttagctacattatccaatatagatattcgaattccaacaggtcagttaaccatgattgtgggccaagtaggatgtgggaagtcctctcttctccttgccatcctcggtgagatgcagacattggaaggaaaagttcactggagcaatgtaaatgaatctgagccttcttttgaagcaaccagaagtaggaacaggtactctgtggcatatgcagctcaaaagccttggctattaaatgctacagtagaagaaaatattacttttggaagtccttttaacaaacagaggtacaaagctgtcacagatgcctgttctcttcagccagatattgacttattaccatttggagatcaaactgaaattggagagaggggcatcaacctgagtgggggacagaggcagagaatctgtgtggcacgagcgctgtatcaaaacaccaacattgtctttttggatgatccattctcagccctggacattcacttgagtgatcatttaatgcaggaggggattttgaaattcctgcaagatgacaaaaggacactcgttcttgtgactcacaaattacagtatctgacgcatgctgactggatcatagccatgaaagatggaagtgtcctaagagaaggaactttgaaggacattcaaaccaaagatgttgagctttatgaacactggaaaacacttatgaatcggcaagatcaagaattagaaaaggatatggaagctgaccaaactactttagagaggaaaactctccgacgggccatgtattcaagagaagccaaagcccagatggaggacgaagacgaagaggaagaagaggaggaagatgaggatgataacatgtccactgtaatgaggctcaggactaaaatgccatggaaaacctgctggcgctacctgacatctggaggattcttcctgctcatcctgatgattttctctaagcttttgaagcattcggtcattgtagctatagactattggctggccacatggacatcggagtacagtataaacaatactggaaaagctgatcagacctactatgtggctggctttagcatactctgtggagcaggcattttcctttgccttgttacatccctcactgtagaatggatgggtctcacagctgccaaaaatcttcaccacaaccttctcaataagataatccttggaccaataaggttttttgataccacacccctgggactgattctcaatcgcttttcagctgatactaatatcattgatcagcacatccctccaaccttggaatctctaactcgctcaacactgctctgcctgtctgccattgggatgatttcttatgctactcctgtgttcctggttgctctcctgccccttggtgttgccttttattttatccagaaatactttcgggttgcctctaaggacctccaggaacttgacgatagtacccagctccctctgctctgtcacttctcagaaacagcagaaggactcaccaccattcgggcctttaggcatgaaaccagatttaaacaacgtatgctggaactgacggatacaaacaacattgcctacttatttctctcagctgccaacagatggctggaggtcaggacggattatctgggagcttgcattgtcctcactgcatctatagcatccattagtgggtcttcgaattctggattggtaggcttgggtcttctgtatgcacttacgataaccaattatttgaattgggttgtgaggaacttggctgacctggaggtccagatgggtgcagtgaagaaggtgaacagtttcctgactatggagtcagagaactatgaaggcacaatggatccttctcaagttccagaacattggccacaagaaggggagatcaagatacatgatctgtgtgtcagatatgaaaataatctgaaacctgttcttaagcacgtcaaggcttacatcaaacctggacaaaaggtgggcatatgtggtcgcactggcagtgggaaatcatcgttatctctggctttcttcagaatggttgatatatttgatggaaaaattgtcattgatgggatagacatttccaaattaccactgcacacactacgttctagactttcaatcattctgcaggatccaatactattcagtggttccattagatttaatttagatccagagtgcaaatgcacagatgacagactctgggaagccttagaaattgctcagctgaagaatatggtcaaatctctacctggaggtctagatgcggttgtcactgaaggtggggagaattttagcgttggacagagacagctattttgccttgccagggcctttgtccgcaaaagcagcattcttattatggatgaggcaacagcttccattgacatggccacagagaatattttgcaaaaagtagtaatgacagcctttgcagaccggaccgtggtgacaatagctcaccgtgtctcttctattatggatgcaggccttgttttagtcttttctgagggtattttagtggagtgtgatactgtcccaaatttgctcgcccacaagaatggcctcttttccactttggtgatgaccaacaagtag

SEQ ID NO: 158523 - DNA, 4562 bp, Artificial Sequence
  derived and/or modified sequence
agtaaaccatataagaagaaatgagcctttcattttgtggtaacaacatttcttcatataatatcaacgatggtgtactacaaaattcctgctttgtggatgccctcaacctggtccctcatgtctttctgttgtttatcacttttccaatattgtttattgggtgggggagccaaagctcaaaagtacaaattcaccacaacacatggcttcattttccgggacataacctgagatggattcttacattcgctctcctgtttgtgcatgtctgtgaaatagcagaaggcattgtttcagactcgcggcgggaatcaaggcacctccacctctttatgccagccgtgatgggattcgttgccactacaacatcgatagtgtattatcataatatcgaaacatcaaattttcctaaattacttttagccctgttcctgtattgggtaatggcctttattacaaaaacaataaaattggttaagtactgtcagtctggcttggacatatcaaacctgcgtttctgcatcacaggcatgatggtcatcttgaatgggctcttgatggctgtggagatcaatgtcattcgagtcaggagatatgtatttttcatgaatcctcagaaagtaaagcctcctgaagacctccaggatctgggagtgagatttcttcaaccatttgtgaatttgctgtcaaaagcaacatactggtggatgaacacacttattatatctgctcacaaaaagcctattgatctgaaggcaattggaaaattgccaatagcaatgagagcagtaacaaattatgtttgcctgaaagatgcatatgaagaacaaaagaaaaaagttgcagatcatccaaatcggactccatctatatggcttgcaatgtacagagcttttgggcgaccaattctacttagtagcacattccgctatctggctgatttactgggttttgctggacctctttgtatttctggaatagttcagcgtgtgaatgaaacccagaatgggacaaataacacaactggaatttcagaaaccctctcatcaaaggaatttcttgaaaacgcttacgttctagcagttcttctcttcttggctcttattctgcaaaggacatttttgcaggcttcctactatgtaaccatagagactggcattaacctccgtggagctctgctggccatgatttataataaaatccttaggctctctacgtctaacttatccatgggggagatgactctggggcagatcaacaacttagtcgccattgaaactaatcaactcatgtggtttttgttcctgtgtcctaatctatgggctatgcctgttcagatcataatgggcgtgattctgctctataatttacttggatcaagtgcattggtcggtgcagctgtcattgtgctccttgcgccaattcagtactttattgctacaaagttggcagaggctcagaaaagtacacttgattattccactgagagactcaagaaaacaaatgaaatattgaaaggcatcaaacttctaaaattgtatgcctgggaacacattttctgcaaaagtgtggaggaaacaagaatgaaagaactatctagtctcaaaacctttgcactatatacatcactctccatcttcatgaatgcagcaattcccatagcagctgttcttgctacatttgtgacccatgcgtatgccagtggaaacaatctgaaacctgcagaggcctttgcttcactgtctctcttccatatcctggtcacaccactgttcctgctctccacggtggtcagatttgcagtcaaagccatcataagtgttcaaaagctgaatgagtttctcttgagtgatgagattggtgacgacagttggcgaactggtgaaagttcgcttccttttgagtcctgtaagaagcacactggagttgtcacaaatggatacttttcatggggcagtggtttagctacattatccaatatagatattcgaattccaacaggtcagttaaccatgattgtgggccaagtaggatgtgggaagtcctctcttctccttgccatcctcggtgagatgcagacattggaaggaaaagttcactggagcaatgtaaatgaatctgagccttcttttgaagcaaccagaagtaggaacaggtactctgtggcatatgcagctcaaaagccttggctattaaatgctacagtagaagaaaatattacttttggaagtccttttaacaaacagaggtacaaagctgtcacagatgcctgttctcttcagccagatattgacttattaccatttggagatcaaactgaaattggagagaggggcatcaacctgagtgggggacagaggcagagaatctgtgtggcacgagcgctgtatcaaaacaccaacattgtctttttggatgatccattctcagccctggacattcacttgagtgatcatttaatgcaggaggggattttgaaattcctgcaagatgacaaaaggacactcgttcttgtgactcacaaattacagtatctgacgcatgctgactggatcatagccatgaaagatggaagtgtcctaagagaaggaactttgaaggacattcaaaccaaagatgttgagctttatgaacactggaaaacacttatgaatcggcaagatcaagaattagaaaaggatatggaagctgaccaaactactttagagaggaaaactctccgacgggccatgtattcaagagaagccaaagcccagatggaggacgaagacgaagaggaagaagaggaggaagatgaggatgataacatgtccactgtaatgaggctcaggactaaaatgccatggaaaacctgctggcgctacctgacatctggaggattcttcctgctcatcctgatgattttctctaagcttttgaagcattcggtcattgtagctatagactattggctggccacatggacatcggagtacagtataaacaatactggaaaagctgatcagacctactatgtggctggctttagcatactctgtggagcaggcattttcctttgccttgttacatccctcactgtagaatggatgggtctcacagctgccaaaaatcttcaccacaaccttctcaataagataatccttggaccaataaggttttttgataccacacccctgggactgattctcaatcgcttttcagctgatactaatatcattgatcagcacatccctccaaccttggaatctctaactcgctcaacactgctctgcctgtctgccattgggatgatttcttatgctactcctgtgttcctggttgctctcctgccccttggtgttgccttttattttatccagaaatactttcgggttgcctctaaggacctccaggaacttgacgatagtacccagctccctctgctctgtcacttctcagaaacagcagaaggactcaccaccattcgggcctttaggcatgaaaccagatttaaacaacgtatgctggaactgacggatacaaacaacattgcctacttatttctctcagctgccaacagatggctggaggtcaggacggattatctgggagcttgcattgtcctcactgcatctatagcatccattagtgggtcttcgaattctggattggtaggcttgggtcttctgtatgcacttacgataaccaattatttgaattgggttgtgaggaacttggctgacctggaggtccagatgggtgcagtgaagaaggtgaacagtttcctgactatggagtcagagaactatgaaggcacaatggatccttctcaagttccagaacattggccacaagaaggggagatcaagatacatgatctgtgtgtcagatatgaaaataatctgaaacctgttcttaagcacgtcaaggcttacatcaaacctggacaaaaggtgggcatatgtggtcgcactggcagtgggaaatcatcgttatctctggctttcttcagaatggttgatatatttgatggaaaaattgtcattgatgggatagacatttccaaattaccactgcacacactacgttctagactttcaatcattctgcaggatccaatactattcagtggttccattagatttaatttagatccagagtgcaaatgcacagatgacagactctgggaagccttagaaattgctcagctgaagaatatggtcaaatctctacctggaggtctagatgcggttgtcactgaaggtggggagaattttagcgttggacagagacagctattttgccttgccagggcctttgtccgcaaaagcagcattcttattatggatgaggcaacagcttccattgacatggccacagagaatattttgcaaaaagtagtaatgacagcctttgcagaccggaccgtggtgacaatagctcaccgtgtctcttctattatggatgcaggccttgttttagtcttttctgagggtattttagtggagtgtgatactgtcccaaatttgctcgcccacaagaatggcctcttttccactttggtgatgaccaacaagtag

SEQ ID NO: 158524 - DNA, 4650 bp, Artificial Sequence
  derived and/or modified sequence
atgagcctgagcttctgcggcaacaacatcagcagctacaacatcaacgacggcgtgctgcagaacagctgcttcgtggacgccctgaacctggtgccccacgtgttcctgctgttcatcaccttccccatcctgttcatcggctggggcagccagagcagcaaggtgcagatccaccacaacacctggctgcacttccccggccacaacctgagatggatcctgaccttcgccctgctgttcgtgcacgtgtgcgagatcgccgagggcatcgtgagcgacagcagaagagagagcagacacctgcacctgttcatgcccgccgtgatgggcttcgtggccaccaccaccagcatcgtgtactaccacaacatcgagaccagcaacttccccaagctgctgctggccctgttcctgtactgggtgatggccttcatcaccaagaccatcaagctggtgaagtactgccagagcggcctggacatcagcaacctgagattctgcatcaccggcatgatggtgatcctgaacggcctgctgatggccgtggagatcaacgtgatcagagtgagaagatacgtgttcttcatgaacccccagaaggtgaagccccccgaggacctgcaggacctgggcgtgagattcctgcagcccttcgtgaacctgctgagcaaggccacctactggtggatgaacaccctgatcatcagcgcccacaagaagcccatcgacctgaaggccatcggcaagctgcccatcgccatgagagccgtgaccaactacgtgtgcctgaaggacgcctacgaggagcagaagaagaaggtggccgaccaccccaacagaacccccagcatctggctggccatgtacagagccttcggcagacccatcctgctgagcagcaccttcagatacctggccgacctgctgggcttcgccggccccctgtgcatcagcggcatcgtgcagagagtgaacgagacccagaacggcaccaacaacaccaccggcatcagcgagaccctgagcagcaaggagttcctggagaacgcctacgtgctggccgtgctgctgttcctggccctgatcctgcagagaaccttcctgcaggccagctactacgtgaccatcgagaccggcatcaacctgagaggcgccctgctggccatgatctacaacaagatcctgagactgagcaccagcaacctgagcatgggcgagatgaccctgggccagatcaacaacctggtggccatcgagaccaaccagctgatgtggttcctgttcctgtgccccaacctgtgggccatgcccgtgcagatcatcatgggcgtgatcctgctgtacaacctgctgggcagcagcgccctggtgggcgccgccgtgatcgtgctgctggcccccatccagtacttcatcgccaccaagctggccgaggcccagaagagcaccctggactacagcaccgagagactgaagaagaccaacgagatcctgaagggcatcaagctgctgaagctgtacgcctgggagcacatcttctgcaagagcgtggaggagaccagaatgaaggagctgagcagcctgaagaccttcgccctgtacaccagcctgagcatcttcatgaacgccgccatccccatcgccgccgtgctggccaccttcgtgacccacgcctacgccagcggcaacaacctgaagcccgccgaggccttcgccagcctgagcctgttccacatcctggtgacccccctgttcctgctgagcaccgtggtgagattcgccgtgaaggccatcatcagcgtgcagaagctgaacgagttcctgctgagcgacgagatcggcgacgacagctggagaaccggcgagagcagcctgcccttcgagagctgcaagaagcacaccggcgtgcagcccaagaccatcaacagaaagcagcccggcagataccacctggacagctacgagcagagcaccagaagactgagacccgccgagaccgaggacatcgccatcaaggtgaccaacggctacttcagctggggcagcggcctggccaccctgagcaacatcgacatcagaatccccaccggccagctgaccatgatcgtgggccaggtgggctgcggcaagagcagcctgctgctggccatcctgggcgagatgcagaccctggagggcaaggtgcactggagcaacgtgaacgagagcgagcccagcttcgaggccaccagaagcagaaacagatacagcgtggcctacgccgcccagaagccctggctgctgaacgccaccgtggaggagaacatcaccttcggcagccccttcaacaagcagagatacaaggccgtgaccgacgcctgcagcctgcagcccgacatcgacctgctgcccttcggcgaccagaccgagatcggcgagagaggcatcaacctgagcggcggccagagacagagaatctgcgtggccagagccctgtaccagaacaccaacatcgtgttcctggacgaccccttcagcgccctggacatccacctgagcgaccacctgatgcaggagggcatcctgaagttcctgcaggacgacaagagaaccctggtgctggtgacccacaagctgcagtacctgacccacgccgactggatcatcgccatgaaggacggcagcgtgctgagagagggcaccctgaaggacatccagaccaaggacgtggagctgtacgagcactggaagaccctgatgaacagacaggaccaggagctggagaaggacatggaggccgaccagaccaccctggagagaaagaccctgagaagagccatgtacagcagagaggccaaggcccagatggaggacgaggacgaggaggaggaggaggaggaggacgaggacgacaacatgagcaccgtgatgagactgagaaccaagatgccctggaagacctgctggagatacctgaccagcggcggcttcttcctgctgatcctgatgatcttcagcaagctgctgaagcacagcgtgatcgtggccatcgactactggctggccacctggaccagcgagtacagcatcaacaacaccggcaaggccgaccagacctactacgtggccggcttcagcatcctgtgcggcgccggcatcttcctgtgcctggtgaccagcctgaccgtggagtggatgggcctgaccgccgccaagaacctgcaccacaacctgctgaacaagatcatcctgggccccatcagattcttcgacaccacccccctgggcctgatcctgaacagattcagcgccgacaccaacatcatcgaccagcacatcccccccaccctggagagcctgaccagaagcaccctgctgtgcctgagcgccatcggcatgatcagctacgccacccccgtgttcctggtggccctgctgcccctgggcgtggccttctacttcatccagaagtacttcagagtggccagcaaggacctgcaggagctggacgacagcacccagctgcccctgctgtgccacttcagcgagaccgccgagggcctgaccaccatcagagccttcagacacgagaccagattcaagcagagaatgctggagctgaccgacaccaacaacatcgcctacctgttcctgagcgccgccaacagatggctggaggtgagaaccgactacctgggcgcctgcatcgtgctgaccgccagcatcgccagcatcagcggcagcagcaacagcggcctggtgggcctgggcctgctgtacgccctgaccatcaccaactacctgaactgggtggtgagaaacctggccgacctggaggtgcagatgggcgccgtgaagaaggtgaacagcttcctgaccatggagagcgagaactacgagggcaccatggaccccagccaggtgcccgagcactggccccaggagggcgagatcaagatccacgacctgtgcgtgagatacgagaacaacctgaagcccgtgctgaagcacgtgaaggcctacatcaagcccggccagaaggtgggcatctgcggcagaaccggcagcggcaagagcagcctgagcctggccttcttcagaatggtggacatcttcgacggcaagatcgtgatcgacggcatcgacatcagcaagctgcccctgcacaccctgagaagcagactgagcatcatcctgcaggaccccatcctgttcagcggcagcatcagattcaacctggaccccgagtgcaagtgcaccgacgacagactgtgggaggccctggagatcgcccagctgaagaacatggtgaagagcctgcccggcggcctggacgccgtggtgaccgagggcggcgagaacttcagcgtgggccagagacagctgttctgcctggccagagccttcgtgagaaagagcagcatcctgatcatggacgaggccaccgccagcatcgacatggccaccgagaacatcctgcagaaggtggtgatgaccgccttcgccgacagaaccgtggtgaccatcgcccacagagtgagcagcatcatggacgccggcctggtgctggtgttcagcgagggcatcctggtggagtgcgacaccgtgcccaacctgctggcccacaagaacggcctgttcagcaccctggtgatgaccaacaagtag

SEQ ID NO: 158525 - DNA, 4542 bp, Artificial Sequence
  derived and/or modified sequence
atgagcctgagcttctgcggcaacaacatcagcagctacaacatcaacgacggcgtgctgcagaacagctgcttcgtggacgccctgaacctggtgccccacgtgttcctgctgttcatcaccttccccatcctgttcatcggctggggcagccagagcagcaaggtgcagatccaccacaacacctggctgcacttccccggccacaacctgagatggatcctgaccttcgccctgctgttcgtgcacgtgtgcgagatcgccgagggcatcgtgagcgacagcagaagagagagcagacacctgcacctgttcatgcccgccgtgatgggcttcgtggccaccaccaccagcatcgtgtactaccacaacatcgagaccagcaacttccccaagctgctgctggccctgttcctgtactgggtgatggccttcatcaccaagaccatcaagctggtgaagtactgccagagcggcctggacatcagcaacctgagattctgcatcaccggcatgatggtgatcctgaacggcctgctgatggccgtggagatcaacgtgatcagagtgagaagatacgtgttcttcatgaacccccagaaggtgaagccccccgaggacctgcaggacctgggcgtgagattcctgcagcccttcgtgaacctgctgagcaaggccacctactggtggatgaacaccctgatcatcagcgcccacaagaagcccatcgacctgaaggccatcggcaagctgcccatcgccatgagagccgtgaccaactacgtgtgcctgaaggacgcctacgaggagcagaagaagaaggtggccgaccaccccaacagaacccccagcatctggctggccatgtacagagccttcggcagacccatcctgctgagcagcaccttcagatacctggccgacctgctgggcttcgccggccccctgtgcatcagcggcatcgtgcagagagtgaacgagacccagaacggcaccaacaacaccaccggcatcagcgagaccctgagcagcaaggagttcctggagaacgcctacgtgctggccgtgctgctgttcctggccctgatcctgcagagaaccttcctgcaggccagctactacgtgaccatcgagaccggcatcaacctgagaggcgccctgctggccatgatctacaacaagatcctgagactgagcaccagcaacctgagcatgggcgagatgaccctgggccagatcaacaacctggtggccatcgagaccaaccagctgatgtggttcctgttcctgtgccccaacctgtgggccatgcccgtgcagatcatcatgggcgtgatcctgctgtacaacctgctgggcagcagcgccctggtgggcgccgccgtgatcgtgctgctggcccccatccagtacttcatcgccaccaagctggccgaggcccagaagagcaccctggactacagcaccgagagactgaagaagaccaacgagatcctgaagggcatcaagctgctgaagctgtacgcctgggagcacatcttctgcaagagcgtggaggagaccagaatgaaggagctgagcagcctgaagaccttcgccctgtacaccagcctgagcatcttcatgaacgccgccatccccatcgccgccgtgctggccaccttcgtgacccacgcctacgccagcggcaacaacctgaagcccgccgaggccttcgccagcctgagcctgttccacatcctggtgacccccctgttcctgctgagcaccgtggtgagattcgccgtgaaggccatcatcagcgtgcagaagctgaacgagttcctgctgagcgacgagatcggcgacgacagctggagaaccggcgagagcagcctgcccttcgagagctgcaagaagcacaccggcgtggtgaccaacggctacttcagctggggcagcggcctggccaccctgagcaacatcgacatcagaatccccaccggccagctgaccatgatcgtgggccaggtgggctgcggcaagagcagcctgctgctggccatcctgggcgagatgcagaccctggagggcaaggtgcactggagcaacgtgaacgagagcgagcccagcttcgaggccaccagaagcagaaacagatacagcgtggcctacgccgcccagaagccctggctgctgaacgccaccgtggaggagaacatcaccttcggcagccccttcaacaagcagagatacaaggccgtgaccgacgcctgcagcctgcagcccgacatcgacctgctgcccttcggcgaccagaccgagatcggcgagagaggcatcaacctgagcggcggccagagacagagaatctgcgtggccagagccctgtaccagaacaccaacatcgtgttcctggacgaccccttcagcgccctggacatccacctgagcgaccacctgatgcaggagggcatcctgaagttcctgcaggacgacaagagaaccctggtgctggtgacccacaagctgcagtacctgacccacgccgactggatcatcgccatgaaggacggcagcgtgctgagagagggcaccctgaaggacatccagaccaaggacgtggagctgtacgagcactggaagaccctgatgaacagacaggaccaggagctggagaaggacatggaggccgaccagaccaccctggagagaaagaccctgagaagagccatgtacagcagagaggccaaggcccagatggaggacgaggacgaggaggaggaggaggaggaggacgaggacgacaacatgagcaccgtgatgagactgagaaccaagatgccctggaagacctgctggagatacctgaccagcggcggcttcttcctgctgatcctgatgatcttcagcaagctgctgaagcacagcgtgatcgtggccatcgactactggctggccacctggaccagcgagtacagcatcaacaacaccggcaaggccgaccagacctactacgtggccggcttcagcatcctgtgcggcgccggcatcttcctgtgcctggtgaccagcctgaccgtggagtggatgggcctgaccgccgccaagaacctgcaccacaacctgctgaacaagatcatcctgggccccatcagattcttcgacaccacccccctgggcctgatcctgaacagattcagcgccgacaccaacatcatcgaccagcacatcccccccaccctggagagcctgaccagaagcaccctgctgtgcctgagcgccatcggcatgatcagctacgccacccccgtgttcctggtggccctgctgcccctgggcgtggccttctacttcatccagaagtacttcagagtggccagcaaggacctgcaggagctggacgacagcacccagctgcccctgctgtgccacttcagcgagaccgccgagggcctgaccaccatcagagccttcagacacgagaccagattcaagcagagaatgctggagctgaccgacaccaacaacatcgcctacctgttcctgagcgccgccaacagatggctggaggtgagaaccgactacctgggcgcctgcatcgtgctgaccgccagcatcgccagcatcagcggcagcagcaacagcggcctggtgggcctgggcctgctgtacgccctgaccatcaccaactacctgaactgggtggtgagaaacctggccgacctggaggtgcagatgggcgccgtgaagaaggtgaacagcttcctgaccatggagagcgagaactacgagggcaccatggaccccagccaggtgcccgagcactggccccaggagggcgagatcaagatccacgacctgtgcgtgagatacgagaacaacctgaagcccgtgctgaagcacgtgaaggcctacatcaagcccggccagaaggtgggcatctgcggcagaaccggcagcggcaagagcagcctgagcctggccttcttcagaatggtggacatcttcgacggcaagatcgtgatcgacggcatcgacatcagcaagctgcccctgcacaccctgagaagcagactgagcatcatcctgcaggaccccatcctgttcagcggcagcatcagattcaacctggaccccgagtgcaagtgcaccgacgacagactgtgggaggccctggagatcgcccagctgaagaacatggtgaagagcctgcccggcggcctggacgccgtggtgaccgagggcggcgagaacttcagcgtgggccagagacagctgttctgcctggccagagccttcgtgagaaagagcagcatcctgatcatggacgaggccaccgccagcatcgacatggccaccgagaacatcctgcagaaggtggtgatgaccgccttcgccgacagaaccgtggtgaccatcgcccacagagtgagcagcatcatggacgccggcctggtgctggtgttcagcgagggcatcctggtggagtgcgacaccgtgcccaacctgctggcccacaagaacggcctgttcagcaccctggtgatgaccaacaagtag

SEQ ID NO: 158526 - protein, 634 aa, Artificial Sequence
  derived and/or modified sequence
MPSDLAKKKAAKKKEAAKARQRPRKGHEENGDVVTEPQVAEKNEANGRETTEVDLLTKELEDFEMKKAAARAVTGVLASHPNSTDVHIINLSLTFHGQELLSDTKLELNSGRRYGLIGLNGIGKSMLLSAIGKREVPIPEHIDIYHLTREMPPSDKTPLHCVMEVDTERAMLEKEAERLAHEDAECEKLMELYERLEELDADKAEMRASRILHGLGFTPAMQRKKLKDFSGGWRMRVALARALFIRPFMLLLDEPTNHLDLDACVWLEEELKTFKRILVLVSHSQDFLNGVCTNIIHMHNKKLKYYTGNYDQYVKTRLELEENQMKRFHWEQDQIAHMKNYIARFGHGSAKLARQAQSKEKTLQKMMASGLTERVVSDKTLSFYFPPCGKIPPPVIMVQNVSFKYTKDGPCIYNNLEFGIDLDTRVALVGPNGAGKSTLLKLLTGELLPTDGMIRKHSHVKIGRYHQHLQEQLDLDLSPLEYMMKCYPEIKEKEEMRKIIGRYGLTGKQQVSPIRNLSDGQKCRVCLAWLAWQNPHMLFLDEPTNHLDIETIDALADAINEFEGGMMLVSHDFRLIQQVAQEIWVCEKQTITKWPGDILAYKEHLKSKLVDEEPQLTKRTHNVCTLTLASLPRP

SEQ ID NO: 158527 - DNA, 1905 bp, Artificial Sequence
  derived and/or modified sequence
atgcccagcgacctggccaagaagaaggccgccaagaagaaggaggccgccaaggccagacagagacccagaaagggccacgaggagaacggcgacgtggtgaccgagccccaggtggccgagaagaacgaggccaacggcagagagaccaccgaggtggacctgctgaccaaggagctggaggacttcgagatgaagaaggccgccgccagagccgtgaccggcgtgctggccagccaccccaacagcaccgacgtgcacatcatcaacctgagcctgaccttccacggccaggagctgctgagcgacaccaagctggagctgaacagcggcagaagatacggcctgatcggcctgaacggcatcggcaagagcatgctgctgagcgccatcggcaagagagaggtgcccatccccgagcacatcgacatctaccacctgaccagagagatgccccccagcgacaagacccccctgcactgcgtgatggaggtggacaccgagagagccatgctggagaaggaggccgagagactggcccacgaggacgccgagtgcgagaagctgatggagctgtacgagagactggaggagctggacgccgacaaggccgagatgagagccagcagaatcctgcacggcctgggcttcacccccgccatgcagagaaagaagctgaaggacttcagcggcggctggagaatgagagtggccctggccagagccctgttcatcagacccttcatgctgctgctggacgagcccaccaaccacctggacctggacgcctgcgtgtggctggaggaggagctgaagaccttcaagagaatcctggtgctggtgagccacagccaggacttcctgaacggcgtgtgcaccaacatcatccacatgcacaacaagaagctgaagtactacaccggcaactacgaccagtacgtgaagaccagactggagctggaggagaaccagatgaagagattccactgggagcaggaccagatcgcccacatgaagaactacatcgccagattcggccacggcagcgccaagctggccagacaggcccagagcaaggagaagaccctgcagaagatgatggccagcggcctgaccgagagagtggtgagcgacaagaccctgagcttctacttccccccctgcggcaagatccccccccccgtgatcatggtgcagaacgtgagcttcaagtacaccaaggacggcccctgcatctacaacaacctggagttcggcatcgacctggacaccagagtggccctggtgggccccaacggcgccggcaagagcaccctgctgaagctgctgaccggcgagctgctgcccaccgacggcatgatcagaaagcacagccacgtgaagatcggcagataccaccagcacctgcaggagcagctggacctggacctgagccccctggagtacatgatgaagtgctaccccgagatcaaggagaaggaggagatgagaaagatcatcggcagatacggcctgaccggcaagcagcaggtgagccccatcagaaacctgagcgacggccagaagtgcagagtgtgcctggcctggctggcctggcagaacccccacatgctgttcctggacgagcccaccaaccacctggacatcgagaccatcgacgccctggccgacgccatcaacgagttcgagggcggcatgatgctggtgagccacgacttcagactgatccagcaggtggcccaggagatctgggtgtgcgagaagcagaccatcaccaagtggcccggcgacatcctggcctacaaggagcacctgaagagcaagctggtggacgaggagccccagctgaccaagagaacccacaacgtgtgcaccctgaccctggccagcctgcccagaccctag

SEQ ID NO: 158528 - DNA, 1905 bp, Artificial Sequence
  derived and/or modified sequence
atgccttcggacctggcaaagaagaaagcagccaaaaaaaaggaggcggcgaaagcgagacagcgaccacgcaaaggacacgaggagaacggagacgtcgtgaccgagcctcaggttgccgagaagaacgaagccaacgggcgtgagactaccgaagtggatctgctgaccaaggagctcgaggactttgagatgaaaaaagcagcagcacgggcagtaaccggagtactagccagccaccctaattctaccgatgtccatatcatcaatctgagccttacctttcatggccaggagctgctaagcgacactaagctcgagttaaattcaggcaggcgctatggcctgataggccttaatggaatcggaaagagcatgttgctttctgccataggaaaacgcgaagtgccaatccctgagcacatcgatatataccatctaaccagggagatgccgcctagtgacaaaactccactgcattgcgtcatggaagttgataccgaacgggccatgttggagaaagaggccgagcgcttagcacacgaggacgccgagtgtgagaagcttatggagctatacgagcgcctggaggagctggatgccgataaggcagagatgagggcgtcgcgcattctgcacgggttgggattcactccggctatgcaacgaaaaaagttgaaggacttctcaggcggatggcgcatgagagtggcactagctagggcactgtttattcgtcccttcatgctgcttctggatgagccaactaatcatttggatctcgacgcctgcgtctggctggaggaggaactgaaaactttcaagcggatcctcgttctagtgtctcattctcaagatttcctgaacggtgtgtgtacaaatatcatccacatgcataataagaagctgaagtactataccggaaactacgatcagtatgtcaagaccagattagagctcgaggagaaccagatgaagaggttccactgggaacaggaccagatcgcccacatgaagaactacattgcgcgcttcggccacggtagtgctaaattggcccggcaggcccagtcgaaggaaaagacccttcagaaaatgatggcttccggacttaccgagagggttgtgtctgacaaaactctgagcttttattttccaccatgcggaaaaatcccgccaccagtcataatggttcaaaacgtcagttttaagtacactaaggatggcccttgcatttacaataatctcgaatttgggatagatttagatacgagggtcgcgctcgtgggtccaaatggggcaggtaagtctaccttgctcaagctactcactggcgagctgctgccaacagatggaatgataagaaagcatagtcacgtgaagattggtcgctatcatcagcaccttcaggagcaactggacttggatctgagccccctcgaatatatgatgaaatgctatcctgaaatcaaagagaaagaggagatgcgcaaaattatcggccgatatggcctgacaggtaagcagcaggtgagtcctatacgcaatctatccgacggccagaaatgtagagtgtgcttagcttggctcgcctggcaaaatccccatatgctgttccttgacgaacccacaaatcatcttgacattgagacgatagatgcactggcagacgccattaacgagtttgagggaggaatgatgcttgtgtctcacgatttcagactcattcagcaagtggctcaggaaatttgggtttgtgagaaacagaccattactaaatggccaggcgacatcctggcatataaggagcacctgaaatctaagctggtcgacgaagaaccacagctcacaaaacgcacccacaacgtctgcacgttgaccttggcgtctctcccaagaccttag

SEQ ID NO: 158529 - DNA, 1905 bp, Artificial Sequence
  derived and/or modified sequence
atgcccagcgacctggccaagaagaaggccgccaagaagaaggaggccgccaaggcccggcagaggcccaggaaaggacatgaagaaaatggagatgtggtgacagagccccaggtggccgagaagaatgaggccaacggccgggagaccacagaggtggacctgctgaccaaggagctggaggactttgagatgaagaaggctgctgcccgggctgtgactggagtgctggccagccaccccaacagcacagatgtgcacatcatcaacctgagcctgaccttccacggccaggagctgctgagtgacaccaagctggagctgaacagcggccgccgctatggcctgattggcctgaatggcatcggcaagtccatgctgctgagcgccatcggcaagcgggaggtgcccatccctgagcacatcgacatctaccacctgacccgggagatgccacccagcgacaagacccccctgcactgtgtgatggaggtggacacagagcgggccatgctggagaaggaggccgagcggctggcccatgaagatgctgaatgtgagaagctgatggagctgtatgagcggctggaggagctggatgctgacaaggccgagatgagggccagccgcatcctgcacggcctgggcttcaccccagccatgcagaggaagaagctgaaggacttcagcggcggctggaggatgagggtggccctggcccgggccctcttcatccggcccttcatgctgctgctggatgagcccaccaaccacctggacctggatgcctgtgtgtggctggaggaggagctgaagaccttcaagaggatcctggtgctggtgagccacagccaggacttcctgaatggagtgtgcaccaacatcatccacatgcacaacaagaagctgaagtactacacaggcaactatgaccagtatgtgaagacccggctggagctggaggagaaccagatgaagcgcttccactgggagcaggaccagatcgcccacatgaagaactacatcgccaggtttggacatggcagcgccaagctggcccggcaggcccagagcaaggagaagaccctgcagaagatgatggccagcggcctgacagagcgggtggtgtctgacaagaccctgtccttctacttccccccctgtgggaagatccccccacctgtgatcatggtgcagaatgtgtccttcaagtacaccaaggatggcccctgcatctacaacaacctggagtttggcatcgacctggacaccagggtggccctggtgggccccaacggggccggcaagagcaccctgctgaagctgctgaccggggagctgctgcccacagatggcatgatcaggaagcacagccacgtgaagattggccgctaccaccagcacctgcaggagcagctggacctggacctgagccccctggagtacatgatgaagtgctacccagagatcaaggagaaggaggagatgaggaagatcatcggccgctatggcctgaccgggaagcagcaggtgagccccatccggaacctgagtgatggccagaagtgccgggtgtgcctggcctggctggcctggcagaacccccacatgctgttcctggatgagcccaccaaccacctggacatcgagaccattgatgccctggctgatgccatcaatgaatttgagggcggcatgatgctggtgtcccatgacttccgcctcatccagcaggtggcccaggagatctgggtgtgtgagaagcagaccatcaccaagtggccaggggacatcctggcctacaaggagcacctgaagagcaagctggtggatgaggagccccagctgaccaagaggacccacaacgtgtgcaccctgaccctggccagcctgccccggccctag

SEQ ID NO: 158530 - DNA, 1905 bp, Artificial Sequence
  derived and/or modified sequence
atgcccagcgacctggccaagaagaaggccgccaagaagaaggaggccgctaaggcccgccagagaccgcggaaggggcatgaagaaaatggtgatgtcgttaccgaaccccaagtcgcagaaaagaacgaggccaatgggagagagactaccgaggtggacttgcttacgaaagagctggaggactttgagatgaaaaaagccgccgcaagggcagtgacgggtgttctggcttctcaccccaattcaacagatgtgcacatcatcaatttgtcgttgactttccacggccaggagctgttgtcggacacaaagctggaactgaacagcggaagacggtatggcctgatcgggttgaatgggatcggcaaatccatgcttctctccgcaatcggaaaacgagaagtgcctattcctgagcacattgacatttaccatctgacacgtgaaatgccccctagtgacaagactccattgcattgtgtcatggaagtggatactgaaagagccatgctggaaaaggaagccgaacgccttgcccacgaagacgctgaatgcgaaaagctaatggagctgtacgaaaggctggaggagctggatgccgacaaagctgaaatgagggctagccgaatcctacacggactcggtttcacacccgcaatgcagcggaaaaaacttaaggacttcagcggaggttggagaatgagggtcgccctagcgagagcattgttcatcagacctttcatgctcctgctggacgagcccaccaatcacttggatcttgacgcctgcgtctggcttgaggaggaattaaagacctttaaacgcatcctggtgttagtgtcccacagccaggacttcctgaatggcgtttgcaccaacattatacacatgcataacaaaaaactcaaatattatacaggtaactatgatcagtacgtaaagaccagactcgaactggaagagaaccaaatgaagcggtttcattgggaacaggaccagattgctcatatgaagaattacatcgctcgcttcggccatggctcagcgaagctggctcggcaggctcagtctaaagagaaaacccttcagaagatgatggcaagtggtctgacggagcgtgtggtgagtgataagaccctcagcttttattttcctccatgcggcaaaatacctccgcccgtgatcatggtgcaaaacgtctcatttaagtacaccaaggacggtccgtgcatctataataatttagaatttgggatagatctggacacccgagtagccttagtcggtcctaatggggcggggaaaagtacattactgaagttgctgactggggaactgttgcctacagatggcatgatcaggaaacattcccacgtgaaaatcggtcgctaccaccaacacctgcaagagcagctggatctcgacctgagcccactggaatatatgatgaaatgctacccagagatcaaagagaaggaagaaatgcgcaaaattatcgggcggtatggtctaacgggtaaacagcaggtgtcgcccattcggaacctatccgatggccaaaaatgtagggtctgcctcgcatggctggcatggcaaaacccccatatgttgtttcttgatgagcctactaatcatctcgatatagagaccattgacgccctggccgatgctattaacgagttcgagggaggcatgatgctggtgtcccacgattttaggctcatccaacaggtagctcaagaaatatgggtgtgcgagaaacagacaattacgaaatggcccggcgatattctcgcttacaaggaacacctgaaaagcaaactcgtcgatgaagaaccgcagttgaccaagcggactcataatgtgtgtacactgacattggctagtctacctagaccttag

SEQ ID NO: 158531 - DNA, 1905 bp, Artificial Sequence
  derived and/or modified sequence
atgccctccgacctcgcaaagaagaaggccgctaagaaaaaggaggcggctaaggccagacagaggccacgcaagggtcatgaggaaaacggcgacgtggtgactgagcctcaggtcgccgaaaagaatgaagctaatggtagggagactactgaagtagaccttctaacgaaggaactggaggacttcgaaatgaagaaagcagccgcacgcgcagttactggcgtcctagcctcccacccaaactcaaccgacgtgcatatcattaatctcagcctgacattccatggccaggaactcttatcggataccaaactggaactcaatagcggacgcaggtatgggttgatcggactaaacggaattggaaagtccatgctcttatccgcaattggaaagagagaagtgcctatccctgaacatatcgacatttaccatctgacaagagagatgccgccaagcgacaaaacacctctccattgtgtgatggaagtggatacagaacgggcaatgcttgagaaggaagccgagcggctagcacatgaggacgctgaatgcgagaaattgatggaattatatgaaagactggaagaactcgatgctgataaagccgaaatgagggcctcccgcattctgcacggacttggctttacccccgctatgcagaggaaaaaactgaaggatttcagtggcggatggagaatgcgggtggcgctagcacgcgctctcttcattaggccgttcatgttgctgctggatgaaccaacaaaccacctggatctagatgcctgtgtttggctcgaagaggagctcaagacctttaaaagaatcctggtcttggtgagccatagtcaggatttcctgaatggcgtctgcactaatatcattcatatgcataataaaaaactgaagtactacacgggcaattatgatcagtacgttaagacccggttagagttagaagaaaaccagatgaagcgatttcattgggagcaggatcaaatagcccacatgaagaactacattgccagattcggacacggctcagctaaactggccaggcaggcccagtctaaggaaaaaacacttcagaaaatgatggcctccggactcacagaacgggtggtctccgataaaaccctgtcattctattttcctccgtgtgggaagataccccctccggtaattatggtccagaatgtgtcctttaagtatactaaggacggcccttgcatttacaacaacctggagttcggtatcgacctagatacccgggtggcactggtggggccaaatggagcgggtaaaagtacgctcctcaagctcctgaccggcgaattactcccaactgatggcatgatcagaaagcactctcatgtgaagattggcagataccatcagcacttacaggagcagctcgatctggacctgtccccgttggagtacatgatgaagtgctacccagagatcaaggagaaagaagagatgagaaagataattggcagatacggtctgacaggaaagcaacaggtatcgcctatccggaacctgagtgacggacagaaatgtagagtatgtctggcctggcttgcttggcaaaacccacatatgctcttcctggacgagccaacaaatcacctggacattgaaacaattgatgcactggcggatgccatcaacgagtttgaagggggtatgatgcttgtgagccacgatttccgccttatccagcaggttgcccaggagatatgggtgtgcgagaaacagaccatcacaaaatggcctggtgatatactggcctataaggagcatttaaagtcaaaactcgtcgacgaggagcctcagctgactaagaggacgcataacgtctgcacccttacactggcgtcattgcctcgcccatag

SEQ ID NO: 158532 - DNA, 2185 bp, Artificial Sequence
  derived and/or modified sequence
cccagctccctgaaacaacagtaacctacccctgtgggtcatcatcatgccctccgacctggccaagaagaaggcagccaaaaagaaggaggctgccaaagctcgacagcggcccagaaaaggacatgaagaaaatggagatgttgtcacagaaccacaggtggcagagaagaatgaggccaatggcagagagaccacagaagtagatttgctgaccaaggagctagaggactttgagatgaagaaagctgctgctcgagctgtcactggcgtcctggcctctcaccccaacagtactgatgttcacatcatcaacctctcacttacctttcatggtcaagagctgctcagtgacaccaaactggaattaaactcaggccgtcgttatggcctcattggtttaaatggaattggaaagtccatgctgctctctgctattgggaagcgtgaagtgcccatccctgagcacatcgacatctaccatctgactcgagagatgccccctagtgacaagacacccttgcattgtgtgatggaagtcgacacagagcgggccatgctggagaaagaggcagagcggctggctcatgaggatgcggagtgtgagaagctcatggagctctacgagcgcctggaggagctggatgccgacaaggcagagatgagggcctcgcggatcttgcatggactgggtttcacacctgccatgcagcgcaagaagctaaaagacttcagtgggggctggaggatgagggttgcccttgccagagccctctttattcggcccttcatgctgctcctggatgagcctaccaaccacctggacctagatgcttgcgtgtggttggaagaagaactaaaaacttttaagcgcatcttggtcctcgtctcccattcccaggattttctgaatggtgtctgtaccaatatcattcacatgcacaacaagaaactgaagtattatacgggtaattatgatcagtacgtgaagacgcggctagagctggaggagaaccagatgaagaggtttcactgggagcaagatcagattgcacacatgaagaactacattgcgaggtttggtcatggcagtgccaagctggcccggcaggcccagagcaaggagaagacgctacagaaaatgatggcatcaggactgacagagagggtcgtgagcgataagacactgtcattttatttcccaccatgtggcaagatccctccacctgtcattatggtgcaaaatgtgagcttcaagtatacaaaagatgggccttgcatctacaataatctagaatttggaattgaccttgacacacgagtggctctggtagggcccaatggagcagggaagtcaactcttctgaagctgctaactggagagctactacccacagatggcatgatccgaaaacactctcatgtcaagatagggcgttaccatcagcatttacaagagcagctggacttagatctctcacctttggagtacatgatgaagtgctacccagagatcaaggagaaggaagaaatgaggaagatcattgggcgatacggtctcactgggaaacaacaggtgagcccaatccggaacttgtcagacgggcagaagtgccgagtgtgtctggcctggctggcctggcagaacccccacatgctcttcctggatgaacccaccaatcacctggatatcgagaccatcgacgccctggcagatgccatcaatgagtttgagggtggtatgatgctggtcagccatgacttcagactcattcagcaggttgcacaggaaatttgggtctgtgagaagcagacaatcaccaagtggcctggagacatcctggcttacaaggagcacctcaagtccaagctggtggatgaggagccccagctcaccaagaggacccacaacgtgtgcaccctgacattggcatctctgccaaggccatgagcatcatgaactcgtttgtaaacgacgtgtttgagcagctggcgtgtgaggctgcccggctggcccagtactcgggccggaccaccctgacatcccgagaagtccagacggctgtgcgtctgctgctgcctggggagctggccaagcacgctgtgtctgagggcaccaaggctgtcaccaagtacaccagctccaagtgacccagggcctgacaaaaataaagggtgaactgtt

SEQ ID NO: 158533 - DNA, 3546 bp, Artificial Sequence
  derived and/or modified sequence
gagccggccgcacgcggaggatcctaaggagcagctctgttgcgacataggccgagcagcgaggcccagctccctgaaacaacagtaacctacccctgtgggtcatcatcatgccctccgacctggccaagaagaaggcagccaaaaagaaggaggctgccaaagctcgacagcggcccagaaaaggacatgaagaaaatggagatgttgtcacagaaccacaggtggcagagaagaatgaggccaatggcagagagaccacagaagtagatttgctgaccaaggagctagaggactttgagatgaagaaagctgctgctcgagctgtcactggcgtcctggcctctcaccccaacagtactgatgttcacatcatcaacctctcacttacctttcatggtcaagagctgctcagtgacaccaaactggaattaaactcaggccgtcgttatggcctcattggtttaaatggaattggaaagtccatgctgctctctgctattgggaagcgtgaagtgcccatccctgagcacatcgacatctaccatctgactcgagagatgccccctagtgacaagacacccttgcattgtgtgatggaagtcgacacagagcgggccatgctggagaaagaggcagagcggctggctcatgaggatgcggagtgtgagaagctcatggagctctacgagcgcctggaggagctggatgccgacaaggcagagatgagggcctcgcggatcttgcatggactgggtttcacacctgccatgcagcgcaagaagctaaaagacttcagtgggggctggaggatgagggttgcccttgccagagccctctttattcggcccttcatgctgctcctggatgagcctaccaaccacctggacctagatgcttgcgtgtggttggaagaagaactaaaaacttttaagcgcatcttggtcctcgtctcccattcccaggattttctgaatggtgtctgtaccaatatcattcacatgcacaacaagaaactgaagtattatacgggtaattatgatcagtacgtgaagacgcggctagagctggaggagaaccagatgaagaggtttcactgggagcaagatcagattgcacacatgaagaactacattgcgaggtttggtcatggcagtgccaagctggcccggcaggcccagagcaaggagaagacgctacagaaaatgatggcatcaggactgacagagagggtcgtgagcgataagacactgtcattttatttcccaccatgtggcaagatccctccacctgtcattatggtgcaaaatgtgagcttcaagtatacaaaagatgggccttgcatctacaataatctagaatttggaattgaccttgacacacgagtggctctggtagggcccaatggagcagggaagtcaactcttctgaagctgctaactggagagctactacccacagatggcatgatccgaaaacactctcatgtcaagatagggcgttaccatcagcatttacaagagcagctggacttagatctctcacctttggagtacatgatgaagtgctacccagagatcaaggagaaggaagaaatgaggaagatcattgggcgatacggtctcactgggaaacaacaggtgagcccaatccggaacttgtcagacgggcagaagtgccgagtgtgtctggcctggctggcctggcagaacccccacatgctcttcctggatgaacccaccaatcacctggatatcgagaccatcgacgccctggcagatgccatcaatgagtttgagggtggtatgatgctggtcagccatgacttcagactcattcagcaggttgcacaggaaatttgggtctgtgagaagcagacaatcaccaagtggcctggagacatcctggcttacaaggagcacctcaagtccaagctggtggatgaggagccccagctcaccaagaggacccacaacgtgtgagccctctacctgggttcgggtcaggagctccatctgggaactaacagctgctaacctgaccagccgctcaggacaggaccctggggctacactcctgcattgctgcaatactgctcccccagcctctcccctgcccctcaacctgccttagctgcactctcttacctacagctggacagtacctgtctgtttcctgtcctccttccagttacatctgtccatgtctggactcggctggccgttccctccagccccttgctggttatcttactctgagtgtgatgcagtcagaggcacctgcgggttagcccaggggcccaagccctggatttggcctgcggaggagcttaggatcctcgttttctgggttttggtgatgttggaggagtaccccccagcccaccgccccgattcctttttgcttctggtttggagctccggaccaggaccttcgtcctggtcagtttttaaataattatttagcagtgtaacttttagacctgcgtgacatctacaaagcgcccaataaagaaagaggaagccacggtccctaccttccttctcgggtctctggggccttctcctccctgcagtgccaacatgcactgcccacagcaggagctggatccagcgtcagtgtgtcgatgggaactgaagactagtccataggagctggaagaactttgtccctttacttctgatttgaaattgtaccttttctcaggcctgtgattcacagactttaacatgaatcagaatcacctggagggctcatgcaatcagattgccagatctcgcctcagcgtttctggttcaataggttttgggggagaccaagaacgttaacatttctagcaagtttccaggtgatgctgttgttgctggtctagagactattttgagaaccactgtccaggagcgtggttttctgattgtgatctgaggttctgccccaactgcacagcagttgggctgcttgttaaaaatgcaggccaggtgcggtggctcacacctgtaatcccagcgctttgggaggctgaggcaggtggatcacttgagctcaggagttcaagaccagcttgggaaacatggcaaaacccgtctttatgtgcctggaatcccacctgctcaggtggctagggtggatggatcgcttgagcccaggaggtggaggttgcagtgagctgagattgcaccactgcattccagcctggatgacagagcaaaaccctgtctcaaaaaaatgcagactggccaggcacagtggctcacacctgtaatccgactgtaagctcatcaccttgggaggccactgtaggaggatcaattgagcctagaagttcaagaccagcctgggcaaagtagggagaccccttctctacaaatagtaataaaatgaaccgggcatagtagcatgtgcctgcggtcccagctgctctgataagaggaggctcacttgagcccaggaggttgaggctgcagtgagcagagcgtgccgctacactccagcctgatgacagaccgagacactgtctcaaaaaaataaaaaaattcagattgctga

SEQ ID NO: 158534 - protein, 202 aa, Artificial Sequence
  derived and/or modified sequence
MSLWLGAPVPDIPPDSAVELWKPGAQDASSQAQGGSSCILREEARMPHSAGGTAGVGLEAAEPTALLTRAEPPSEPTEIRPQKRKKGPAPKMLGNELCSVCGDKASGFHYNVLSCEGCKGFFRRSVIKGAHYICHSGGHCPMDTYMRRKCQECRLRKCRQAGMREECVLSEEQIRLKKLKRQEEEQAHATSLPPRASSPPQI

SEQ ID NO: 158535 - protein, 447 aa, Artificial Sequence
  derived and/or modified sequence
MSLWLGAPVPDIPPDSAVELWKPGAQDASSQAQGGSSCILREEARMPHSAGGTAGVGLEAAEPTALLTRAEPPSEPTEIRPQKRKKGPAPKMLGNELCSVCGDKASGFHYNVLSCEGCKGFFRRSVIKGAHYICHSGGHCPMDTYMRRKCQECRLRKCRQAGMREECVLSEEQIRLKKLKRQEEEQAHATSLPPRASSPPQILPQLSPEQLGMIEKLVAAQQQCNRRSFSDRLRVTPWPMAPDPHSREARQQRFAHFTELAIVSVQEIVDFAKQLPGFLQLSREDQIALLKTSAIEVMLLETSRRYNPGSESITFLKDFSYNREDFAKAGLQVEFINPIFEFSRAMNELQLNDAEFALLIAISIFSADRPNVQDQLQVERLQHTYVEALHAYVSIHHPHDRLMFPRMLMKLVSLRTLSSVHSEQVFALRLQDKKLPPLLSEIWDVHE

SEQ ID NO: 158536 - protein, 194 aa, Artificial Sequence
  derived and/or modified sequence
MSLWLGAPVPDIPPDSAVELWKPGAQDASSQAQGGSSCILREEARMPHSAGGTAGVGLEAAEPTALLTRAEPPSEPTEIRPQKRKKGPAPKMLGNELCSVCGDKASGFHYNVLSCEGCKGFFRRSVIKGAHYICHSGGHCPMDTYMRRKCQECRLRKCRQAGMREECVLSEEQIRLKKLKRQEEEQAHATSLPP

SEQ ID NO: 158537 - protein, 205 aa, Artificial Sequence
  derived and/or modified sequence
MSLWLGAPVPDIPPDSAVELWKPGAQDASSQAQGGSSCILREEARMPHSAGGTAGVGLEAAEPTALLTRAEPPSEPTEIRPQKRKKGPAPKMLGNELCSVCGDKASGFHYNVLSCEGCKGFFRRSVIKGAHYICHSGGHCPMDTYMRRKCQECRLRKCRQAGMREECVLSEEQIRLKKLKRQEEEQAHATSLPPRASSPPQILPQ

SEQ ID NO: 158538 - DNA, 1720 bp, Artificial Sequence
  derived and/or modified sequence
agtccctcccctcagcctttccccaaattgctacttctctggggctccaggtcctgcttgtgctcagctccagctcactggctggccaccgagacttctggacaggaaactgcaccatcctcttctcccagcaagggggctccagagactgcccacccaggaagtctggtggcctggggatttggacagtgccttggtaatgaccagggctccaggaagagatgtccttgtggctgggggcccctgtgcctgacattcctcctgactctgcggtggagctgtggaagccaggcgcacaggatgcaagcagccaggcccagggaggcagcagctgcatcctcagagaggaagccaggatgccccactctgctgggggtactgcaggggtggggctggaggctgcagagcccacagccctgctcaccagggcagagcccccttcagaacccacagagatccgtccacaaaagcggaaaaaggggccagcccccaaaatgctggggaacgagctatgcagcgtgtgtggggacaaggcctcgggcttccactacaatgttctgagctgcgagggctgcaagggattcttccgccgcagcgtcatcaagggagcgcactacatctgccacagtggcggccactgccccatggacacctacatgcgtcgcaagtgccaggagtgtcggcttcgcaaatgccgtcaggctggcatgcgggaggagtgtgtcctgtcagaagaacagatccgcctgaagaaactgaagcggcaagaggaggaacaggctcatgccacatccttgccccccagggcttcctcacccccccaaatcctgccccagctcagcccggaacaactgggcatgatcgagaagctcgtcgctgcccagcaacagtgtaaccggcgctccttttctgaccggcttcgagtcacgccttggcccatggcaccagatccccatagccgggaggcccgtcagcagcgctttgcccacttcactgagctggccatcgtctctgtgcaggagatagttgactttgctaaacagctacccggcttcctgcagctcagccgggaggaccagattgccctgctgaagacctctgcgatcgaggtgatgcttctggagacatctcggaggtacaaccctgggagtgagagtatcaccttcctcaaggatttcagttataaccgggaagactttgccaaagcagggctgcaagtggaattcatcaaccccatcttcgagttctccagggccatgaatgagctgcaactcaatgatgccgagtttgccttgctcattgctatcagcatcttctctgcagaccggcccaacgtgcaggaccagctccaggtagagaggctgcagcacacatatgtggaagccctgcatgcctacgtctccatccaccatccccatgaccgactgatgttcccacggatgctaatgaaactggtgagcctccggaccctgagcagcgtccactcagagcaagtgtttgcactgcgtctgcaggacaaaaagctcccaccgctgctctctgagatctgggatgtgcacgaatgactgttctgtccccatattttctgttttcttggccggatggctgaggcctggtggctgcctcctagaagtggaacagactgagaagggcaaacattcctgggagctgggcaaggagatcctcccgtggcattaaaagagagtcaaagggttgcgaa

SEQ ID NO: 158539 - DNA, 1344 bp, Artificial Sequence
  derived and/or modified sequence
atgagcctgtggctgggcgcccccgtgcccgacatcccccccgacagcgccgtggagctgtggaagcccggcgcccaggacgccagcagccaggcccagggcggcagcagctgcatcctgagagaggaggccagaatgccccacagcgccggcggcaccgccggcgtgggcctggaggccgccgagcccaccgccctgctgaccagagccgagccccccagcgagcccaccgagatcagaccccagaagagaaagaagggccccgcccccaagatgctgggcaacgagctgtgcagcgtgtgcggcgacaaggccagcggcttccactacaacgtgctgagctgcgagggctgcaagggcttcttcagaagaagcgtgatcaagggcgcccactacatctgccacagcggcggccactgccccatggacacctacatgagaagaaagtgccaggagtgcagactgagaaagtgcagacaggccggcatgagagaggagtgcgtgctgagcgaggagcagatcagactgaagaagctgaagagacaggaggaggagcaggcccacgccaccagcctgccccccagagccagcagccccccccagatcctgccccagctgagccccgagcagctgggcatgatcgagaagctggtggccgcccagcagcagtgcaacagaagaagcttcagcgacagactgagagtgaccccctggcccatggcccccgacccccacagcagagaggccagacagcagagattcgcccacttcaccgagctggccatcgtgagcgtgcaggagatcgtggacttcgccaagcagctgcccggcttcctgcagctgagcagagaggaccagatcgccctgctgaagaccagcgccatcgaggtgatgctgctggagaccagcagaagatacaaccccggcagcgagagcatcaccttcctgaaggacttcagctacaacagagaggacttcgccaaggccggcctgcaggtggagttcatcaaccccatcttcgagttcagcagagccatgaacgagctgcagctgaacgacgccgagttcgccctgctgatcgccatcagcatcttcagcgccgacagacccaacgtgcaggaccagctgcaggtggagagactgcagcacacctacgtggaggccctgcacgcctacgtgagcatccaccacccccacgacagactgatgttccccagaatgctgatgaagctggtgagcctgagaaccctgagcagcgtgcacagcgagcaggtgttcgccctgagactgcaggacaagaagctgccccccctgctgagcgagatctgggacgtgcacgagtag

SEQ ID NO: 158540 - DNA, 1344 bp, Artificial Sequence
  derived and/or modified sequence
atgtctctctggttaggtgctcccgtgccagacatcccccctgactctgctgtggagctctggaaaccaggggcacaggatgcatcttctcaagcccagggggggagctcttgcattctcagggaggaagcccgtatgccccatagtgctggaggtacagcaggagtagggcttgaggcggcagagcctaccgcactgctgacacgggccgaacctccctccgagccaaccgaaatccggccccagaagagaaaaaaaggacctgctcccaagatgctagggaatgaattgtgctccgtctgtggtgacaaagcatccggcttccattacaacgtgttatcttgtgaaggatgcaaaggcttctttcgtcgatcagtgataaagggcgcacattacatctgtcatagtggagggcattgcccaatggatacctacatgcgacgaaagtgtcaagaatgtagactgaggaaatgtaggcaagccgggatgagggaagagtgcgtcctcagtgaagagcagatcagactgaagaaactgaagaggcaggaggaggagcaggcacatgctaccagcctgcccccacgtgcctcatcacctccgcagatactccctcagcttagcccggagcaacttggtatgatagaaaaacttgtcgcagcgcagcaacaatgtaatcggcggagtttttccgacagactgcgggtgaccccgtggcccatggctcccgatccacactcccgggaggccagacaacagagatttgcccactttaccgaattggctattgtgagcgttcaggagattgttgattttgccaaacagctccctgggtttctgcaactgtctagggaagatcagatcgcattactgaagacaagcgccatcgaagtcatgctcttagaaacaagtcgtcgttacaatcccggcagtgagtcgataacattcctcaaggacttttcttataatagagaagatttcgccaaggcgggactccaagttgagtttattaacccaatattcgagttctcccgggccatgaacgagctccaacttaatgatgctgagttcgccctactcattgctatcagtatcttttccgcggatagacctaacgtgcaggaccaactgcaggtggagcggcttcaacatacttacgtcgaggcgctgcacgcttatgtgtccatccaccatccccatgaccggctgatgttcccacgcatgctcatgaagttggtgagtcttaggactctttctagcgtccacagtgaacaggttttcgctctgcgactgcaggacaagaagctccctccacttctgagcgagatctgggatgtgcacgaatag

SEQ ID NO: 158541 - DNA, 1344 bp, Artificial Sequence
  derived and/or modified sequence
atgagtctgtggctgggggcccctgttcccgatattcctcccgactcggccgtggaactgtggaagcccggggcccaggatgcgtcctcccaggcccaggggggatcgtcatgcatcctgagagaggaagcccggatgccacactccgccggagggactgccggagtgggactggaggccgccgagcccaccgccctgctcactcgagcagaaccacctagtgaacccaccgagatcagaccgcagaaacgaaaaaagggtccagccccaaaaatgctggggaacgaactctgttctgtttgcggggataaagcctccggcttccattacaatgtgctcagctgcgaaggctgcaagggcttctttaggagatccgtcatcaagggcgctcactacatatgtcacagcggaggccactgcccaatggacacttatatgaggaggaagtgtcaggagtgccggctccggaagtgccgtcaagccgggatgagagaagaatgtgtcctgagtgaagagcagatccggcttaaaaagctgaagcgccaagaggaagaacaggcacacgccactagtctgccccctcgggcctcaagtccaccccagatcctgccacagttatcccccgagcagctcggaatgatcgaaaaactggtggccgcccagcagcagtgcaatcggcgcagcttttccgataggctgcgagtcacaccctggccaatggcccccgaccctcatagtagagaagcaagacaacagagattcgctcacttcaccgagctggccatagtgtccgtccaggagatcgtcgacttcgccaaacagctgccaggtttcctccaactgtcgcgcgaagaccagatagcgctgctgaaaacgtcagctatcgaggtaatgctcctggaaacctctaggcggtataaccctggatcagagtcaatcaccttcctcaaagatttttcatataatagggaggatttcgcgaaagcaggtctacaggttgagtttataaaccccattttcgagttctcgagagcaatgaatgaactccaactcaatgatgccgagtttgcattgctcattgcaatttctatattctccgctgatagacctaatgtccaggaccaactgcaggttgaacgtctgcagcacacgtacgtggaagctctgcacgcctacgttagtattcatcatccccatgacaggcttatgttcccgcgcatgttaatgaaacttgtcagccttcgcacactttcttccgtgcatagtgaacaggtgtttgccctgaggctgcaagacaagaagctcccacccctgctgtccgaaatctgggacgtgcatgaatag

SEQ ID NO: 158542 - DNA, 1344 bp, Artificial Sequence
  derived and/or modified sequence
atgagcctgtggctgggcgcccctgtgcctgacatccccccagacagcgctgtggagctgtggaagccaggggcccaggatgccagcagccaggcccagggcggcagcagctgcatcctgcgggaggaggccaggatgccccacagcgctgggggcacagctggggtgggcctggaggccgctgagcccacagccctgctgaccagggctgagccccccagcgagcccacagagatccggccccagaagaggaagaagggccctgcccccaagatgctgggcaatgagctgtgcagcgtgtgtggggacaaggccagcggcttccactacaacgtgctgagctgtgagggctgcaagggcttcttcagaagaagtgtcatcaagggggcccactacatctgccacagcggcggccactgccccatggacacctacatgaggaggaagtgccaggagtgccgcctgaggaaatgtcggcaggccggcatgagggaggagtgtgtgctgtctgaggagcagatccggctgaagaagctgaagaggcaggaggaggagcaggcccacgccaccagcctgcccccccgggccagcagccccccccagatcctgccccagctgagccctgagcagctgggcatgattgagaagctggtggccgcccagcagcagtgcaacagaagaagcttcagtgaccggctgcgggtgaccccctggcccatggccccagacccccacagccgggaggcccggcagcagagatttgcccacttcacagagctggccatcgtgtctgtgcaggagatcgtggactttgccaagcagctgcccggcttcctgcagctgagccgggaggaccagatcgccctgctgaagaccagcgccatcgaggtgatgctgctggagaccagccgccgctacaaccctggcagcgagagcatcaccttcctgaaggacttctcctacaaccgggaggactttgccaaggccggcctgcaggtggagttcatcaaccccatctttgagttcagccgggccatgaatgagctgcagctgaatgatgctgagtttgccctgctgattgccatcagcatcttctctgctgaccggcccaacgtgcaggaccagctgcaggtggagcggctgcagcacacctacgtggaggccctgcacgcctacgtgtccatccaccacccccatgaccggctgatgttccccaggatgctgatgaagctggtgtccctgcggaccctgagctctgtgcacagcgagcaggtgtttgccctgcggctgcaggacaagaagctgccccccctgctgtctgagatctgggatgtgcatgaatag

SEQ ID NO: 158543 - DNA, 1344 bp, Artificial Sequence
  derived and/or modified sequence
atgagcctgtggctgggcgcccccgtgcccgacatcccccccgacagcgccgtcgaactgtggaagccgggagcccaggatgcatcttcccaggctcagggtggctcctcctgtattctgcgcgaggaggcacgcatgcctcactctgctggaggaaccgccggagtgggactggaagccgccgaacctactgccctgttaacgcgggccgagccaccaagcgaacctaccgagattcgaccacagaagagaaaaaaagggccagctccgaagatgctcggtaacgaactgtgttcagtgtgtggcgataaagcaagtggttttcattacaacgttttgagttgtgagggctgtaagggcttctttagaaggagcgtgatcaaaggggctcattacatttgccatagtggagggcattgtcccatggatacgtatatgcgcagaaaatgtcaggagtgcagactccggaaatgtagacaggccggaatgcgggaagagtgcgtgctatctgaagagcagattcggctgaaaaaacttaagcgccaggaggaggagcaagcccacgccaccagcctgccccccagagcaagtagtcccccccagatcttgccccaattatcacccgaacagcttggaatgatcgagaagctcgtggccgctcagcagcagtgtaacaggaggtcattcagcgaccggcttagagtgactccatggccgatggccccggacccacatagtcgcgaagctagacagcagcgatttgcacactttaccgaactcgccatcgtgagtgtacaagagattgtggatttcgccaaacagctccccgggtttctccagttgagtagggaggaccagattgccttgctcaagacatccgctatagaggtgatgctcctggagacttctcgacgatataaccccgggagcgagtcgatcacattcttgaaggatttctcatataatagggaggactttgctaaagccggtctccaggtggagtttattaatccgatctttgagttcagcagggccatgaatgagctgcagctgaacgacgccgagtttgccttgcttatcgcaatttccattttcagcgccgaccgaccgaatgtgcaggatcagctacaggtcgaacggctgcagcacacctacgtggaggcattgcatgcttatgtgtcaatccaccatccgcacgatagactaatgttccccagaatgttgatgaaacttgttagcctccgaactttgtcatcagtccactccgaacaggtgtttgccttacggctccaagataagaaactgcccccactgttgtccgaaatatgggatgtgcacgagtag

SEQ ID NO: 158544 - DNA, 1344 bp, Artificial Sequence
  derived and/or modified sequence
atgagcctgtggctgggcgcccccgtgcccgacatcccccccgactctgctgtcgaattgtggaaacccggcgcacaagacgcatctagccaagcacaaggcgggagctcatgtattctgagagaagaggctcgtatgcctcactctgccggggggacagcgggtgtcgggctggaagccgcggagcctaccgctctgctaacccgggcggaacctccctctgagccaacagaaatcagaccccagaagagaaagaaagggccagcgccaaagatgttgggaaacgagctgtgcagtgtttgcggagataaggctagcgggtttcattacaacgtgctgagctgcgaaggttgtaaaggtttcttccgaagatctgtgattaagggggcgcactacatctgtcattctggcgggcactgtccaatggatacatatatgcgtcgaaaatgccaggagtgtaggcttagaaagtgcaggcaggcaggcatgagagaggaatgcgtgctgtctgaggagcagattaggcttaaaaaactaaaacgccaggaagaggaacaggcacacgccacttccttacctccacgcgcctcgagccctcctcagattctgccacagctttcgccggagcagctggggatgattgagaaactagtggcggcacagcagcagtgtaatcgtcgctccttttccgaccgcctcagagtcacgccttggccaatggcgcccgacccccattcgcgcgaggctagacagcagcgatttgctcactttacagagctcgccatagtctcagttcaggagatcgtggatttcgccaagcagcttcccgggttccttcagctatctcgtgaggaccagatagccctgctgaagacctccgcgattgaagtgatgctgcttgagacatctaggaggtacaatccaggctccgaaagtattacattcttgaaggatttctcctataaccgagaagacttcgccaaggcggggcttcaggtggagtttatcaacccaatctttgaattctcccgcgccatgaatgaactgcaactgaatgacgccgagttcgctcttctgatcgctatatcaatcttttcagctgacagacccaacgtccaggaccagctccaggtcgagcggctccaacatacttatgtggaagccctccatgcgtacgtgtctatccatcatccgcacgataggctgatgttccctcgtatgctgatgaagctggtcagtctgaggaccctgtcaagcgtgcactcagaacaggttttcgcactgcgactacaagataaaaaactgccaccactgctgtcagagatttgggatgtccacgaatag

SEQ ID NO: 158545 - DNA, 1501 bp, Artificial Sequence
  derived and/or modified sequence
ctggggtgcggggaaaaggcgcagtctcggtgggattgcgtgcaggagggtcgtggtctggctgtggcggaggagcataagaagactctgcggtggagctgtggaagccaggcgcacaggatgcaagcagccaggcccagggaggcagcagctgcatcctcagagaggaagccaggatgccccactctgctgggggtactgcaggggtggggctggaggctgcagagcccacagccctgctcaccagggcagagcccccttcagaacccacagagatccgtccacaaaagcggaaaaaggggccagcccccaaaatgctggggaacgagctatgcagcgtgtgtggggacaaggcctcgggcttccactacaatgttctgagctgcgagggctgcaagggattcttccgccgcagcgtcatcaagggagcgcactacatctgccacagtggcggccactgccccatggacacctacatgcgtcgcaagtgccaggagtgtcggcttcgcaaatgccgtcaggctggcatgcgggaggagtgtgtcctgtcagaagaacagatccgcctgaagaaactgaagcggcaagaggaggaacaggctcatgccacatccttgccccccagggcttcctcacccccccaaatcctgccccagctcagcccggaacaactgggcatgatcgagaagctcgtcgctgcccagcaacagtgtaaccggcgctccttttctgaccggcttcgagtcacgccttggcccatggcaccagatccccatagccgggaggcccgtcagcagcgctttgcccacttcactgagctggccatcgtctctgtgcaggagatagttgactttgctaaacagctacccggcttcctgcagctcagccgggaggaccagattgccctgctgaagacctctgcgatcgaggtgatgcttctggagacatctcggaggtacaaccctgggagtgagagtatcaccttcctcaaggatttcagttataaccgggaagactttgccaaagcagggctgcaagtggaattcatcaaccccatcttcgagttctccagggccatgaatgagctgcaactcaatgatgccgagtttgccttgctcattgctatcagcatcttctctgcagaccggcccaacgtgcaggaccagctccaggtagagaggctgcagcacacatatgtggaagccctgcatgcctacgtctccatccaccatccccatgaccgactgatgttcccacggatgctaatgaaactggtgagcctccggaccctgagcagcgtccactcagagcaagtgtttgcactgcgtctgcaggacaaaaagctcccaccgctgctctctgagatctgggatgtgcacgaatgactgttctgtccccatattttctgttttcttggccggatggctgaggcctggtggctgcctcctagaagtggaacagactgagaagggcaaacattcctgggagctgggcaaggaga

SEQ ID NO: 158546 - DNA, 1637 bp, Artificial Sequence
  derived and/or modified sequence
ctttccccaaattgctacttctctggggctccaggtcctgcttgtgctcagctccagctcactggctggccaccgagacttctggacaggaaactgcaccatcctcttctcccagcaagggggctccagagactgcccacccaggaagtctggtggcctggggatttggacagtgccttggtaatgaccagggctccaggaagagatgtccttgtggctgggggcccctgtgcctgacattcctcctgactctgcggtggagctgtggaagccaggcgcacaggatgcaagcagccaggcccagggaggcagcagctgcatcctcagagaggaagccaggatgccccactctgctgggggtactgcaggggtggggctggaggctgcagagcccacagccctgctcaccagggcagagcccccttcagaacccacagagatccgtccacaaaagcggaaaaaggggccagcccccaaaatgctggggaacgagctatgcagcgtgtgtggggacaaggcctcgggcttccactacaatgttctgagctgcgagggctgcaagggattcttccgccgcagcgtcatcaagggagcgcactacatctgccacagtggcggccactgccccatggacacctacatgcgtcgcaagtgccaggagtgtcggcttcgcaaatgccgtcaggctggcatgcgggaggagtgtgtcctgtcagaagaacagatccgcctgaagaaactgaagcggcaagaggaggaacaggctcatgccacatccttgccccccagggcttcctcacccccccaaatcctgccccagctcagcccggaacaactgggcatgatcgagaagctcgtcgctgcccagcaacagtgtaaccggcgctccttttctgaccggcttcgagtcacgccttggcccatggcaccagatccccatagccgggaggcccgtcagcagcgctttgcccacttcactgagctggccatcgtctctgtgcaggagatagttgactttgctaaacagctacccggcttcctgcagctcagccgggaggaccagattgccctgctgaagacctctgcgatcgaggtgatgcttctggagacatctcggaggtacaaccctgggagtgagagtatcaccttcctcaaggatttcagttataaccgggaagactttgccaaagcagggctgcaagtggaattcatcaaccccatcttcgagttctccagggccatgaatgagctgcaactcaatgatgccgagtttgccttgctcattgctatcagcatcttctctgcagaccggcccaacgtgcaggaccagctccaggtagagaggctgcagcacacatatgtggaagccctgcatgcctacgtctccatccaccatccccatgaccgactgatgttcccacggatgctaatgaaactggtgagcctccggaccctgagcagcgtccactcagagcaagtgtttgcactgcgtctgcaggacaaaaagctcccaccgctgctctctgagatctgggatgtgcacgaatgactgttctgtccccatattttctgttttcttggccggatggctgaggcctggtggctgcctcctagaagtggaacagactgagaagggc

SEQ ID NO: 158547 - DNA, 2731 bp, Artificial Sequence
  derived and/or modified sequence
cttctctggggctccaggtcctgcttgtgctcagctccagctcactggctggccaccgagacttctggacaggaaactgcaccatcctcttctcccagcaagggggctccagagactgcccacccaggaagtctggtggcctggggatttggtgggtctgctccttagcagtggcctggggctctgtgtgtgtatctggggtggggtcggggaatgtcctaaggatctgagaagggggtttctggggagaagtgaggggtgatggtgatggaagcttgggacaggagcaggactctgggtcccagaataactcatgaggggctcaggggaggaggtcctctatgtgaattggggagattcttggagacaggtttgtgctgggaccctggaaagtggcacgagcgaggttctctaataagcagcgtgtttcactgggtggagtgagctgtcctcagtgttggagtgagggggaaggggcccaagagaagcagggcagatgcacccaaacattccctgctggcctggaggggactttgggggagaaaagccggcacggtggctgggagcccagactttggagtcagaggagggttggagtcttgactctaccgccgcctaactgtgtgaccatagttacttaatctctttgaacctcagtttgcttatctgtaaaatgagtttaagaatagtcctgagccaggagcagtagcgtgcgcccataatctcagatactcaggaagctgaaacctgattgcttcagcccagtagtttgaggcgatagtgtcctattattgcacctgtgaatagcactgagttccagcctgggcaacatagagagaccccatctcaaaaaaaaaattaatagttttgacctcagagggatattatgaggaaagcacataaagccttataacaggctgggcgcagtggcttactccaataatccccacactttgggaggcccaggtgagaggatcacttgagcccaggaattcctagactagcctgggcaaaatagggagaacctgtctctaaaaaacataatagtaatataataaagccttagtacaggctaatatatggcaagtaaatgttagctgatattgttgatattgataaaagggaggatcaggtggagaagggagctgaggccagaaaggagcccagttctagaagagtataatctgggtccttcctgcaggacagtgccttggtaatgaccagggctccaggaagagatgtccttgtggctgggggcccctgtgcctgacattcctcctgactctgcggtggagctgtggaagccaggcgcacaggatgcaagcagccaggcccagggaggcagcagctgcatcctcagagaggaagccaggatgccccactctgctgggggtactgcaggggtggggctggaggctgcagagcccacagccctgctcaccagggcagagcccccttcagaacccacagagatccgtccacaaaagcggaaaaaggggccagcccccaaaatgctggggaacgagctatgcagcgtgtgtggggacaaggcctcgggcttccactacaatgttctgagctgcgagggctgcaagggattcttccgccgcagcgtcatcaagggagcgcactacatctgccacagtggcggccactgccccatggacacctacatgcgtcgcaagtgccaggagtgtcggcttcgcaaatgccgtcaggctggcatgcgggaggagtgtgtcctgtcagaagaacagatccgcctgaagaaactgaagcggcaagaggaggaacaggctcatgccacatccttgccccccagggcttcctcacccccccaaatcctgccccagctcagcccggaacaactgggcatgatcgagaagctcgtcgctgcccagcaacagtgtaaccggcgctccttttctgaccggcttcgagtcacgccttggcccatggcaccagatccccatagccgggaggcccgtcagcagcgctttgcccacttcactgagctggccatcgtctctgtgcaggagatagttgactttgctaaacagctacccggcttcctgcagctcagccgggaggaccagattgccctgctgaagacctctgcgatcgaggtgatgcttctggagacatctcggaggtacaaccctgggagtgagagtatcaccttcctcaaggatttcagttataaccgggaagactttgccaaagcagggctgcaagtggaattcatcaaccccatcttcgagttctccagggccatgaatgagctgcaactcaatgatgccgagtttgccttgctcattgctatcagcatcttctctgcagaccggcccaacgtgcaggaccagctccaggtagagaggctgcagcacacatatgtggaagccctgcatgcctacgtctccatccaccatccccatgaccgactgatgttcccacggatgctaatgaaactggtgagcctccggaccctgagcagcgtccactcagagcaagtgtttgcactgcgtctgcaggacaaaaagctcccaccgctgctctctgagatctgggatgtgcacgaatgactgttctgtccccatattttctgttttcttggccggatggctgaggcctggtggctgcctcctagaagtggaacagactgagaagggcaaacattcctgggagctgggcaaggagatcctcccgtggcattaaaagagagtcaaagggt

SEQ ID NO: 158548 - DNA, 1344 bp, Artificial Sequence
  derived and/or modified sequence
atgtccctgtggctgggtgctcccgtgccagacattcctccagacagcgcagtcgaattatggaaacccggtgctcaggacgcgtctagccaggcccagggaggctcgtcatgtattcttcgcgaggaagcccgaatgcctcatagcgcgggaggtactgccggagtcggattggaggcagcggagccaaccgccctgttgactcgagctgagccccctagtgagcccactgagatcaggcctcagaaacggaagaagggcccagcaccgaagatgctcggcaacgagctttgcagcgtgtgcggcgataaagctagcgggttccactacaacgtcctgtcctgcgagggctgtaagggattctttcgcaggagcgtgattaaaggggcacactacatctgccactcaggcggacattgtcccatggatacatatatgcggaggaagtgccaggagtgcagactgcggaagtgtcggcaggccggaatgagggaagaatgcgtgttgagcgaagaacagattcggctgaagaagttgaagaggcaggaagaggagcaggcacatgcaacatccctgccccctcgagcgtcttctcctcctcaaatcttgcctcagctgtcgccagaacaactgggcatgatcgagaagctggttgccgcacaacagcagtgcaataggcggagcttttcagaccgcctcagggtgacaccgtggcccatggctccagacccccactcccgtgaggccaggcagcagaggtttgcacatttcacggaattggcaattgtgtccgtccaggaaatcgttgatttcgcaaagcaactgcccggattcttgcagctctcaagggaggatcagattgctttactcaagacctccgcaatcgaggtcatgttactcgagacaagccgcagatataaccccggatcagagagcatcacctttctaaaagacttcagctacaatcgtgaagacttcgccaaagctgggctgcaagtggaattcataaaccccatttttgagttttcaagagccatgaacgaactgcaactgaacgacgccgagttcgcactactgatcgcaatttcgatcttcagtgcggatcgcccaaatgtgcaggatcaactccaggtggagaggctgcagcacacctatgtggaggccttgcatgcctacgtctccattcatcaccctcatgaccgactgatgttccccagaatgctcatgaaactggtgtcccttagaactctgtcctccgtgcatagcgagcaagtgtttgcattgcgacttcaggacaaaaaactgccacccctgctgtcagagatctgggacgtacatgagtag

SEQ ID NO: 158549 - DNA, 1344 bp, Artificial Sequence
  derived and/or modified sequence
atgtcgctgtggttaggagctcccgtgcccgatattcccccagactcggccgtggagctgtggaagcccggagctcaggatgcgtcctcacaggcccagggaggatcttcttgtattctgcgagaggaagcacgcatgcctcactccgccggaggaactgctggggtcggcctggaagctgctgagcccacagccctgctgacaagagctgagcctcctagcgagcccacggagataaggccccaaaagagaaaaaaaggacctgctcctaagatgctggggaacgagttgtgcagtgtgtgcggggacaaagctagtggcttccactacaacgtcttgtcttgcgaaggttgtaaaggcttttttcggcgatccgtgattaagggggcacattatatttgtcattctggcggtcactgcccaatggatacctacatgagacggaagtgtcaggaatgccgtttgaggaagtgtcgccaggcgggtatgagagaagagtgcgtgctaagcgaggaacagatccgcctaaaaaaacttaaacggcaggaggaggagcaggcccatgccacctcactacccccacgagccagctcacctccccagatcctcccacagctttccccggaacagttagggatgatagagaagctcgtggccgctcagcaacagtgcaataggagatcattcagcgaccgactgcgggttacaccctggcccatggctccagatcctcattccagagaggcaagacagcagagatttgcacactttactgagttggccatagtgtctgtacaggaaatcgtagatttcgcaaaacagctccccggatttctgcagctgtctagggaggatcagatcgccctgcttaaaacgtccgccatagaggtcatgcttctggaaaccagtcggagatacaaccccggaagtgaatctatcaccttcttgaaagacttttcatataatcgggaggacttcgctaaggcagggttacaagtggaattcataaaccccatttttgagtttagccgggctatgaatgagcttcagctgaacgacgctgaattcgctttattgattgcaatttccattttttccgccgatagaccaaatgtgcaggaccagctgcaagtggaaaggcttcagcacacttacgtcgaggcactccatgcatatgtaagcattcaccaccctcacgaccgactgatgttcccacggatgctgatgaagctcgtctccctaagaacgttatctagtgtgcactccgagcaagtttttgcattgcgactccaagataaaaagctaccccctctcctgtccgaaatatgggatgtgcacgagtag

SEQ ID NO: 158550 - protein, 63 aa, Artificial Sequence
  derived and/or modified sequence
MPGLVDSNPAPPESQEKKPLKPCCACPETKKARDACIIEKGEEHCGHLIEAHKECMRALGFKI

SEQ ID NO: 158551 - protein, 98 aa, Artificial Sequence
  derived and/or modified sequence
MPGLVDSNPAPPESQEKKPLKPCCACPETKKARDAWFRGRVSVDLSRSLVPGNDGERGERQASTTHSFLQIIIEKGEEHCGHLIEAHKECMRALGFKI

SEQ ID NO: 158552 - DNA, 192 bp, Artificial Sequence
  derived and/or modified sequence
atgcccggcctggtggacagcaatcctgccccccctgaatcacaggaaaagaagcctttaaagccctgttgtgcctgccccgaaaccaagaaagcccgagatgcctgcattattgagaagggagaagagcattgtggccaccttattgaagcacacaaggagtgcatgagggcgctgggattcaagatttag

SEQ ID NO: 158553 - DNA, 192 bp, Artificial Sequence
  derived and/or modified sequence
atgccaggccttgtggactctaatcctgccccccctgaaagtcaagaaaagaagcctttgaagccgtgttgcgcctgtccggagactaaaaaagcaagggacgcttgcattatcgagaaaggggaagagcactgtggacatcttatcgaggctcacaaagaatgtatgcgagcgctgggttttaaaatatag

SEQ ID NO: 158554 - DNA, 297 bp, Artificial Sequence
  derived and/or modified sequence
atgcctgggttggtggattccaatcctgccccacccgagtctcaggagaagaagcctctgaaaccctgctgtgcatgtcctgaaactaagaaggcccgtgacgcctggttccggggacgggtgtcggtggacctgtcaagatccctggtgcctggtaatgatggggagagaggggagcgccaagctagcactacccactcctttttacagataataattgagaagggggaagagcactgtggacatctcatagaggcccacaaggaatgtatgcgcgctttgggatttaagatttag

SEQ ID NO: 158555 - DNA, 192 bp, Artificial Sequence
  derived and/or modified sequence
atgcccggtctggtggactcaaatccggctccacctgagagccaggaaaaaaagcccctgaagccctgctgcgcttgccctgaaaccaagaaggcccgcgacgcttgcataattgagaagggtgaggaacactgcggccacctgatcgaggcgcataaggagtgtatgagagctttgggattcaaaatctag

SEQ ID NO: 158556 - DNA, 192 bp, Artificial Sequence
  derived and/or modified sequence
atgcctggcctggtggacagcaacccagcccctcctgagagccaggagaagaagcccctgaagccctgctgtgcctgcccagagaccaagaaggccagagatgcctgcatcatcgagaagggggaggagcactgcggccacctgattgaggcccacaaggagtgcatgagggccctgggcttcaagatctag

SEQ ID NO: 158557 - DNA, 297 bp, Artificial Sequence
  derived and/or modified sequence
atgcctggcctggtggacagcaacccagcccctcctgagagccaggagaagaagcccctgaagccctgctgtgcctgcccagagaccaagaaggccagagatgcctggttccggggccgggtgtctgtggacctgagccgcagcctggtgcctggaaatgatggagagcggggggagcggcaggccagcaccacccacagcttcctgcagatcatcattgaaaaaggagaggagcactgcggccacctgattgaggcccacaaggagtgcatgagggccctgggcttcaagatctag

SEQ ID NO: 158558 - DNA, 192 bp, Artificial Sequence
  derived and/or modified sequence
atgcccggcctggtggacagcaaccccgccccccccgagagccaggagaagaagcctctaaaaccctgctgtgcctgccccgagactaagaaagcccgggatgcctgcatcatcgaaaagggggaagagcactgcggccatctgattgaagcccataaggaatgtatgcgtgccctcggcttcaaaatctag

SEQ ID NO: 158559 - DNA, 192 bp, Artificial Sequence
  derived and/or modified sequence
atgcccggcctggtggacagcaaccccgccccccccgagagccaggaaaagaagccattgaagccctgctgcgcatgtcccgagaccaaaaaggcccgtgatgcctgtataattgaaaaaggcgaggagcattgtggtcacctgattgaggcccacaaagagtgcatgagggcgcttggatttaagatttag

SEQ ID NO: 158560 - DNA, 297 bp, Artificial Sequence
  derived and/or modified sequence
atgcccggcctggtggacagcaaccccgccccccccgagagccaggagaagaaacccctgaaaccctgctgcgcttgtcccgaaactaagaaagccagggatgcctggtttcgggggagagtttcagtggacctgagcaggtcattggtaccgggaaatgacggagagcgaggggagcgccaggcctccacgactcattcgttcctgcaaattattattgagaaaggcgaggaacactgcgggcatctgattgaagctcacaaagagtgcatgagggctctcggttttaagatctag

SEQ ID NO: 158561 - DNA, 192 bp, Artificial Sequence
  derived and/or modified sequence
atgcccggcctggtggacagcaaccccgccccccccgagagccaggaaaagaagcctctgaaaccttgttgtgcatgtcctgaaaccaagaaggcgagagatgcttgtattatagaaaagggagaggagcattgcggccacctgatcgaagctcacaaagaatgtatgcgcgcgctgggctttaagatttag

SEQ ID NO: 158562 - DNA, 192 bp, Artificial Sequence
  derived and/or modified sequence
atgcccggtctcgtggattccaatcccgcacctcccgaatcccaagagaagaagcctcttaagccctgttgcgcttgtccagagacgaagaaagccagggacgcctgtattattgaaaagggcgaggagcactgcgggcacctcatcgaagcacacaaggaatgtatgcgcgctctcggttttaaaatctag

SEQ ID NO: 158563 - DNA, 192 bp, Artificial Sequence
  derived and/or modified sequence
atgccagggctggtcgattcaaatcccgcaccccctgaaagccaggagaagaaaccccttaaaccttgttgtgcctgtcccgagactaagaaggccagggatgcgtgcatcatagaaaagggggaagaacactgtggacatctcattgaagcccataaggagtgtatgagggcgttggggtttaagatttag

SEQ ID NO: 158564 - DNA, 297 bp, Artificial Sequence
  derived and/or modified sequence
atgcccggtttggtggattcgaacccagcgccaccagagtcccaggagaaaaagccattaaagccctgctgtgcttgtcctgagaccaagaaggccagagatgcttggtttcggggacgcgtgagcgtggatcttagcaggagtttagtgccagggaacgacggtgaacgtggcgagcgtcaggcgagcacaacgcattcatttctgcagataataatcgagaaaggcgaggaacactgtgggcacctgattgaggcacacaaagagtgtatgcgggctctgggttttaagatctag

SEQ ID NO: 158565 - DNA, 192 bp, Artificial Sequence
  derived and/or modified sequence
atgcccggtttagtagatagcaaccctgccccacctgagtcccaggaaaaaaagccattgaaaccttgttgtgcctgtccagaaaccaaaaaggccagagacgcatgtataattgagaaaggggaggaacactgtggccacctgatcgaggctcacaaggaatgcatgagagctctcggctttaagatatag

SEQ ID NO: 158566 - DNA, 684 bp, Artificial Sequence
  derived and/or modified sequence
gcgactgccggaagtgactgcggacgaatcggcgtttgccgaggctggcatagatttggctgtctccgctcatagctgcttttggcgcgaaagatgccgggtctggttgactcaaaccctgccccgcctgagtctcaggagaagaagccgctgaagccctgctgcgcttgcccggagaccaagaaggcgcgcgatgcgtgtatcatcgagaaaggagaagaacactgtggacatctaattgaggcccacaaggaatgcatgagagccctaggatttaaaatatgaaatggtggtctgctgtgtgaataaataattcctgaagaatgaagaagattaattttgggagttctttgacgaactttgatatgtggaaaaagtatttataatttattgtaagaagaaagtaaaatattactagtggaagatcttcagttgtgtttcttttttgtgttcctcatttgctcacgtggctttttcccccaaaggatatataccaacaaatcttgtaacataaggttcttatgttcttattactatgtcattctgggaactctggatatctgttgtcaggagaaagcagatactgacctcaaccaatgaaatctccagaattaggtgcatagaagtaaaataaccctttaccaattcagaatcagtgtggtagccatatcatctcattcaaca

SEQ ID NO: 158567 - DNA, 555 bp, Artificial Sequence
  derived and/or modified sequence
tttaaattccccacctgtcagagagaagcaggacttcctgtactttttagagcgactgccggaagtgactgcggacgaatcggcgtttgccgaggctggcatagatttggctgtctccgctcatagctgcttttggcgcgaaagatgccgggtctggttgactcaaaccctgccccgcctgagtctcaggagaagaagccgctgaagccctgctgcgcttgcccggagaccaagaaggcgcgcgatgcgtgtatcatcgagaaaggagaagaacactgtggacatctaattgaggcccacaaggaatgcatgagagccctaggatttaaaatatgaaatggtgagtataggtgcttggagaggataaggaaatcaccctgatccaatagctggtaacctgcgaggttacctgtgctgcgtgctgtggggctggttcagtgcctgtggcctggacattgttctttggagcttcctgctggctgtggtctgcctgctccagctggcacacctggtataccgcctgcgtgaggacaccctccctgaggagtttgacct

SEQ ID NO: 158568 - DNA, 471 bp, Artificial Sequence
  derived and/or modified sequence
ggctgtctccgctcatagctgcttttggcgcgaaagatgccgggtctggttgactcaaaccctgccccgcctgagtctcaggagaagaagccgctgaagccctgctgcgcttgcccggagaccaagaaggcgcgcgatgcgtggtttcgtggtcgggtctctgttgacttatcccgtagcttagtaccgggaaacgatggagagagaggagaacggcaagcttcaaccactcattccttcctacaaattatcatcgagaaaggagaagaacactgtggacatctaattgaggcccacaaggaatgcatgagagccctaggatttaaaatatgaaatggtggtctgctgtgtgaataaataattcctgaagaatgaagaagattaattttgggagttctttgacgaactttgatatgtggaaaaagtatttataatttattgtaagaagaaagtaaaatattactagtggaa

SEQ ID NO: 158569 - DNA, 660 bp, Artificial Sequence
  derived and/or modified sequence
cgaggctggcatagatttggctgtctccgctcatagctgcttttggcgcgaaagatgccgggtctggttgactcaaaccctgccccgcctgagtctcaggagaagaagccgctgaagccctgctgcgcttgcccggagaccaagaaggcgcgcgatgcgtgtatcatcgagaaaggagaagaacactgtggacatctaattgaggcccacaaggaatgcatgagagccctaggatttaaaatatgaaatgggtctcactctgttacccaggctggggtgaagtggcccaatcacagctcattgcagcctcaacctgggaggttcaggtgatcctcccctcagcctcctaagtaactgggactacaggtgtgggccaccgtgcctggctaattttttgtgttgttttttagagatggggtttcaccatcttgcccaggctggtctcaacctcttggactcaggcaatcctcctgccttggtctcccaaagtgctgggattaagaggtgtgagccactatgcctggccaagaaatgcttttaagtagggagtgggtatcccacggaagtattgctttctgaaaaatgaaaatggaattgtagcatgctttattcgaataaaactaaagcctcaggccattttttttttaattaaaaagtaaa

SEQ ID NO: 158570 - DNA, 192 bp, Artificial Sequence
  derived and/or modified sequence
atgcccggcctggtggacagcaaccccgccccccccgagagccaggagaagaagcccctgaagccctgctgcgcctgccccgagaccaagaaggccagagacgcctgcatcatcgagaagggcgaggagcactgcggccacctgatcgaggcccacaaggagtgcatgagagccctgggcttcaagatctag

SEQ ID NO: 158571 - DNA, 297 bp, Artificial Sequence
  derived and/or modified sequence
atgcccggcctggtggacagcaaccccgccccccccgagagccaggagaagaagcccctgaagccctgctgcgcctgccccgagaccaagaaggccagagacgcctggttcagaggcagagtgagcgtggacctgagcagaagcctggtgcccggcaacgacggcgagagaggcgagagacaggccagcaccacccacagcttcctgcagatcatcatcgagaagggcgaggagcactgcggccacctgatcgaggcccacaaggagtgcatgagagccctgggcttcaagatctag

SEQ ID NO: 158572 - protein, 329 aa, Artificial Sequence
  derived and/or modified sequence
MSAFDTNPFADPVDVNPFQDPSVTQLTNAPQGGLAEFNPFSETNAATTVPVTQLPGSSQPAVLQPSVEPTQPTPQAVVSAAQAGLLRQQEELDRKAAELERKERELQNTVANLHVRQNNWPPLPSWCPVKPCFYQDFSTEIPADYQRICKMLYYLWMLHSVTLFLNLLACLAWFSGNSSKGVDFGLSILWFLIFTPCAFLCWYRPIYKAFRSDNSFSFFVFFFVFFCQIGIYIIQLVGIPGLGDSGWIAALSTLDNHSLAISVIMMVVAGFFTLCAVLSVFLLQRVHSLYRRTGASFQQAQEEFSQGIFSSRTFHRAASSAAQGAFQGN

SEQ ID NO: 158573 - protein, 287 aa, Artificial Sequence
  derived and/or modified sequence
MSAFDTNPFADTNAATTVPVTQLPGSSQPAVLQPSVEPTQPTPQAVVSAAQAGLLRQQEELDRKAAELERKERELQNTVANLHVRQNNWPPLPSWCPVKPCFYQDFSTEIPADYQRICKMLYYLWMLHSVTLFLNLLACLAWFSGNSSKGVDFGLSILWFLIFTPCAFLCWYRPIYKAFRSDNSFSFFVFFFVFFCQIGIYIIQLVGIPGLGDSGWIAALSTLDNHSLAISVIMMVVAGFFTLCAVLSVFLLQRVSGVGRADSKWEEAGNRFLPLPRDVFHHCSWAS

SEQ ID NO: 158574 - DNA, 990 bp, Artificial Sequence
  derived and/or modified sequence
atgtctgctttcgacacaaacccctttgctgacccagtggacgtcaatccattccaggatccatcggtgactcagctgactaacgccccacaaggaggcctggccgagttcaaccctttttcagaaaccaacgcggcgacaacagtgcctgtgacacagttgccaggctcctctcagccggcggttcttcagcctagtgtcgagccgacccaaccaacgccccaggccgtggtgtccgccgcccaggcaggactcctgcgccaacaggaagaactggacaggaaagcagcagaattggagcggaaggaacgcgagctgcaaaataccgtggcgaacttgcacgtcagacagaacaactggcctcctctgccttcttggtgtccggtgaaaccttgtttctatcaggacttttccacagagattcctgccgactatcagaggatctgtaagatgctatattacctgtggatgctgcacagtgtgaccctgttcctcaatctcctggcgtgcctggcatggtttagcggcaatagttctaagggtgtggatttcggtctcagtatcctttggtttctgatctttacaccgtgcgcttttctgtgctggtaccggcctatctataaggcatttcgtagcgataactcattttcctttttcgtgttcttctttgtgtttttttgccagattgggatctacataatacagttggttggaatccctgggttgggcgattctggctggattgccgccctgagtaccctcgataaccacagtctggcgatctctgttatcatgatggtggtggcagggttctttaccctctgcgccgtgctgagtgtctttctacttcaaagagtgcatagcctgtatcgccgaaccggggcttcctttcagcaagcgcaggaggagttttctcagggaatttttagcagcagaacatttcaccgtgcagcctcctccgccgcacagggcgcttttcagggtaactag

SEQ ID NO: 158575 - DNA, 864 bp, Artificial Sequence
  derived and/or modified sequence
atgtccgcctttgacactaacccttttgcagacactaacgccgccacaactgtccccgttactcagctgcccggctccagtcagcctgctgtgctgcagccatccgtagaacctacacaacccaccccccaggccgtagttagcgctgcacaggcaggactcctgaggcagcaggaagagctggatcgaaaagctgctgaacttgagagaaaggagcgagaactgcaaaacacggtggccaatctacacgtccgtcagaacaactggccgccactgccttcatggtgccccgtaaagccctgtttttaccaggatttttcaactgaaattccagcagactaccagcggatttgcaaaatgctctattacctgtggatgctccattccgtaaccctgtttctgaacctgttggcctgtttggcatggtttagcgggaactcctcaaaaggggtagatttcgggctgagcattttatggttcctgatatttacaccttgtgccttcctttgctggtacaggccaatctataaagcattccgctcagacaattccttcagtttctttgtttttttctttgtcttcttctgtcagataggaatttacataatacagctcgtgggcatacccggccttggagacagtggttggattgcagctttatccacactggacaaccactcactggctattagtgtcatcatgatggtggtggcaggctttttcaccctgtgtgctgtgctgtccgtttttctcctgcagcgggtgtctggcgtgggccgagccgactccaaatgggaggaggccggtaaccggttcctgcctctgcctagagacgtattccaccactgcagttgggcctcctag

SEQ ID NO: 158576 - DNA, 990 bp, Artificial Sequence
  derived and/or modified sequence
atgtctgcctttgacaccaacccctttgctgaccctgtggatgtgaaccccttccaggaccccagcgtgacccagctgaccaatgccccccagggcggcctggccgagttcaaccccttcagcgagaccaatgctgccaccaccgtgcctgtgacccagctgcccggcagcagccagcctgctgtgctgcagcccagcgtggagcccacccagcccaccccccaggccgtggtgtctgctgcccaggccggcctgctgcggcagcaggaggagctggacaggaaggctgctgagctggagaggaaggagcgggagctgcagaacacagtggccaacctgcacgtgcggcagaacaactggccacccctgcccagctggtgccctgtgaagccctgcttctaccaggacttcagcacagagatcccagctgactaccagaggatctgcaagatgctgtactacctgtggatgctgcacagcgtgaccctcttcctgaacctgctggcctgcctggcctggttcagcggcaacagcagcaagggcgtggactttggcctgagcatcctgtggttcctgatcttcaccccctgtgccttcctgtgctggtaccggcccatctacaaggccttcagaagtgacaacagcttctccttctttgtgttcttctttgtgttcttctgccagatcggcatctacatcatccagctggtgggcatccctggcctgggggacagcggctggattgctgccctgagcaccctggacaaccacagcctggccatcagcgtcatcatgatggtggtggccggcttcttcaccctgtgtgctgtgctgtctgtgttcctgctgcagagggtgcacagcctgtacagaagaactggagccagcttccagcaggcccaggaggagttcagccagggcatcttcagcagcaggaccttccacagagctgccagcagcgctgcccagggcgccttccagggcaactag

SEQ ID NO: 158577 - DNA, 864 bp, Artificial Sequence
  derived and/or modified sequence
atgtctgcctttgacaccaacccctttgctgacaccaatgctgccaccaccgtgcctgtgacccagctgcccggcagcagccagcctgctgtgctgcagcccagcgtggagcccacccagcccaccccccaggccgtggtgtctgctgcccaggccggcctgctgcggcagcaggaggagctggacaggaaggctgctgagctggagaggaaggagcgggagctgcagaacacagtggccaacctgcacgtgcggcagaacaactggccacccctgcccagctggtgccctgtgaagccctgcttctaccaggacttcagcacagagatcccagctgactaccagaggatctgcaagatgctgtactacctgtggatgctgcacagcgtgaccctcttcctgaacctgctggcctgcctggcctggttcagcggcaacagcagcaaaggagtggactttggcctgagcatcctgtggttcctgatcttcaccccctgtgccttcctgtgctggtaccggcccatctacaaggccttcagaagtgacaacagcttctccttctttgtgttcttctttgtgttcttctgccagatcggcatctacatcatccagctggtgggcatccctggcctgggggacagcggctggattgctgccctgagcaccctggacaaccacagcctggccatcagcgtcatcatgatggtggtggccggcttcttcaccctgtgtgctgtgctgagcgtcttcctgctgcagagggtgtctggagtgggccgggctgacagcaagtgggaggaggccggcaaccgcttcctgcccctgcccagagatgtgttccaccactgctcctgggccagctag

SEQ ID NO: 158578 - DNA, 990 bp, Artificial Sequence
  derived and/or modified sequence
atgagcgccttcgacaccaaccccttcgccgaccccgtggacgtgaaccccttccaggatccttccgtcacccaactaacgaatgccccccagggcgggctcgctgagtttaatccctttagcgaaactaatgccgcaacaacagtacccgtcacccaactgcctggaagctcccagcctgccgtgttgcaaccctctgtggagccgacgcagccgactcctcaggccgtggtaagcgctgcccaggccgggcttcttcgccaacaagaggagttagaccgcaaggccgctgaactcgagcgaaaggagagagaactgcaaaatacagtggcgaatcttcatgtacggcaaaacaactggccccctctgccatcatggtgtccagtaaaaccctgtttttaccaggatttctcaaccgaaatcccagcggattaccagcgaatatgcaaaatgctgtactacctgtggatgttacatagtgtcacactttttctcaacctcttggcatgcctggcgtggtttagcggtaattcctccaagggggtggattttggcctgagcatcctctggtttttgatttttaccccatgtgcatttctttgttggtataggccgatctataaggcctttcgctctgataattctttctccttctttgtattcttcttcgtattcttctgccaaatcggcatttacattattcagctggtgggaattccagggctgggggactctggctggattgctgctttgtctaccctagacaatcacagcctggccatatccgtgattatgatggtggtggcaggcttttttacactttgtgctgtactgtctgtgtttctcctgcaaagagtgcactcactctaccgtagaaccggagcctccttccagcaggcacaagaggaattttcacagggtatttttagtagtcgcacattccacagagctgccagttctgctgcgcagggagccttccaaggcaattag

SEQ ID NO: 158579 - DNA, 864 bp, Artificial Sequence
  derived and/or modified sequence
atgagcgccttcgacaccaaccccttcgccgacaccaacgccgccaccacggtgcccgtaactcagttgccaggctcatcccaaccagcggttctgcagcccagcgtagagcccacacagccgaccccgcaggcggttgtctctgccgctcaggcgggtctgctccgacagcaggaggagctagatcggaaagctgctgaactggagcgcaaggaacgggagctgcagaatacagtggctaacttacatgtgcggcaaaacaattggccccctctcccatcttggtgtcctgttaaaccatgcttctatcaagatttttccacagagattcccgctgactaccagagaatctgcaagatgctgtactatctgtggatgttgcacagcgtcaccttgtttctcaatctgctggcatgtctggcctggtttagcggaaactccagcaagggggtggacttcggacttagtatcttgtggtttttaatatttacaccatgtgcttttttgtgttggtatagacctatttacaaggcctttaggtctgataactcctttagcttctttgtgttcttttttgtctttttttgccaaattggaatatatattatccagctcgtgggaattccgggattaggcgattctgggtggatagcagccctgtccacactggacaaccactccctggcgatcagcgtgatcatgatggtcgtagctgggttcttcaccttgtgtgccgtgctctccgtttttttactgcagcgtgtcagtggagtggggcgtgccgactccaaatgggaggaggccgggaataggttcctgcccttaccacgcgacgtgttccatcattgtagttgggcttcatag

SEQ ID NO: 158580 - DNA, 990 bp, Artificial Sequence
  derived and/or modified sequence
atgagtgcgttcgacactaaccccttcgccgaccccgtcgatgtgaatccattccaggatccgtccgtgacacagttaactaatgccccacaagggggtctggctgagttcaatccattcagtgaaacgaacgcagcaacaaccgtgcccgtcacccagcttccaggctcttcccagccagctgtactccaaccttccgtcgaacctacacagccaaccccacaggctgtggtatcagccgcacaggccggtttattgcggcagcaggaggaattggatagaaaggccgctgagcttgaaagaaaagagcgggagctgcagaacacggttgcaaatctccacgtaagacaaaacaattggccacctcttcccagctggtgtccggtgaagccatgtttctaccaggacttttctaccgaaatccctgcagattatcagagaatatgcaaaatgctgtattacctatggatgctacacagtgtgacactgttcttgaatctactcgcttgtctggcctggttttcaggtaactcatccaaaggtgttgacttcggactatccatcttgtggtttctgatcttcacaccttgcgccttcctatgctggtataggcccatctacaaggcttttcggtctgataactccttttctttctttgtctttttcttcgtgtttttctgtcagataggcatttatataatccagttggtggggatcccaggtctcggagattctggatggatcgccgcactgtccaccttagataaccactcactcgctattagcgttattatgatggtggtggctgggttcttcactctgtgtgccgtcctgtctgtgtttttacttcagagggtgcactccttatatcgccgaaccggtgcctccttccagcaggcgcaagaagagttttcccagggtatttttagctcccggaccttccaccgggcagcctcttcagccgctcagggagcgtttcagggaaattag

SEQ ID NO: 158581 - DNA, 864 bp, Artificial Sequence
  derived and/or modified sequence
atgtctgcatttgatacgaacccatttgccgataccaacgctgcaacaaccgtgccagtgactcaacttcctggctcgtcccagccagccgtgctgcaaccctcagtcgagcccacacagccaacaccacaggccgttgtaagtgccgctcaggcaggcctgctgagacagcaggaggagctggatcggaaagccgcagagcttgaaaggaaggaacgtgagctgcagaatacggtggccaatctccacgtgcggcagaacaactggcccccactgccatcttggtgtccagtgaagccatgcttctatcaggatttctcaaccgagatccccgcagattatcaaagaatctgcaagatgctgtattatctgtggatgctgcacagtgtgacactttttcttaatctgcttgcatgcttagcgtggttttcaggtaactcctccaagggcgtggattttggcctctcaattctgtggttcctgatctttaccccatgtgcctttctgtgctggtatcgcccaatctataaggcgtttaggagcgataactcattttcattcttcgtgtttttcttcgtgttcttctgtcagatcggcatctacattatacaactggtgggcatccctggtctcggggattcaggatggatcgctgccctgtcaaccctggacaatcattcccttgcaatctcagtgattatgatggtggtggcaggcttctttacgctttgcgctgtgctgtcggttttcctcctccagcgcgtgtctggcgtcggccgagcagattccaaatgggaagaggccggaaatcgtttcctgccgctgcctcgcgatgttttccatcactgtagctgggctagttag

SEQ ID NO: 158582 - DNA, 2466 bp, Artificial Sequence
  derived and/or modified sequence
tcgcgcctgcgccagaaccgctgcctcgctcccggaagtggagggtctacacgaagcgccgctgggtctgggtgcccggaggcagcagcgttcgcggagttcgcccgctggcccccgatcaccatgtcggctttcgacaccaaccccttcgcggacccagtggatgtaaaccccttccaggatccctctgtgacccagctgaccaacgccccgcagggcggcctggcggaattcaaccccttctcagagacaaatgcagcgacaacagttcctgtcacccaactccctgggtcctcacagccagcggttctccagccatcagtggaaccaacccagccgaccccccaggccgtggtgtctgcagcccaggcaggcctgctccggcagcaggaagaactggacaggaaagctgccgagctggaacgcaaggagcgggagctgcagaacactgtagccaacttgcatgtgagacagaacaactggccccctctgccctcgtggtgccctgtgaagccctgcttctatcaggatttctccacagagatccctgccgactaccagcggatatgcaagatgctctactatctgtggatgttgcattcagtgactctgtttctgaacctgcttgcctgcctggcctggttctcgggcaacagctccaagggagtggactttggcctctccatcctgtggtttctgatcttcactccctgtgccttcctttgttggtaccgacccatctataaggcctttaggtccgacaactctttcagcttctttgtgttcttctttgtatttttttgtcaaatagggatctacatcatccagttggttggcatccctggcctgggggacagcggttggattgcagccctgtctacactggataatcattccctggccatatcagtcatcatgatggtggtggctggcttcttcaccctctgtgccgtgctctcagtcttcctcctgcagcgggtgcactccctctaccgacggacaggggccagcttccagcaggcccaggaggagttttcccagggcatcttcagcagcagaaccttccacagagctgcttcatctgctgcccaaggagccttccaggggaattagtcctcctctcttctctccccctcagcctttctctcgcctgccttctgagctgcactttccgtgggtgccttatgtggtggtggttgtgcccagcacagacctggcagggttcttgccgtggctcttcctcctccctcagcgaccagctctccctggaacgggagggacagggaattttttccccctctatgtacaaaaaaaaacaaagctctctttccttctctggtgatggtttggtaggattcttttgtctctggaagcagtgggactgaagttctcttcgtcctgtgcacacacagacacccccacacagttgggatcacaggctgacctgggcccatcccagctggagctttctgccagggtcctgggccttgactcccccaccctgcaggcctggcctgaatctggcttcttagacacagcccagtccttcctgcctgggctgggaataagcctctcacaggttctggtggacagatctgttccccaggtcactccagtggtctccaggcttccagagaaggctggttgcctcaagctcttctctgcctcataaacggatccagagaaggctggttgccttaagctcttccctgcctcgtgttcctgagaaacggattaatagccctttatccccctgcaccctcctgcaggggatggcactttgagccctctggagccctccccttgctgagccttactctcttcagactttctgaatgtacaatgccgttggttgggatttggggactggaagggaccaaggacactgaccccaagctgtcctgcctagcgtccagcgtcttctaggagggtggggtctgcctgtcctggtgtggttggtttggccctgtttgctgtgactacccccccccctccccgaaccgagggacggctgcctttgtctctgcctcagatgccacctgccccgcccatgctccccatcagcagcatccagactttcaggaagggcagggccagccagtccagaaccgcatccctcagcagggactgataagccatctctcggagggccccctaatacccagtggagtctggttcacaccctggggggtgtgtcactgtgatgggacacgtaggagtccacccttaaaaccagcaccctgtccctcgaggctgccgagtgggtgtgtggactggggtgccttcccacaaaactagcctccggctctgggcccgagacagccgcaggccccagccactgaatgatactggcagcggctggggttttatgaactcctttctggtattttttcccctctatgtacaaatgtatatgttacgtctcaatttttgtgcttaagtaaaaataaaaacattttcagacaa

SEQ ID NO: 158583 - DNA, 2611 bp, Artificial Sequence
  derived and/or modified sequence
aaccgctgcctcgctcccggaagtggagggtctacacgaagcgccgctgggtctgggtgcccggaggcagcagcgttcgcggagttcgcccgctggcccccgatcaccatgtcggctttcgacaccaaccccttcgcggacacaaatgcagcgacaacagttcctgtcacccaactccctgggtcctcacagccagcggttctccagccatcagtggaaccaacccagccgaccccccaggccgtggtgtctgcagcccaggcaggcctgctccggcagcaggaagaactggacaggaaagctgccgagctggaacgcaaggagcgggagctgcagaacactgtagccaacttgcatgtgagacagaacaactggccccctctgccctcgtggtgccctgtgaagccctgcttctatcaggatttctccacagagatccctgccgactaccagcggatatgcaagatgctctactatctgtggatgttgcattcagtgactctgtttctgaacctgcttgcctgcctggcctggttctcgggcaacagctccaagggagtggactttggcctctccatcctgtggtttctgatcttcactccctgtgccttcctttgttggtaccgacccatctataaggcctttaggtccgacaactctttcagcttctttgtgttcttctttgtatttttttgtcaaatagggatctacatcatccagttggttggcatccctggcctgggggacagcggttggattgcagccctgtctacactggataatcattccctggccatatcagtcatcatgatggtggtggctggcttcttcaccctctgtgccgtgctctcagtcttcctcctgcagcgggtgagtggtgtgggcagggctgacagcaaatgggaggaggcaggcaaccgtttcctgcccttgccacgagatgtttttcaccactgcagttgggcatcctaggcccccaaaggtccagtacctttctccagggatctgggtggggggtcaggcagtgccaggcttctggtgacccctttgggagtataacctggatggctggcttcctggtgggcccaaaggacaggcttctctcaccccacccctcttcgccaggtgcactccctctaccgacggacaggggccagcttccagcaggcccaggaggagttttcccagggcatcttcagcagcagaaccttccacagagctgcttcatctgctgcccaaggagccttccaggggaattagtcctcctctcttctctccccctcagcctttctctcgcctgccttctgagctgcactttccgtgggtgccttatgtggtggtggttgtgcccagcacagacctggcagggttcttgccgtggctcttcctcctccctcagcgaccagctctccctggaacgggagggacagggaattttttccccctctatgtacaaaaaaaaacaaagctctctttccttctctggtgatggtttggtaggattcttttgtctctggaagcagtgggactgaagttctcttcgtcctgtgcacacacagacacccccacacagttgggatcacaggctgacctgggcccatcccagctggagctttctgccagggtcctgggccttgactcccccaccctgcaggcctggcctgaatctggcttcttagacacagcccagtccttcctgcctgggctgggaataagcctctcacaggttctggtggacagatctgttccccaggtcactccagtggtctccaggcttccagagaaggctggttgcctcaagctcttctctgcctcataaacggatccagagaaggctggttgccttaagctcttccctgcctcgtgttcctgagaaacggattaatagccctttatccccctgcaccctcctgcaggggatggcactttgagccctctggagccctccccttgctgagccttactctcttcagactttctgaatgtacaatgccgttggttgggatttggggactggaagggaccaaggacactgaccccaagctgtcctgcctagcgtccagcgtcttctaggagggtggggtctgcctgtcctggtgtggttggtttggccctgtttgctgtgactacccccccccctccccgaaccgagggacggctgcctttgtctctgcctcagatgccacctgccccgcccatgctccccatcagcagcatccagactttcaggaagggcagggccagccagtccagaaccgcatccctcagcagggactgataagccatctctcggagggccccctaatacccagtggagtctggttcacaccctggggggtgtgtcactgtgatgggacacgtaggagtccacccttaaaaccagcaccctgtccctcgaggctgccgagtgggtgtgtggactggggtgccttcccacaaaactagcctccggctctgggcccgagacagccgcaggccccagccactgaatgatactggcagcggctggggttttatgaactcctttctggtattttttcccctctatgtacaaatgtatatgttacgtctcaatttttgtgcttaagtaaaaataaaaacattttcagac

SEQ ID NO: 158584 - DNA, 990 bp, Artificial Sequence
  derived and/or modified sequence
atgagcgccttcgacaccaaccccttcgccgaccccgtggacgtgaaccccttccaggaccccagcgtgacccagctgaccaacgccccccagggcggcctggccgagttcaaccccttcagcgagaccaacgccgccaccaccgtgcccgtgacccagctgcccggcagcagccagcccgccgtgctgcagcccagcgtggagcccacccagcccaccccccaggccgtggtgagcgccgcccaggccggcctgctgagacagcaggaggagctggacagaaaggccgccgagctggagagaaaggagagagagctgcagaacaccgtggccaacctgcacgtgagacagaacaactggccccccctgcccagctggtgccccgtgaagccctgcttctaccaggacttcagcaccgagatccccgccgactaccagagaatctgcaagatgctgtactacctgtggatgctgcacagcgtgaccctgttcctgaacctgctggcctgcctggcctggttcagcggcaacagcagcaagggcgtggacttcggcctgagcatcctgtggttcctgatcttcaccccctgcgccttcctgtgctggtacagacccatctacaaggccttcagaagcgacaacagcttcagcttcttcgtgttcttcttcgtgttcttctgccagatcggcatctacatcatccagctggtgggcatccccggcctgggcgacagcggctggatcgccgccctgagcaccctggacaaccacagcctggccatcagcgtgatcatgatggtggtggccggcttcttcaccctgtgcgccgtgctgagcgtgttcctgctgcagagagtgcacagcctgtacagaagaaccggcgccagcttccagcaggcccaggaggagttcagccagggcatcttcagcagcagaaccttccacagagccgccagcagcgccgcccagggcgccttccagggcaactag

SEQ ID NO: 158585 - DNA, 864 bp, Artificial Sequence
  derived and/or modified sequence
atgagcgccttcgacaccaaccccttcgccgacaccaacgccgccaccaccgtgcccgtgacccagctgcccggcagcagccagcccgccgtgctgcagcccagcgtggagcccacccagcccaccccccaggccgtggtgagcgccgcccaggccggcctgctgagacagcaggaggagctggacagaaaggccgccgagctggagagaaaggagagagagctgcagaacaccgtggccaacctgcacgtgagacagaacaactggccccccctgcccagctggtgccccgtgaagccctgcttctaccaggacttcagcaccgagatccccgccgactaccagagaatctgcaagatgctgtactacctgtggatgctgcacagcgtgaccctgttcctgaacctgctggcctgcctggcctggttcagcggcaacagcagcaagggcgtggacttcggcctgagcatcctgtggttcctgatcttcaccccctgcgccttcctgtgctggtacagacccatctacaaggccttcagaagcgacaacagcttcagcttcttcgtgttcttcttcgtgttcttctgccagatcggcatctacatcatccagctggtgggcatccccggcctgggcgacagcggctggatcgccgccctgagcaccctggacaaccacagcctggccatcagcgtgatcatgatggtggtggccggcttcttcaccctgtgcgccgtgctgagcgtgttcctgctgcagagagtgagcggcgtgggcagagccgacagcaagtgggaggaggccggcaacagattcctgcccctgcccagagacgtgttccaccactgcagctgggccagctag

SEQ ID NO: 158586 - protein, 360 aa, Artificial Sequence
  derived and/or modified sequence
MEELSQALASSFSVSQDLNSTAAPHPRLSQYKSKYSSLEQSERRRRLLELQKSKRLDYVNHARRLAEDDWTGMESEEENKKDDEEMDIDTVKKLPKHYANQLMLSEWLIDVPSDLGQEWIVVVCPVGKRALIVASRGSTSAYTKSGYCVNRFSSLLPGGNRRNSTAKDYTILDCIYNEVNQTYYVLDVMCWRGHPFYDCQTDFRFYWMHSKLPEEEGLGEKTKLNPFKFVGLKNFPCTPESLCDVLSMDFPFEVDGLLFYHKQTHYSPGSTPLVGWLRPYMVSDVLGVAVPAGPLTTKPDYAGHQLQQIMEHKKSQKEGMKEKLTHKASENGHYELEHLSTPKLKGSSHSPDHPGCLMEN

SEQ ID NO: 158587 - protein, 402 aa, Artificial Sequence
  derived and/or modified sequence
MPLHSSLGNKSETLSQKKNNNNKEKTKRNSRNPPRTALKEGKMEELSQALASSFSVSQDLNSTAAPHPRLSQYKSKYSSLEQSERRRRLLELQKSKRLDYVNHARRLAEDDWTGMESEEENKKDDEEMDIDTVKKLPKHYANQLMLSEWLIDVPSDLGQEWIVVVCPVGKRALIVASRGSTSAYTKSGYCVNRFSSLLPGGNRRNSTAKDYTILDCIYNEVNQTYYVLDVMCWRGHPFYDCQTDFRFYWMHSKLPEEEGLGEKTKLNPFKFVGLKNFPCTPESLCDVLSMDFPFEVDGLLFYHKQTHYSPGSTPLVGWLRPYMVSDVLGVAVPAGPLTTKPDYAGHQLQQIMEHKKSQKEGMKEKLTHKASENGHYELEHLSTPKLKGSSHSPDHPGCLMEN

SEQ ID NO: 158588 - DNA, 1209 bp, Artificial Sequence
  derived and/or modified sequence
atgcccctgcacagcagcctgggcaacaagagcgagaccctgagccagaagaagaacaacaacaacaaggagaagaccaagagaaacagcagaaacccccccagaaccgccctgaaggagggcaagatggaggagctgagccaggccctggccagcagcttcagcgtgagccaggacctgaacagcaccgccgccccccaccccagactgagccagtacaagagcaagtacagcagcctggagcagagcgagagaagaagaagactgctggagctgcagaagagcaagagactggactacgtgaaccacgccagaagactggccgaggacgactggaccggcatggagagcgaggaggagaacaagaaggacgacgaggagatggacatcgacaccgtgaagaagctgcccaagcactacgccaaccagctgatgctgagcgagtggctgatcgacgtgcccagcgacctgggccaggagtggatcgtggtggtgtgccccgtgggcaagagagccctgatcgtggccagcagaggcagcaccagcgcctacaccaagagcggctactgcgtgaacagattcagcagcctgctgcccggcggcaacagaagaaacagcaccgccaaggactacaccatcctggactgcatctacaacgaggtgaaccagacctactacgtgctggacgtgatgtgctggagaggccaccccttctacgactgccagaccgacttcagattctactggatgcacagcaagctgcccgaggaggagggcctgggcgagaagaccaagctgaaccccttcaagttcgtgggcctgaagaacttcccctgcacccccgagagcctgtgcgacgtgctgagcatggacttccccttcgaggtggacggcctgctgttctaccacaagcagacccactacagccccggcagcacccccctggtgggctggctgagaccctacatggtgagcgacgtgctgggcgtggccgtgcccgccggccccctgaccaccaagcccgactacgccggccaccagctgcagcagatcatggagcacaagaagagccagaaggagggcatgaaggagaagctgacccacaaggccagcgagaacggccactacgagctggagcacctgagcacccccaagctgaagggcagcagccacagccccgaccaccccggctgcctgatggagaactag

SEQ ID NO: 158589 - DNA, 1083 bp, Artificial Sequence
  derived and/or modified sequence
atggaagaactttcccaagccctggcttctagcttctctgtgtcacaggatctgaactcaacggctgccccgcacccaagactgagccagtacaaaagcaaatattctagcctagaacagagtgagaggcggagaagattactggaactgcaaaagtcaaagcggctagactacgtaaaccacgcccgcaggctggccgaagacgattggactggcatggagtcagaggaagaaaataagaaagacgatgaggagatggacatcgacacagtaaagaaactgccaaaacactatgctaaccaattgatgctctcagagtggttgattgatgtcccatctgatctgggccaggagtggatcgttgttgtgtgtccagtgggcaagcgcgcactaatcgttgcttctcggggaagcacgagcgcgtacactaaaagtggctattgcgtgaacaggttttcttcgctcctgcccggcggcaaccgcagaaactctactgcgaaggattacactatcctggattgcatttacaatgaggtcaatcagacctattacgtgctcgacgtgatgtgctggcggggacaccccttctacgattgtcagactgacttccgcttttattggatgcactcaaagctgccagaggaggaaggattaggagaaaaaaccaagctcaatccctttaaattcgtggggctgaagaacttcccctgtacaccagagagtctgtgtgacgtactgtcaatggactttcctttcgaagtagatgggctcctcttctaccacaaacagacacattactctcccgggtcaacccccttagtggggtggctcagaccctatatggtgagcgacgtgcttggcgttgcagtgcccgccggtccccttactacaaagccagactatgccggccaccagcttcagcagataatggagcataagaagtcacagaaagaagggatgaaggaaaaattgactcacaaagcgtctgaaaacggtcattacgaactcgagcacctgtctacccctaaactgaaaggaagtagtcacagtcctgaccacccgggctgcctgatggaaaactag

SEQ ID NO: 158590 - DNA, 1209 bp, Artificial Sequence
  derived and/or modified sequence
atgccactccatagctctcttgggaataagtccgaaaccctctcacagaagaaaaacaacaacaacaaagaaaaaactaagagaaattcaagaaaccctccacgcaccgctttgaaagaaggtaagatggaagagttgtctcaggcactcgcctcttcatttagcgtgtcgcaggacctcaacagcaccgccgcgccccaccccagactgtcccagtacaagagcaagtactctagcctggaacagtccgagcgcaggcgtagactcctcgagttgcagaaatccaaacgactcgactatgtgaatcatgctaggcgactcgcagaggatgactggacgggcatggaatctgaagaagaaaataaaaaggacgatgaggaaatggatatagatacagtgaagaaactgcccaagcattacgcaaatcaactcatgctttccgaatggctgatagatgtgccttccgacttggggcaggagtggatagttgtggtctgtcctgtgggaaaaagagccctcatcgtcgccagcaggggaagcacctccgcctacactaagagtgggtattgtgtaaacagattcagctcacttctgcccggaggcaacagacggaactcaacagcaaaagattacactatcttggattgtatatataatgaggtgaatcaaacttactacgtgttggatgtaatgtgttggaggggccatcctttttatgactgtcaaaccgatttcaggttctattggatgcatagcaagctccccgaagaggagggtctgggagaaaaaacaaagctaaacccctttaagttcgtgggtctgaaaaacttcccctgcacacctgaaagtctatgcgacgtgctgtccatggacttccccttcgaggttgacgggctgctgttttatcataagcagacacactactcaccagggagtacaccattagtggggtggttgcgcccctatatggtgtctgacgtgctcggcgtcgctgtgcccgctggcccattaactactaagcccgactacgccggacatcagctgcagcagatcatggaacataaaaaaagtcaaaaagaaggcatgaaggagaagctaacgcacaaagcctcagagaacggtcactatgagctggaacacctttccacccccaagttaaaagggtcatcacactcacccgatcatcctggttgccttatggagaactag

SEQ ID NO: 158591 - DNA, 1931 bp, Artificial Sequence
  derived and/or modified sequence
gtgcgacggtcacctcggtttgggtgagtccctgggttcgagcccgggccccgccagctgccgagttgcctctcggtgccggactgtgactccctctggccggccctgcactctggcctcctgggacgtcatctggagggatagagccaggcctgggactccttttgggagagtttccgttcttctattccgtgctgtccggccaggacccctcagggacttctgtggggcaggggcgaatcatgcatggcctagatgaccccatgcctagaaaaaggcagtgcggggcggtggcggcgcgcacggccgagtgaagcagatagcgtccccggggctggagcccggtagcagggccgggcgttgtggcgcgtgcctgtaatcccagctactcgggaggctgaggcaggagaatcgcttgaatccgggagatggaggttgcagtgagccgagatcatgccactgcactccagcctgggcaacaagagcgaaactctgtctcaaaaaaaaaacaacaacaacaaagaaaaaacaaaacgaaacagcaggaacccgccaagaacagccttgaaggaagggaagatggaagagttgagtcaggccctggctagtagcttttctgtgtctcaagatctgaacagcacagctgccccacacccccgcctatcccagtacaagtccaagtacagttccttggagcagagtgagcgccgccggaggttactggaactgcagaaatccaagcggctggattatgtgaaccatgccagaagactggctgaagatgactggacagggatggagagtgaggaagaaaataagaaagatgatgaagaaatggacattgacactgtcaagaagttaccaaaacactatgctaatcaattgatgctttctgagtggttaattgacgttccttcagatttggggcaggaatggattgtggtcgtgtgccctgttggaaaaagagcccttatcgtggcctccaggggttctaccagtgcctacaccaagagtggctactgtgtcaacaggttttcttcacttctgccaggaggcaacaggcgaaactcaacagcaaaagactacaccattctagattgcatttacaatgaggtaaaccagacctactacgttctggatgtgatgtgctggcggggacaccctttttatgattgccagactgatttccgattctactggatgcattcaaagttaccagaagaagaaggactgggagagaaaaccaagcttaatccttttaaatttgtggggctaaagaacttcccttgcactcccgaaagcctgtgtgatgtgctatctatggatttcccttttgaggtagatggacttctcttctaccacaaacagacccactacagccccggaagcactcccttggtgggctggctgcgcccctacatggtgtcagatgtccttggtgtagctgtgccggctggcccgctgaccaccaagccagactatgctgggcaccagctccagcagattatggagcacaagaagagccagaaggaaggcatgaaggagaaactcacacacaaggcctctgagaatgggcactatgaattggagcacctgtctactcccaagttgaagggttcttcccatagcccagaccaccctggatgcctcatggagaattaaagagagaagcctccttaaggagccacaggatggtacctggccccaaaaggaatcctggagaggaggacagtgacaacaggtgacttcattctttagagtgaactttccaaacccagtccagctggaaacagcttatctataatctgaaatgctggctcaaacagttatggggaggttcccagattgcgtagcattcagattgatttgagcagctcctactgtgataagtgtatcccagatccacaatgtaaatatatgtgatttgtaag

SEQ ID NO: 158592 - DNA, 1083 bp, Artificial Sequence
  derived and/or modified sequence
atggaggaacttagtcaagccctggcctctagtttttctgttagccaggatttaaactctacagctgctcctcatcctagactatcgcagtataaatccaagtactcctctctggaacagtctgaaagaaggagacgactgctggagttgcagaaatcgaagagacttgactacgttaatcacgctagacggctggctgaggacgactggactgggatggagagcgaagaggaaaataaaaaagatgacgaggagatggacatcgacactgtgaaaaaactgcccaaacactatgccaaccagcttatgttgagtgagtggttaattgatgtgccatcagacctgggccaagagtggatcgttgtggtctgccccgttgggaagcgtgcactcatcgtggcctctaggggatcaactagcgcgtacaccaagagtggatactgtgtgaaccgcttttcaagcctgctgcccgggggaaatcgtcgtaattctactgcaaaggattacactattctggattgtatctacaacgaagtaaaccaaacttattacgtgttggatgtgatgtgctggaggggccacccgttttatgactgccagactgattttcggttctattggatgcatagcaagttacctgaggaggaaggccttggagagaaaaccaaacttaaccctttcaagttcgtgggcctcaagaacttcccctgcacacctgagagcctatgtgacgttctcagtatggattttcctttcgaggtggatggtcttctgttctatcataaacaaacacactactcccctggcagtacaccactagtgggatggcttagaccatacatggtgagtgacgtgctgggcgtggccgttcccgctggtccgttgacaacaaagcctgactatgcaggacaccagctccagcagatcatggaacataagaagagccaaaaggagggcatgaaggaaaaactgacccacaaagccagtgagaatggacattatgagctggagcacctaagtacacctaagttgaaaggatcctcccactccccagatcacccaggctgcctgatggaaaactag

SEQ ID NO: 158593 - DNA, 1083 bp, Artificial Sequence
  derived and/or modified sequence
atggaggagctgagccaggccctggccagcagcttctctgtgtcccaggacctgaacagcacagctgccccccacccccggctgagccagtacaagagcaagtacagcagcctggagcagagcgagaggagaagaaggctgctggagctgcagaagagcaagaggctggactatgtgaaccacgcccggcggctggctgaagatgactggacaggcatggagagcgaggaggagaacaagaaggatgatgaggagatggacatcgacacagtgaagaagctgcccaagcactacgccaaccagctgatgctgtctgagtggctgattgatgtgcccagcgacctgggccaggagtggatcgtggtggtgtgccctgtgggcaagagggccctgattgtggccagccggggcagcaccagcgcctacaccaagagcggctactgtgtgaaccgcttcagcagcctgctgcccggcggcaacagaagaaacagcacagccaaggactacaccatcctggactgcatctacaatgaggtgaaccagacctactacgtgctggatgtgatgtgctggaggggccaccccttctatgactgccagacagacttccgcttctactggatgcacagcaagctgcctgaggaggagggcctgggggagaagaccaagctgaaccccttcaagtttgtgggcctgaagaacttcccctgcaccccagagagcctgtgtgatgtgctgtccatggacttcccctttgaggtggatggcctgctcttctaccacaagcagacccactacagccctggcagcacccccctggtgggctggctgcggccctacatggtgtctgatgtgctgggcgtggccgtgcctgctggccccctgaccaccaagccagactatgccggccaccagctgcagcagatcatggagcacaagaagagccagaaggagggcatgaaggagaagctgacccacaaggcctctgaaaatggccactatgagctggagcacctgagcacccccaagctgaagggcagcagccacagcccagaccaccctggctgcctgatggagaactag

SEQ ID NO: 158594 - DNA, 1209 bp, Artificial Sequence
  derived and/or modified sequence
atgcccctgcacagcagcctgggcaacaagtctgagaccctgagccagaagaagaacaacaacaacaaggagaagaccaagaggaacagcagaaatccacccaggacagccctgaaggagggcaagatggaggagctgagccaggccctggccagcagcttctctgtgtcccaggacctgaacagcacagctgccccccacccccggctgagccagtacaagagcaagtacagcagcctggagcagagcgagaggagaagaaggctgctggagctgcagaagagcaagaggctggactatgtgaaccacgcccggcggctggctgaagatgactggacaggcatggagagcgaggaggagaacaagaaggatgatgaggagatggacatcgacacagtgaagaagctgcccaagcactacgccaaccagctgatgctgtctgagtggctgattgatgtgcccagcgacctgggccaggagtggatcgtggtggtgtgccctgtgggcaagagggccctgattgtggccagccggggcagcaccagcgcctacaccaagagcggctactgtgtgaaccgcttcagcagcctgctgcccggcggcaacagaagaaacagcacagccaaggactacaccatcctggactgcatctacaatgaggtgaaccagacctactacgtgctggatgtgatgtgctggaggggccaccccttctatgactgccagacagacttccgcttctactggatgcacagcaagctgcctgaggaggagggcctgggggagaagaccaagctgaaccccttcaagtttgtgggcctgaagaacttcccctgcaccccagagagcctgtgtgatgtgctgtccatggacttcccctttgaggtggatggcctgctcttctaccacaagcagacccactacagccctggcagcacccccctggtgggctggctgcggccctacatggtgtctgatgtgctgggcgtggccgtgcctgctggccccctgaccaccaagccagactatgccggccaccagctgcagcagatcatggagcacaagaagagccagaaggagggcatgaaggagaagctgacccacaaggcctctgaaaatggccactatgagctggagcacctgagcacccccaagctgaagggcagcagccacagcccagaccaccctggctgcctgatggagaactag

SEQ ID NO: 158595 - DNA, 1083 bp, Artificial Sequence
  derived and/or modified sequence
atggaggagctgagccaggccctggccagcagcttcagcgtgagccaagacctcaattccaccgcagctcctcatcctagattatcgcagtataaaagcaaatatagctctctggagcaatctgagagacgcagacggctgttagagcttcaaaaatccaaaaggctcgactacgtgaaccatgcccggcgacttgccgaggatgattggactggaatggaatcagaagaggagaacaaaaaagacgatgaggagatggacattgacacggtgaaaaagctcccgaagcactatgcaaaccaactcatgctctctgagtggctcatcgatgtgccaagcgacctgggccaggagtggattgttgttgtgtgccccgtaggtaagagggctcttattgtggcctccagaggtagtaccagcgcgtatacaaaatctggctactgtgttaatcgcttctcttctctcctgccgggaggcaataggagaaacagcaccgcaaaagactacactatcctcgattgtatttacaatgaggtgaatcagacgtattacgtactcgatgtaatgtgctggcggggccaccctttctacgactgtcagaccgactttagattttactggatgcactccaaactccctgaggaggaaggtttaggcgagaaaacgaaacttaatccatttaagtttgtcggtctcaagaacttcccatgtactccagaatctctctgcgacgtgctgagcatggattttccatttgaagtcgatggactgctgttttaccacaaacagactcattatagcccaggaagtaccccactcgtgggttggttgagaccttatatggtttctgatgtcttaggtgtggcagtcccagcaggccctcttaccacaaagcccgactatgccggtcaccaactccagcagattatggagcacaaaaaaagtcagaaggagggtatgaaagagaaactgacacacaaggcgagcgagaatggtcattacgaactggaacacttgtcaaccccaaaactgaagggcagctcccacagccctgatcatcctggttgcctcatggagaactag

SEQ ID NO: 158596 - DNA, 1209 bp, Artificial Sequence
  derived and/or modified sequence
atgcccctgcacagcagcctgggcaacaagagcgagaccctgagccagaaaaagaacaataacaacaaagagaagactaaacgcaactcgcgcaatccacccagaaccgctctgaaggaaggaaagatggaggagcttagccaagccctggcttcctcctttagcgtttcccaagacctgaacagcaccgccgccccgcatccaagactgtcgcagtataagtctaagtactcatctctggaacagtccgaacgccggcgaagactgttagaattgcagaaaagcaaacgcctcgactatgtaaatcatgctcgtagactggcagaggacgattggactggaatggagagtgaggaagagaacaagaaagatgacgaagagatggacatcgacactgtgaaaaagttaccaaagcattacgcaaatcagctaatgttgtcggaatggctaatagacgtgccatcagacctgggccaggagtggatcgtggtggtgtgtcccgtaggcaagcgcgctctgatcgtggcctctagggggagtacaagtgcatacactaagtccggttattgtgtcaataggttctcttctctgctgccgggcggcaaccgccggaactccacggcaaaggattataccattctggattgtatttacaatgaggttaaccagacctattacgtgttagatgtcatgtgttggcggggacatcctttctatgactgccagactgactttagattttactggatgcactccaagctccctgaagaggagggactgggggagaagaccaagctcaaccccttcaagttcgtcggccttaagaacttcccctgcaccccagagagtctatgcgacgttcttagcatggatttcccctttgaggtggatgggttactcttttaccataaacaaacccattattctccagggagcacgccattggtcggctggctaagaccctatatggtgagcgatgtcctaggcgtggctgtccccgctggccccctgacaactaaacccgattatgccgggcatcaactccagcagatcatggaacataaaaaatcccaaaaggagggcatgaaggagaagcttacacataaagcctctgagaatgggcactacgaattagagcatttgagcaccccgaaactcaagggttcgagtcacagcccagatcaccccggctgccttatggagaactag

SEQ ID NO: 158597 - DNA, 1083 bp, Artificial Sequence
  derived and/or modified sequence
atggaggagctgagccaggccctggccagcagcttcagcgtgagccaggacctgaacagtacggcagccccgcatccccggctttctcagtacaagtcaaagtactcttcgctggagcaatcagagagacggcgcaggctgctggagctccagaagtccaagaggctcgactacgtaaaccatgccagacggctggccgaggacgattggaccggcatggaatccgaggaagaaaataaaaaggacgacgaggaaatggatattgatacagtgaagaagctcccaaagcattacgctaaccagctgatgctgagcgaatggctgatcgatgttccttccgacctggggcaagaatggatagtggttgtctgcccggtcggaaaaagagccctgattgttgcgagtagggggagcacatctgcctacactaaatcgggctactgcgtgaacaggttctcttccctgttgcctggcggaaacaggagaaactccacagccaaggactatacaatactggattgcatctataatgaggtgaatcagacgtactatgtactagacgtgatgtgctggcgaggacaccctttttatgattgccaaacagattttaggttttactggatgcactcaaaattgcccgaggaagaaggactgggcgaaaaaaccaaactgaatccatttaaattcgtaggtcttaagaatttcccttgtacacccgaatcactttgtgatgtgctgtctatggacttccccttcgaggtggacgggcttctgttctatcacaagcagacgcactatagtcccggatctacccccctggtaggctggttaagaccatacatggtgagcgacgttcttggtgttgccgtccccgcgggcccgctcacgacaaagcccgactatgccggccaccagctgcagcagatcatggagcacaagaagtctcagaaggaaggcatgaaagaaaagcttactcacaaagcctcagagaatggacactatgagttagagcacctctccacacctaagctgaagggctcatcccatagtcctgaccaccctggatgtctcatggagaactag

SEQ ID NO: 158598 - DNA, 1083 bp, Artificial Sequence
  derived and/or modified sequence
atggaagagttgagccaggcgctcgcctcctcatttagcgtgtcacaagacctgaatagcactgcagcaccccatcctcggctgtctcagtataaatctaaatacagcagcctggagcagagcgaacggaggaggagactccttgagctgcaaaagtcgaaaagactcgattatgtgaatcatgcccgtagattggctgaggatgactggaccggtatggagagtgaagaggaaaataagaaagacgacgaagagatggacattgatacagtaaaaaagctcccaaagcattatgccaatcagctgatgctgtcagaatggctcatcgatgttccttctgatctgggccaagaatggattgtcgtggtgtgtcctgttgggaagagagcactcatcgttgcgagccggggtagcactagtgcatacaccaaaagcggctactgcgttaatcgcttcagcagcctgctgcccggaggtaaccggagaaattccacagcgaaggactacacaatcctggactgcatctataatgaggtgaaccagacatactatgtcttggatgtgatgtgttggcgcggtcacccattctacgactgccagacagattttaggttctattggatgcacagcaagctccccgaagaggagggccttggcgagaagaccaaattgaatccgtttaagttcgtcgggctgaagaactttccatgcacaccggagtccctctgcgatgtccttagcatggattttcctttcgaagttgatggcctgttgttttaccacaagcagacccactattctcccggatctacacctttggtgggctggctgagaccttacatggtctctgacgtcttgggcgtagccgtgcccgcaggccctctgactaccaagcctgactacgcaggccatcagttgcagcaaatcatggagcacaagaaatcccagaaggagggtatgaaagaaaagctgacacacaaagcgagcgaaaacggccattacgagctcgagcatctgagtacgccgaagctgaaaggaagcagccactctcctgatcatccaggatgccttatggagaactag

SEQ ID NO: 158599 - DNA, 1209 bp, Artificial Sequence
  derived and/or modified sequence
atgcctctccacagttccctcggtaataagtctgagactctttctcagaagaaaaataacaataacaaagaaaagaccaaaagaaacagcagaaaccccccacgcacggccctgaaggaaggcaaaatggaagaactgagtcaggccctagccagctcgttttctgttagccaagacttaaattctaccgccgctccccacccccgattatctcaatataagtctaagtattcttccctagaacagtcagaaaggagacgcaggctgctcgagctgcagaagagcaaacggctggactatgtgaatcacgcacgaaggttagccgaagacgactggacaggtatggaaagcgaggaggagaacaagaaggatgacgaagagatggatattgacaccgtgaagaaactgcccaagcattacgccaaccagttgatgctttccgaatggttgatagacgtcccatctgaccttggccaagaatggattgtggttgtgtgccctgtcggaaagcgcgctctgatcgtggcctcacgcggatccacttcggcgtacacaaagagcggctactgtgtgaaccggttcagttccctgctccctggcggaaataggcgcaactccaccgcgaaggattacaccattctcgattgcatttataacgaagtaaatcagacctattacgtgctcgacgtgatgtgttggaggggccaccccttttacgattgtcagaccgatttccgcttctactggatgcatagcaagctgccagaggaggaggggctgggggaaaagaccaaactaaaccccttcaagttcgtcggcttaaaaaacttcccttgcactcctgagagtctttgtgacgtgctcagtatggattttcccttcgaggtcgacggattgttgttttaccataaacagacacattattcacccggtagtactccattagttggttggctccgcccatatatggtatctgacgtcctgggggttgccgtacctgcgggacctttgacgacaaaacccgattacgccggtcatcagttgcagcaaatcatggagcataaaaagtcacagaaggaggggatgaaggaaaaactcacgcacaaagccagcgagaacggccattatgaactggagcacctttctacgccgaaactgaaggggagtagccactcacctgatcacccaggatgtttgatggagaactag

SEQ ID NO: 158600 - DNA, 1083 bp, Artificial Sequence
  derived and/or modified sequence
atggaggagttgagtcaggccctggcctcttcatttagtgtctcccaagacctgaattcaactgctgctccacatcctcgcctgagtcagtataagtccaaatatagctccctggagcagtctgaacgccgaaggcggctgctggaactacaaaagtctaagagattagactacgtgaaccacgcccgacggcttgccgaggatgattggacgggcatggagtcagaagaagagaataagaaagacgacgaggaaatggacattgacaccgtcaaaaagctgcctaagcattacgcaaaccagctgatgctgtcagagtggctaattgacgtgccatcagatttagggcaagaatggatagtggtcgtgtgccctgtagggaagcgtgccctgatcgtggcttctagaggatctacctccgcctacaccaaaagcgggtactgcgttaatcggttttcctccctcctgcctggcggaaatcgtcgtaatagcactgccaaggactacactatattagattgcatctacaacgaagtgaatcaaacctattacgtacttgatgtgatgtgttggagaggacaccctttttacgactgtcagaccgacttccggttttactggatgcactcaaagctccctgaagaggagggtttgggggagaaaacgaaactcaatccttttaagttcgtcggcctcaaaaattttccctgcactccagagtcattgtgcgacgttctctctatggattttccatttgaagtggatggattacttttctaccataaacaaactcactattctccgggatccacccccctggtggggtggctgcgaccctacatggtgtctgatgtgttgggtgtggccgtaccggctggcccactcacgacaaaaccggactacgcaggtcaccagttgcagcagataatggagcacaagaagagtcagaaagagggcatgaaggaaaaactcactcacaaggctagtgaaaacggccattacgaactggagcatttaagtacacccaaattgaagggaagttctcactctcctgatcatcccggttgcctgatggagaactag

SEQ ID NO: 158601 - DNA, 1641 bp, Artificial Sequence
  derived and/or modified sequence
ggcgcgaggcctgtgggcccagcggtgaggcagcagctgggggcggggggagggcggacctagcttcccagggcaggtgattcgtcggccccggtggcggcggcgcgtgcgacggtcacctcggtttggggtccacctaaagtgggaagtctgttttcaaaatgacatctactccatgcctgtcttgtttccctaatgtactttatggaagttcttcacactactggagcattgacgttacttgttaagcagccttccacatcctagctcttttccaaggaagatggaagagttgagtcaggccctggctagtagcttttctgtgtctcaagatctgaacagcacagctgccccacacccccgcctatcccagtacaagtccaagtacagttccttggagcagagtgagcgccgccggaggttactggaactgcagaaatccaagcggctggattatgtgaaccatgccagaagactggctgaagatgactggacagggatggagagtgaggaagaaaataagaaagatgatgaagaaatggacattgacactgtcaagaagttaccaaaacactatgctaatcaattgatgctttctgagtggttaattgacgttccttcagatttggggcaggaatggattgtggtcgtgtgccctgttggaaaaagagcccttatcgtggcctccaggggttctaccagtgcctacaccaagagtggctactgtgtcaacaggttttcttcacttctgccaggaggcaacaggcgaaactcaacagcaaaagactacaccattctagattgcatttacaatgaggtaaaccagacctactacgttctggatgtgatgtgctggcggggacaccctttttatgattgccagactgatttccgattctactggatgcattcaaagttaccagaagaagaaggactgggagagaaaaccaagcttaatccttttaaatttgtggggctaaagaacttcccttgcactcccgaaagcctgtgtgatgtgctatctatggatttcccttttgaggtagatggacttctcttctaccacaaacagacccactacagccccggaagcactcccttggtgggctggctgcgcccctacatggtgtcagatgtccttggtgtagctgtgccggctggcccgctgaccaccaagccagactatgctgggcaccagctccagcagattatggagcacaagaagagccagaaggaaggcatgaaggagaaactcacacacaaggcctctgagaatgggcactatgaattggagcacctgtctactcccaagttgaagggttcttcccatagcccagaccaccctggatgcctcatggagaattaaagagagaagcctccttaaggagccacaggatggtacctggccccaaaaggaatcctggagaggaggacagtgacaacaggtgacttcattctttagagtgaactttccaaacccagtccagctggaaacagcttatctataatctgaaatgctggctcaaacagttatggggaggttcccagattgcgtagcattcagattgatttgagcagctcctactgtgataagtgtatcccagatccacaatgtaaatatatgtgatttgtaagaaagaa

SEQ ID NO: 158602 - DNA, 1513 bp, Artificial Sequence
  derived and/or modified sequence
agggaggagccggaaactcagggcgcgaggcctgtgggcccagcggtgaggcagcagctgggggcggggggagggcggacctagcttcccagggcaggtgattcgtcggccccggtggcggcggcgcgtgcgacggtcacctcggtttggggaagatggaagagttgagtcaggccctggctagtagcttttctgtgtctcaagatctgaacagcacagctgccccacacccccgcctatcccagtacaagtccaagtacagttccttggagcagagtgagcgccgccggaggttactggaactgcagaaatccaagcggctggattatgtgaaccatgccagaagactggctgaagatgactggacagggatggagagtgaggaagaaaataagaaagatgatgaagaaatggacattgacactgtcaagaagttaccaaaacactatgctaatcaattgatgctttctgagtggttaattgacgttccttcagatttggggcaggaatggattgtggtcgtgtgccctgttggaaaaagagcccttatcgtggcctccaggggttctaccagtgcctacaccaagagtggctactgtgtcaacaggttttcttcacttctgccaggaggcaacaggcgaaactcaacagcaaaagactacaccattctagattgcatttacaatgaggtaaaccagacctactacgttctggatgtgatgtgctggcggggacaccctttttatgattgccagactgatttccgattctactggatgcattcaaagttaccagaagaagaaggactgggagagaaaaccaagcttaatccttttaaatttgtggggctaaagaacttcccttgcactcccgaaagcctgtgtgatgtgctatctatggatttcccttttgaggtagatggacttctcttctaccacaaacagacccactacagccccggaagcactcccttggtgggctggctgcgcccctacatggtgtcagatgtccttggtgtagctgtgccggctggcccgctgaccaccaagccagactatgctgggcaccagctccagcagattatggagcacaagaagagccagaaggaaggcatgaaggagaaactcacacacaaggcctctgagaatgggcactatgaattggagcacctgtctactcccaagttgaagggttcttcccatagcccagaccaccctggatgcctcatggagaattaaagagagaagcctccttaaggagccacaggatggtacctggccccaaaaggaatcctggagaggaggacagtgacaacaggtgacttcattctttagagtgaactttccaaacccagtccagctggaaacagcttatctataatctgaaatgctggctcaaacagttatggggaggttcccagattgcgtagcattcagattgatttgagcagctcctactgtgataagtgtatcccagatccacaatgtaaatatatgtgatttgtaagaaagaa

SEQ ID NO: 158603 - DNA, 1083 bp, Artificial Sequence
  derived and/or modified sequence
atggaggagctgagccaggccctggccagcagcttcagcgtgagccaggacctgaacagcaccgccgccccccaccccagactgagccagtacaagagcaagtacagcagcctggagcagagcgagagaagaagaagactgctggagctgcagaagagcaagagactggactacgtgaaccacgccagaagactggccgaggacgactggaccggcatggagagcgaggaggagaacaagaaggacgacgaggagatggacatcgacaccgtgaagaagctgcccaagcactacgccaaccagctgatgctgagcgagtggctgatcgacgtgcccagcgacctgggccaggagtggatcgtggtggtgtgccccgtgggcaagagagccctgatcgtggccagcagaggcagcaccagcgcctacaccaagagcggctactgcgtgaacagattcagcagcctgctgcccggcggcaacagaagaaacagcaccgccaaggactacaccatcctggactgcatctacaacgaggtgaaccagacctactacgtgctggacgtgatgtgctggagaggccaccccttctacgactgccagaccgacttcagattctactggatgcacagcaagctgcccgaggaggagggcctgggcgagaagaccaagctgaaccccttcaagttcgtgggcctgaagaacttcccctgcacccccgagagcctgtgcgacgtgctgagcatggacttccccttcgaggtggacggcctgctgttctaccacaagcagacccactacagccccggcagcacccccctggtgggctggctgagaccctacatggtgagcgacgtgctgggcgtggccgtgcccgccggccccctgaccaccaagcccgactacgccggccaccagctgcagcagatcatggagcacaagaagagccagaaggagggcatgaaggagaagctgacccacaaggccagcgagaacggccactacgagctggagcacctgagcacccccaagctgaagggcagcagccacagccccgaccaccccggctgcctgatggagaactag

SEQ ID NO: 158604 - protein, 437 aa, Artificial Sequence
  derived and/or modified sequence
MAAPSWRGARLVQSVLRVWQVGPHVARERVIPFSSLLGFQRRCVSCVAGSAFSGPRLASASRSNGQGSALDHFLGFSQPDSSVTPCVPAVSMNRDEQDVLLVHHPDMPENSRVLRVVLLGAPNAGKSTLSNQLLGRKVFPVSRKVHTTRCQALGVITEKETQVILLDTPGIISPGKQKRHHLELSLLEDPWKSMESADLVVVLVDVSDKWTRNQLSPQLLRCLTKYSQIPSVLVMNKVDCLKQKSVLLELTAALTEGVVNGKKLKMRQAFHSHPGTHCPSPAVKDPNTQSVGNPQRIGWPHFKEIFMLSALSQEDVKTLKQYLLTQAQPGPWEYHSAVLTSQTPEEICANIIREKLLEHLPQEVPYNVQQKTAVWEEGPGGELVIQQKLLVPKESYVKLLIGPKGHVISQIAQEAGHDLMDIFLCDVDIRLSVKLLK

SEQ ID NO: 158605 - protein, 243 aa, Artificial Sequence
  derived and/or modified sequence
MSRMSSWSITLICLRIPGSYEWSSWEPRMQGSQHSPTSYWAERCSLFPGRCILLAAKLWGSSQRRRPRWWVPTKGVLETGQRVKLRGSPLPSALKKMMVTFIYILLDTPGIISPGKQKRHHLELSLLEDPWKSMESADLVVVLVDVSDKWTRNQLSPQLLRCLTKYSQIPSVLVMNKVDCLKQKSVLLELTAALTEGVVNGKKLKMRQAFHSHPGTHCPSPAVKDPNTQSVGNPQRIGWPHFK

SEQ ID NO: 158606 - DNA, 1314 bp, Artificial Sequence
  derived and/or modified sequence
atggccgcccccagctggagaggcgccagactggtgcagagcgtgctgagagtgtggcaggtgggcccccacgtggccagagagagagtgatccccttcagcagcctgctgggcttccagagaagatgcgtgagctgcgtggccggcagcgccttcagcggccccagactggccagcgccagcagaagcaacggccagggcagcgccctggaccacttcctgggcttcagccagcccgacagcagcgtgaccccctgcgtgcccgccgtgagcatgaacagagacgagcaggacgtgctgctggtgcaccaccccgacatgcccgagaacagcagagtgctgagagtggtgctgctgggcgcccccaacgccggcaagagcaccctgagcaaccagctgctgggcagaaaggtgttccccgtgagcagaaaggtgcacaccaccagatgccaggccctgggcgtgatcaccgagaaggagacccaggtgatcctgctggacacccccggcatcatcagccccggcaagcagaagagacaccacctggagctgagcctgctggaggacccctggaagagcatggagagcgccgacctggtggtggtgctggtggacgtgagcgacaagtggaccagaaaccagctgagcccccagctgctgagatgcctgaccaagtacagccagatccccagcgtgctggtgatgaacaaggtggactgcctgaagcagaagagcgtgctgctggagctgaccgccgccctgaccgagggcgtggtgaacggcaagaagctgaagatgagacaggccttccacagccaccccggcacccactgccccagccccgccgtgaaggaccccaacacccagagcgtgggcaacccccagagaatcggctggccccacttcaaggagatcttcatgctgagcgccctgagccaggaggacgtgaagaccctgaagcagtacctgctgacccaggcccagcccggcccctgggagtaccacagcgccgtgctgaccagccagacccccgaggagatctgcgccaacatcatcagagagaagctgctggagcacctgccccaggaggtgccctacaacgtgcagcagaagaccgccgtgtgggaggagggccccggcggcgagctggtgatccagcagaagctgctggtgcccaaggagagctacgtgaagctgctgatcggccccaagggccacgtgatcagccagatcgcccaggaggccggccacgacctgatggacatcttcctgtgcgacgtggacatcagactgagcgtgaagctgctgaagtag

SEQ ID NO: 158607 - DNA, 1861 bp, Artificial Sequence
  derived and/or modified sequence
cctggtcggttcccgcagtgccttgcggctgtaatggctgcccccagctggcgcggggctaggcttgttcaatcggtgttaagagtctggcaggtgggccctcatgtcgcgagggagcgggtgatccctttttcctcactcttaggcttccaacggaggtgcgtgtcctgcgtcgcggggtccgctttctctggtccccgcttggcctcggcttctcgcagtaatggccagggctctgccctggaccacttcctcggattctctcagcccgacagttcggtgactccttgcgtccccgcggtgtccatgaacagagatgagcaggatgtcctcttggtccatcaccctgatatgcctgagaattcccgggtcctacgagtggtcctcctgggagccccgaatgcagggaagtcaacactctccaaccagctactgggccgaaaggtgttccctgtttccaggaaggtgcatactactcgctgccaagctctgggggtcatcacagagaaggagacccaggtgattctacttgacacacctggcattatcagtcctggtaaacagaagaggcatcacctggagctctctttgttggaagatccatggaagagcatggaatctgctgatcttgttgtggttcttgtggatgtctcagacaagtggacacggaaccagctcagcccccagttgctcaggtgcttgaccaagtactcccagatccctagtgtcctggtcatgaacaaggtagattgtttgaagcagaagtcagttctcctggagctcacggcagccctcactgaaggtgtggtcaatggcaaaaagctcaagatgaggcaggccttccactcacaccctggcacccattgccccagcccagcagttaaggacccaaacacacaatctgtgggaaatcctcagaggattggctggccccacttcaaggagatcttcatgttgtcagccctaagccaggaggacgtgaaaacactaaagcaataccttctgacacaggcccagccagggccctgggagtaccacagtgcagtcctcactagccagacaccagaagagatctgtgccaacattatccgagagaagctcctagaacacctgccccaggaggtgccttacaatgtacagcagaagacagcagtgtgggaggaaggaccaggtggggagctggttatccaacagaagcttctggtgcccaaagaatcttatgtgaaactcctgattggtccgaagggccacgtgatctcccagatagcacaggaggcaggccatgacctcatggacatcttcctctgcgatgttgacatccgcctctctgtgaagctcctcaagtgaccaccctctactgaccctcccagggcattccagctcaagctgctggcaggaactgaccagttctgtccttggctggggaccctccaggcactggtgagagacatgaacactgactggccactagctggcctggccctgttgagtctgcacagtccctgcccagctgtgtcttctgttggaagaaggaacctgccttagctcagtttccaggtggttcctctgcctggcaccacagctacaaaggtgtagctaagaagatggcccattggtgggagcaatgtcaccctgcctccagctagctatgggcccagagtttctccctgagtcgctgttgctagcagggagatttctcttcctgccctcacttctttcaccttgaacttggataagaactcgtgtctcctgagtgaggtagcgcctcccatctgctccccaattcttgatctctcccaccccatccctctccccagtcttggatactaataaaatataagcattctggttctcatcttta

SEQ ID NO: 158608 - DNA, 1314 bp, Artificial Sequence
  derived and/or modified sequence
atggcagccccatcgtggagaggggcccggctcgtgcagagcgtgctgcgcgtgtggcaggtggggcctcacgttgctcgagagcgggtcatccccttctccagcctgctgggtttccaacggaggtgtgtgagctgtgtggccggatctgccttttctggccctagactggccagtgcctcgcgatccaacggacaggggagcgccctagatcattttctgggtttctctcagccagactcttctgtgacaccctgtgtgcctgccgtctctatgaatcgcgacgagcaagatgtgctgttagtgcatcaccctgatatgcccgagaactcccgagtgctgagagtggtgttgttgggagcacctaacgctggcaagtccacgctatccaaccagttacttggaagaaaagtctttcctgtgtctaggaaggtacacactaccagatgtcaggctctcggtgttataacggaaaaggaaactcaggttatcttactcgacaccccaggcattatttctcccggcaagcagaagcgccaccaccttgaactgagtctcttagaagatccctggaagagcatggaaagcgccgatttagttgtagttctagtggacgttagtgacaaatggactagaaaccagctatctccccagctgttgcggtgcctcacaaagtactctcagatcccctctgtgcttgttatgaacaaggtcgactgcttaaaacaaaagagcgtattgttagagctcaccgcagctctgaccgagggggtcgtgaacggaaaaaagctaaaaatgaggcaggcctttcattcacatccagggacacactgcccctctcctgccgtgaaagatcccaatacacagtccgtgggcaatccacaaagaattggctggcctcattttaaagaaatattcatgttatctgcattgagccaagaagatgtcaaaactctgaagcagtatctactgacacaggctcagccaggcccttgggagtaccacagcgctgtcttgactagccagaccccagaagagatatgcgcaaacatcatccgtgaaaaacttctcgagcacctcccacaggaggtcccgtataatgtgcagcagaaaacagctgtctgggaagaggggcctggaggggagctggtgatccaacagaagctgctggtgcctaaagaaagctatgtgaaactgctcatcggccccaagggccatgtgatatcacaaatcgcacaagaggcaggacacgacctgatggatattttcttgtgcgacgtggacatacgcctgtcggtgaagctgctcaaatag

SEQ ID NO: 158609 - DNA, 1314 bp, Artificial Sequence
  derived and/or modified sequence
atggccgcccccagctggaggggggcccggctggtgcagagcgtgctgcgggtgtggcaggtgggcccccacgtggcccgggagagggtcatccccttcagcagcctgctgggcttccagaggcgctgtgtgtcctgtgtggccggcagcgccttcagcggcccccggctggccagcgccagccgcagcaatggccagggcagcgccctggaccacttcctgggcttcagccagcctgacagctctgtgaccccctgtgtgcctgctgtgtccatgaacagagatgagcaggatgtgctgctggtgcaccacccagacatgcctgagaacagccgggtgctgcgggtggtgctgctgggcgccccaaatgctgggaagagcaccctgagcaaccagctgctgggcaggaaggtgtttcctgtgtccaggaaggtgcacaccacccgctgccaggccctgggcgtcatcacagagaaggagacccaggtgatcctgctggacaccccaggcatcatcagccctgggaagcagaagaggcaccacctggagctgagcctgctggaggacccctggaagtccatggagagcgctgacctggtggtggtgctggtggatgtgtctgacaagtggaccaggaaccagctgagcccccagctgctgcgctgcctgaccaagtacagccagatccccagcgtgctggtgatgaacaaggtggactgcctgaagcagaagtctgtgctgctggagctgacagctgccctgacagaaggagtggtgaatggcaagaagctgaagatgaggcaggccttccacagccaccctggcacccactgccccagccctgctgtgaaggaccccaacacccagagcgtgggcaacccccagagaattggctggccccacttcaaggagatcttcatgctgagcgccctgagccaggaggatgtgaagaccctgaagcagtacctgctgacccaggcccagcccggcccctgggagtaccacagcgctgtgctgaccagccagaccccagaggagatctgtgccaacatcatccgggagaagctgctggagcacctgccccaggaggtgccctacaacgtgcagcagaagacagctgtgtgggaggagggccctggaggagagctggtgatccagcagaagctgctggtgcccaaggagagctatgtgaagctgctgattggccccaagggccacgtgatcagccagatcgcccaggaggccggccatgacctgatggacatcttcctgtgtgatgtggacatccggctgtctgtgaagctgctgaagtag

SEQ ID NO: 158610 - DNA, 1314 bp, Artificial Sequence
  derived and/or modified sequence
atggccgcccccagctggcggggcgcccggctggtgcagagcgtgctgcgggtgtggcaggtgggcccccacgtagcaagagagagggtgattccattctctagcctgctcggatttcagcgtaggtgcgtgtcctgtgtcgcgggaagtgcgttcagcggacctcggctcgcgagcgcctcgaggagcaacgggcagggaagtgccctggatcacttcctaggcttttctcagcctgattcaagtgtgactccctgcgtgcccgcggtctccatgaatagggatgaacaagacgtgcttctggtacaccaccctgatatgccagagaacagtagggtactgcgcgtggtgctactcggagcccctaacgccgggaaatccacactaagcaatcagctgctgggccgcaaagtatttcctgtgtctcggaaagtgcacacaactaggtgccaggcgctgggagtcattaccgagaaggagacccaggttattttattggatacacccggcatcatctccccaggtaaacaaaagcgccatcacctcgaactgtctctcctggaggatccttggaagtcaatggagagcgccgatttggttgtcgtactggtcgacgtcagcgataaatggaccaggaatcagctctccccccagctcctcagatgccttacaaagtatagccaaattcctagcgtcctcgttatgaacaaggtggactgcctcaaacagaagtccgttctcttggaactcaccgctgccctaactgaaggcgtcgtcaatggcaaaaagctcaagatgcgacaagcgtttcactctcaccccgggacccattgtccatcccctgccgtgaaagacccaaacacgcaatccgtgggcaacccgcaaagaattggctggccacacttcaaggagatctttatgctctccgctctctcacaggaggatgtcaagactctaaagcagtacctgttgacgcaggcacagccaggaccgtgggagtaccatagcgctgttttaacatcccagacacctgaagaaatctgtgcaaacatcattcgagagaaactgcttgagcatctgccccaggaagtgccatataacgtccagcagaagacagctgtctgggaggagggaccaggcggcgagctggtcatccagcagaaactgctagtgcccaaagagagctacgtgaaacttttgattggcccgaagggacacgtgatttctcagattgctcaagaggccgggcacgatctcatggacattttcctgtgcgacgttgatattcgattgtcagtaaagcttctgaaatag

SEQ ID NO: 158611 - DNA, 1314 bp, Artificial Sequence
  derived and/or modified sequence
atggcggcaccctcttggcggggagcgaggcttgttcaaagcgttttgcgggtgtggcaagtagggccacacgtcgccagggagcgggtcatcccattctccagcttgctcgggtttcaaagacggtgcgtgagttgtgtcgccggatctgccttctcgggcccaaggctggcctcagcatcccggagtaacggccaagggtcagcccttgaccacttcttgggattcagccaacctgatagtagcgtgactccttgcgtcccagctgtgtctatgaacagggacgaacaggacgtcctactcgtgcatcacccagatatgccagagaatagcagggtgctgcgggtcgtcctgttgggagccccaaacgcaggaaagtcaacactgtcaaaccagctcctcggcaggaaggtcttcccagtttctagaaaggtgcacacgaccagatgtcaggccttgggagtaattacggaaaaggaaactcaggtaattctgctggacactcctggcatcatttcccccggaaagcagaaacggcatcacctggagctgtccctgctagaagacccatggaagagtatggaatctgccgacctcgttgtggtcctggtggacgtcagcgataagtggacgcgcaatcaactctcgccacaactgctgaggtgtctgacaaagtactcccagatcccctcagttctcgtgatgaataaagtggactgtctgaagcaaaagtctgttcttctggaattgactgcggctctgacagagggcgtggtgaacgggaaaaaactcaaaatgcggcaggcattccattcacaccccggtactcactgccccagtcccgctgtcaaagacccaaatacccaaagtgttgggaatcctcagcgtatcggttggccccatttcaaagagatcttcatgctgagtgctcttagtcaggaagatgtgaaaactctgaaacagtacctccttacacaggcacagcccggaccttgggaatatcacagtgccgttctcacaagccaaacgcctgaagagatctgcgcaaacataataagggagaagttactggagcacctgccccaggaggttccctacaatgtccagcagaaaaccgccgtttgggaggagggaccaggaggtgaacttgtcatacagcagaaacttttagtgcctaaagagtcatacgtgaagctgctcatcggtcccaaagggcacgtgatcagccagattgcccaagaggccggacatgacctgatggatatttttctgtgtgacgtggatattcggctctctgtgaagctgctgaaatag

SEQ ID NO: 158612 - protein, 485 aa, Artificial Sequence
  derived and/or modified sequence
MALPPFFGQGRPGPPPPQPPPPAPFGCPPPPLPSPAFPPPLPQRPGPFPGASAPFLQPPLALQPRASAEASRGGGGAGAFYPVPPPPLPPPPPQCRPFPGTDAGERPRPPPPGPGPPWSPRWPEAPPPPADVLGDAALQRLRDRQWLEAVFGTPRRAGCPVPQRTHAGPSLGEVRARLLRALRLVRRLRGLSQALREAEADGAAWVLLYSQTAPLRAELAERLQPLTQAAYVGEARRRLERVRRRRLRLRERAREREAEREAEAARAVEREQEIDRWRVKCVQEVEEKKREQELKAAADGVLSEVRKKQADTKRMVDILRALEKLRKLRKEAAARKGVCPPASADETFTHHLQRLRKLIKKRSELYEAEERALRVMLEGEQEEERKRELEKKQRKEKEKILLQKREIESKLFGDPDEFPLAHLLEPFRQYYLQAEHSLPALIQIRHDWDQYLVPSDHPKGNFVPQGWVLPPLPSNDIWATAVKLH

SEQ ID NO: 158613 - protein, 279 aa, Artificial Sequence
  derived and/or modified sequence
LMRSHSDSCHFSKHLRREHGPATILRPGSPRPPPPPSFSLRRLRERAREREAEREAEAARAVEREQEIDRWRVKCVQEVEEKKREQELKAAADGVLSEVRKKQADTKRMVDILRALEKLRKLRKEAAARKGVCPPASADETFTHHLQRLRKLIKKRSELYEAEERALRVMLEGEQEEERKRELEKKQRKEKEKILLQKREIESKLFGDPDEFPLAHLLEPFRQYYLQAEHSLPALIQIRHDWDQYLVPSDHPKGNFVPQGWVLPPLPSNDIWATAVKLH

SEQ ID NO: 158614 - protein, 270 aa, Artificial Sequence
  derived and/or modified sequence
SHSDSCHFSKHLRREHGPATILRPGSPRRRRLRLRERAREREAEREAEAARAVEREQEIDRWRVKCVQEVEEKKREQELKAAADGVLSEVRKKQADTKRMVDILRALEKLRKLRKEAAARKGVCPPASADETFTHHLQRLRKLIKKRSELYEAEERALRVMLEGEQEEERKRELEKKQRKEKEKILLQKREIESKLFGDPDEFPLAHLLEPFRQYYLQAEHSLPALIQIRHDWDQYLVPSDHPKGNFVPQGWVLPPLPSNDIWATAVKLH

SEQ ID NO: 158615 - DNA, 1458 bp, Artificial Sequence
  derived and/or modified sequence
atggcactgccaccttttttcggccagggtagaccgggccctccaccacctcagcctcccccaccagccccctttggatgtccaccaccacctctcccatctccagccttccccccacccctgccccagaggccgggaccttttcccggggcgtccgcaccattcctgcaacccccattggcactgcagcctcgtgcaagcgcggaggccagccggggagggggcggcgccggggctttttaccccgtccctcctcccccactcccaccgccacccccccaatgtaggcccttccctggcaccgatgcaggcgagcgaccacgtccccctcctcctggccctggccccccttggagccccaggtggccggaggcccctcctcctcccgcagacgtattaggtgacgctgccctccagcgcttgagagatagacaatggcttgaggcggttttcggtacaccccgacgggcaggatgccccgtgccgcaaagaacccatgctggccctagcctcggcgaagtgagagcaaggctccttcgtgctctgagactcgtccggcgactgagaggtctatcacaggccctgcgggaagctgaagcagacggtgcagcttgggtactgctctactcccagactgcccctctgcgggccgagctggcagagcgcctgcagcccctgactcaagcagcatacgtgggagaagctagaagaaggctggaacgtgtacgcaggagacggctaaggctgagggagagagcgagggaacgtgaagctgagagggaggccgaagccgccagggctgttgagcgcgagcaagaaattgacaggtggagggtcaagtgcgtgcaggaggtggaggaaaaaaagcgggagcaggagctcaaggctgccgctgatggggtgttgagcgaggtacgtaagaagcaagccgatactaaacggatggtggatatcctccgggcattggagaagttgcgaaagctccggaaggaggcagccgccagaaagggtgtctgcccccccgcttctgcagatgagacgttcacacaccacctgcagcgcctgcgcaagctgatcaagaagcgttccgagctctatgaggcagaggagagggctcttagggtgatgctagagggagagcaggaggaagaacggaagcgagagctcgagaagaagcagaggaaggagaaggagaaaatcttgcttcagaaacgggagatcgaaagcaagttatttggcgatccggacgagttcccattagcacacctccttgaaccctttaggcagtactacctgcaagcagagcatagccttcctgctctgatccagatccgccatgactgggaccagtatctcgtgccatcagatcaccccaaggggaactttgtgccgcagggatgggtcctgcccccactgccatcaaatgacatatgggctactgcggtcaaactgcattag

SEQ ID NO: 158616 - DNA, 840 bp, Artificial Sequence
  derived and/or modified sequence
ctcatgagaagtcactcagacagctgccatttttccaagcacttgcggcgggaacatggacccgctacgatcctcagacctggaagcccccgtccgccaccgcccccaagtttctcactcaggcggttacgggagcgcgctagggagcgggaggcggagagggaagcagaggccgcaagagccgtggaacgggagcaagaaatcgaccgatggcgcgttaaatgtgttcaggaggtagaggagaagaagagagaacaagaattgaaagcggccgcggatggagtgttgtccgaagtccgcaaaaagcaagctgataccaaaagaatggtggatattttacgcgccctggaaaagctgcggaaactgagaaaagaggccgcagcacgtaagggggtctgcccaccagcaagcgctgacgaaacattcacacatcacttgcagagattgcggaaactgatcaaaaagcggtccgaattgtacgaagccgaggagcgggctctgagagtgatgcttgagggcgagcaggaagaagaaagaaagagagagctagagaaaaaacagaggaaagagaaggagaaaatcctgctgcagaaacgcgaaatcgaaagtaagctgttcggcgaccccgatgaatttcccctggctcacctgctggagccattcaggcagtactatctgcaggcagaacatagcctgcccgcacttattcaaatccggcacgattgggatcaatatttagtgccctccgaccacccaaaaggaaactttgtaccgcaggggtgggtgctcccaccattgccatcaaacgatatctgggccacggccgtgaagctgcactag

SEQ ID NO: 158617 - DNA, 813 bp, Artificial Sequence
  derived and/or modified sequence
tcccactccgattcgtgtcacttttcaaagcatctgagacgggagcatggccctgcaacgattttacggcccggcagcccacgccggcggagactgaggttacgcgaaagggctagagaacgcgaggctgagcgtgaagccgaggccgcgcgcgccgtagagcgggagcaggagattgatcggtggcgtgttaaatgtgtacaggaggttgaagagaagaagcgggagcaggaacttaaggccgcagctgacggcgttctgtcggaggttcgaaaaaaacaagctgatacgaagcgtatggtggacatactacgtgcacttgagaagcttagaaaattaaggaaagaagcggcggctcggaaaggggtttgccccccggcatcagctgacgagaccttcactcaccatctacagcgcttgagaaaattaatcaaaaaaagaagtgaactatacgaggccgaagagagggcactcagggtgatgcttgaaggtgaacaggaggaggagaggaagagggagttagaaaaaaaacagaggaaggagaaggagaagatcctgctgcaaaagcgcgaaattgaaagcaagcttttcggggaccctgatgaattccccctggcacacttgctcgaaccctttcgtcagtattatttgcaggcggagcattcccttcctgccttgatccagataagacatgattgggatcagtacctggtacctagcgatcaccccaaagggaactttgttccacaaggatgggtcttaccaccattgccttccaacgatatctgggcgactgctgtcaagcttcactag

SEQ ID NO: 158618 - DNA, 1458 bp, Artificial Sequence
  derived and/or modified sequence
atggccctgccccccttcttcggccagggccggcccggccccccaccaccccagcccccacctccagcccccttcggctgccccccaccacccctgcccagccctgccttccccccacccctgccccagaggcctggccccttccctggggccagcgcccccttcctgcagccccccctggccctgcagccccgggccagcgctgaggccagcagaggaggcggcggggccggggccttctaccctgtgcccccaccacccctgcccccacctccaccccagtgccggcccttccctggaacagatgctggggagcggcccaggcctcctcctcctggccctggccccccctggagcccccgctggccagaggcccctcctcctccagcagatgtgctgggagatgctgccctgcagaggctgcgggaccggcagtggctggaggccgtgtttggcaccccaagaagagctggctgccctgtgccccagaggacccatgctggccccagcctgggggaggtgcgggcccggctgctgcgggccctgcggctggtgcggcggctgcggggcctgagccaggccctgcgggaggccgaggctgatggagctgcctgggtgctgctgtacagccagacagcccccctgcgggcagagctggccgagcggctgcagcccctgacccaggccgcctacgtgggggaggcccggcggcggctggagcgggtgagaagaagaaggctgcggctgcgggagcgggcccgggagcgggaggccgagcgggaggccgaggccgcccgggctgtggagcgggagcaggagattgaccgctggagggtgaagtgtgtgcaggaggtggaggagaagaagcgggagcaggagctgaaggctgctgctgatggagtgctgtctgaggtgaggaagaagcaggccgacaccaagaggatggtggacatcctgcgggccctggagaagctgaggaagctgaggaaggaggccgccgccaggaagggcgtgtgccccccagccagcgcagatgagaccttcacccaccacctgcagaggctgaggaagctgatcaagaagaggtctgagctgtatgaggccgaggagcgggccctgcgggtgatgctggagggggagcaggaggaggagaggaagcgggagctggagaagaagcagaggaaggagaaggagaagatcctgctgcagaagcgggagattgagagcaagctgtttggagaccctgatgagttccccctggcccacctgctggagcccttccggcagtactacctgcaggccgagcacagcctgcctgccctgatccagatcagacatgactgggaccagtacctggtgcccagcgaccaccccaagggcaactttgtgccccagggctgggtgctgccccccctgcccagcaatgacatctgggccacagctgtgaagctgcactag

SEQ ID NO: 158619 - DNA, 840 bp, Artificial Sequence
  derived and/or modified sequence
ctgatgaggagccacagcgacagctgccacttcagcaagcacctgcggcgggagcacggccctgccaccatcctgcggcccggcagcccccggcccccacctcctccttccttcagcctgcggcggctgcgggagcgggcccgggagcgggaggccgagcgggaggccgaggccgcccgggctgtggagcgggagcaggagattgaccgctggagggtgaagtgtgtgcaggaggtggaggagaagaagcgggagcaggagctgaaggctgctgctgatggagtgctgtctgaggtgaggaagaagcaggccgacaccaagaggatggtggacatcctgcgggccctggagaagctgaggaagctgaggaaggaggccgccgccaggaagggcgtgtgccccccagccagcgcagatgagaccttcacccaccacctgcagaggctgaggaagctgatcaagaagaggtctgagctgtatgaggccgaggagcgggccctgcgggtgatgctggagggggagcaggaggaggagaggaagcgggagctggagaagaagcagaggaaggagaaggagaagatcctgctgcagaagcgggagattgagagcaagctgtttggagaccctgatgagttccccctggcccacctgctggagcccttccggcagtactacctgcaggccgagcacagcctgcctgccctgatccagatcagacatgactgggaccagtacctggtgcccagcgaccaccccaagggcaactttgtgccccagggctgggtgctgccccccctgcccagcaatgacatctgggccacagctgtgaagctgcactag

SEQ ID NO: 158620 - DNA, 813 bp, Artificial Sequence
  derived and/or modified sequence
agccacagcgacagctgccacttcagcaagcacctgcggcgggagcacggccctgccaccatcctgcggcccggcagccccaggagaagaaggctgcggctgcgggagcgggcccgggagcgggaggccgagcgggaggccgaggccgcccgggctgtggagcgggagcaggagattgaccgctggagggtgaagtgtgtgcaggaggtggaggagaagaagcgggagcaggagctgaaggctgctgctgatggagtgctgtctgaggtgaggaagaagcaggccgacaccaagaggatggtggacatcctgcgggccctggagaagctgaggaagctgaggaaggaggccgccgccaggaaaggagtgtgccccccagccagcgcagatgagaccttcacccaccacctgcagaggctgaggaagctgatcaagaagaggtctgagctgtatgaagctgaggagcgggccctgcgggtgatgctggagggggagcaggaggaggagaggaagcgggagctggagaagaagcagaggaaggagaaggagaagatcctgctgcagaagcgggagattgagagcaagctgtttggagaccctgatgagttccccctggcccacctgctggagcccttccggcagtactacctgcaggccgagcacagcctgcctgccctgatccagatcagacatgactgggaccagtacctggtgcccagcgaccaccccaagggcaactttgtgccccagggctgggtgctgccccccctgcccagcaatgacatctgggccacagctgtgaagctgcactag

SEQ ID NO: 158621 - DNA, 1458 bp, Artificial Sequence
  derived and/or modified sequence
atggccctgccccccttcttcggccagggccggcccggccccccccctccccagccccctccacccgcaccttttggatgcccaccgccccccctcccttctccagcttttccaccaccattgcctcagcggcctggccccttccccggcgccagcgcgccctttctgcagcccccactggcgctccagccacgcgccagtgcagaagcctcccggggcggcggcggggcaggggcattttacccggttcccccaccacccctccccccgccacctccccagtgtcgcccctttccgggaaccgacgcaggtgagcggcctcggccccctccacccggtccaggcccaccatggagcccacggtggcccgaagctccacctccaccagctgacgtgctaggtgacgctgccctgcagagattacgcgacagacagtggctggaggcggtgttcggaaccccgcgtagggccggatgtcctgtgccacaacgaacccacgcaggacccagtctgggcgaggtgcgcgcgcgattactcagggcactgcgcctcgtacgccgtttgagagggttgtcccaggctttgcgcgaggccgaagccgatggagccgcctgggtcctgctgtacagccagactgctcctctgcgggctgagctcgcggaaagattgcaacccctgactcaggcagcatacgtgggcgaggctcgccgacgtctggagagggtgaggagacgtcgcctgagactcagggaaagagctcgagagagagaagctgaacgggaggccgaggccgccagagctgtggagcgcgaacaagaaatcgataggtggcgggtgaaatgtgtgcaggaagtggaggagaagaagagggagcaggagctcaaagccgccgctgacggagtgttgtccgaggtgagaaagaagcaagccgacacaaagcggatggtagatattctgcgcgcccttgagaagctgaggaaactccgaaaggaagcggcagcccgaaagggagtttgcccacccgctagtgcagatgaaactttcacacaccacctgcaaagactgagaaaactaataaagaagcgttcagagctatatgaggcagaggaacgagcattgcgggtgatgctggaaggcgagcaagaagaggaaagaaagagagagctggagaaaaagcagcggaaagagaaggagaaaatcctgttgcagaaacgagagatcgagtctaaattattcggtgaccccgacgagtttcctttggcacatcttctcgagccattcagacaatactatctccaggctgagcattcactccccgcccttatacagatccggcatgactgggatcagtatctggtgccatcagaccatcccaagggcaacttcgtgccccagggttgggtgctgcctcccctcccttctaatgacatctgggccaccgccgtgaagctgcactag

SEQ ID NO: 158622 - DNA, 840 bp, Artificial Sequence
  derived and/or modified sequence
ctgatgcggagccacagcgacagctgccacttcagcaagcacctgaggcgggagcacggcccagcgactatcctgcgtccaggctcaccacgtcccccgccaccccctagtttcagtttgagacggttgagggagagggcaagagaaagggaggctgaacgagaggccgaagcagcaagggccgtggagagggagcaggaaatcgacagatggcgtgtgaaatgcgtgcaagaggtggaagaaaaaaagcgagagcaggagctgaaggccgctgctgacggtgtactgagcgaagtgcgcaagaaacaggcagacactaagaggatggtagacatcctgcgcgccttagaaaagctacgtaagctgcgaaaggaagcggccgcccgcaagggggtatgcccacctgctagcgccgacgaaacatttactcatcatctacagcggctgaggaagcttattaagaagaggagtgagctgtatgaagcagaagaaagggcacttcgcgttatgctagaaggcgagcaggaagaggaacgtaaacgcgagttagaaaagaagcagaggaaagagaaagaaaaaattctactacagaaacgcgagattgaatctaaactgtttggcgacccagacgaatttccgctggcacacttgctcgaaccattcagacagtattacctccaagctgagcactccttgccggccctgatccagataaggcacgattgggaccagtatctggtgccctcagatcaccctaagggcaactttgtgccccagggttgggtactgcccccacttccttccaatgatatatgggcaaccgcagtgaagctgcactag

SEQ ID NO: 158623 - DNA, 813 bp, Artificial Sequence
  derived and/or modified sequence
agccacagcgacagctgccacttcagcaagcacctgcggcgggagcatggacctgctaccatcctacggcccggctctcctcggagacgtcgcctcaggctgagagaacgcgcccgtgagagagaggcagaacgcgaagcagaagcggcacgcgctgttgaaagagagcaagagatcgacaggtggcgggtgaagtgcgtccaggaagtggaggagaagaaacgggagcaggaattgaaagccgccgccgatggtgtactgtccgaggttcgaaagaagcaggctgatactaagcgaatggtggacatccttagagccctcgagaaactacgaaaactgagaaaggaggccgctgccaggaagggcgtatgcccacctgctagcgccgatgagacgttcacccatcatctgcaacggctgcgcaagctgataaagaaaagaagtgaactatacgaggctgaggagagggcactacgggtgatgttggagggggaacaggaggaagagaggaaacgtgagctggaaaaaaagcagcggaaggagaaagaaaaaatcctgcttcagaagagagagatcgagtccaagcttttcggcgatcctgatgagtttcctctggctcatctgctcgagccttttaggcagtattatctccaggccgagcactctctccccgcattgatacagatccgccacgattgggatcagtacctcgtgcctagcgaccacccaaaagggaacttcgtgccacagggttgggttctcccaccactgcccagcaatgacatctgggctacagccgttaaactacactag

SEQ ID NO: 158624 - DNA, 1458 bp, Artificial Sequence
  derived and/or modified sequence
atggccttacctcctttctttggacagggccgaccaggtccacccccaccacagcccccacctcccgctcccttcgggtgccctccaccacctctaccgtcccccgctttcccacctccgctaccgcaacggccaggcccatttccaggagctagtgcacccttcctccagccccctctggcactgcaaccacgcgcttctgcagaggcatctcgcggtgggggaggtgcaggcgctttctacccagtcccgcctccacctctgccgcctccccctcctcagtgtaggcctttccccggtaccgatgcaggcgaacggcctcgaccacccccacccggacccggacccccttggagcccgagatggcccgaggcccctcctcctcctgcggatgtcttaggcgacgctgctctacagcgcctgagagataggcagtggttggaggcggtgttcgggaccccgaggagagctggatgcccggtgccccaacggacccacgccggaccctccctgggtgaagtgcgggcaaggctgctgagggccttgcgactcgtgcgaagattgcgtggcctgtcccaagcgctccgcgaggctgaggccgatggcgcagcctgggtgctcttgtattcgcagaccgccccactgcgggcagaacttgccgaacgtctacagcctctgacacaggcagcctatgtcggagaagccagaagaagactcgaacgcgtcaggagaagacgcttgaggctcagagagcgtgctagggaacgcgaggcggagcgcgaggcagaggcagccagggctgtcgagcgggagcaggagattgatcggtggcgtgtgaaatgtgttcaggaggtggaagagaaaaaaagggagcaagagctcaaggccgcagccgacggcgtgctgtccgaggtgagaaagaagcaggccgacaccaagcgcatggtcgacattttaagggcactagaaaagttgcgtaagctacgaaaagaggctgctgctcgtaagggagtgtgtccacctgcaagcgccgacgagaccttcacgcatcacttacaacgactgcgcaaactcattaagaaacggtctgagttatacgaggctgaagaaagagctctgcgcgtgatgctcgaaggggagcaggaggaagaacggaaacgcgagctagagaaaaaacagagaaaagagaaagagaagattctcctgcagaaaagggagatcgagtcaaaacttttcggggaccccgatgaattcccattggcacacctgcttgagcccttcagacaatactacttgcaagcagagcatagcctgcctgccctgattcagatcagacatgattgggatcagtatctggtcccttccgatcaccctaaaggaaatttcgtgcctcaagggtgggtgttaccgcctttaccttctaacgacatttgggctactgccgtgaaactgcactag

SEQ ID NO: 158625 - DNA, 840 bp, Artificial Sequence
  derived and/or modified sequence
ctgatgcggtctcattcggatagttgccacttcagcaaacatctgaggcgcgagcacggacctgctaccattctcagacccggtagccctaggccgccacctccgccaagcttctcactcagaaggttgagagagcgcgctagggagcgtgaggctgagagagaggctgaagcggcaagggccgtcgagcgcgaacaggaaatagatagatggagggtgaaatgcgtgcaggaggttgaagaaaagaagcgggagcaggagctgaaggccgcagcagacggcgtattgtcggaggtgcgcaagaagcaggccgacacaaagcggatggttgacattttgagggctctcgagaaactgcggaagctacggaaagaggccgcagctcgaaagggcgtctgtccacctgccagtgccgacgagactttcacacaccatcttcagcgcctcagaaaactgatcaagaaacgctcggagctctacgaggctgaagaaagagccctgagggtaatgttggaaggcgaacaggaagaggaaagaaagcgagagttggaaaagaagcaacgcaaggagaaggagaaaatcctccttcaaaaaagagagattgaatctaagctgttcggagatcctgacgagtttcctctggcccatttgctcgaaccctttagacagtactacctgcaggcagagcattctctgccagctctgattcagattcggcacgactgggatcaataccttgtcccctccgatcaccctaaagggaacttcgtgccacagggatgggtgctgccacccttgccatccaacgacatttgggcgaccgcagtaaaacttcactag

SEQ ID NO: 158626 - DNA, 813 bp, Artificial Sequence
  derived and/or modified sequence
tcccactcagactcttgtcatttttctaaacatttaaggcgcgaacacggtcctgctacaatcctcagacccggatcccccagaaggaggcgtcttaggctgcgcgaacgcgcacgtgagcgagaggccgaaagggaagctgaggcagccagggcggtggagcgggaacaagaaattgatcggtggagagttaagtgcgttcaggaggtcgaggaaaagaagagagagcaggaacttaaggcggcagctgatggcgtcctctcagaggtgcgaaagaaacaggctgacaccaagagaatggtggacatcctgcgcgctctggaaaaacttagaaagttgcgcaaggaggctgcagccaggaagggagtgtgcccacctgcttccgccgatgagacgtttactcaccacttacaacgcttgagaaaactcattaagaagcggtctgaactctatgaggctgaggaaagagctctaagggtgatgttggagggcgaacaagaggaagagcgcaagcgagaacttgaaaagaagcagcgcaaggagaaggaaaagatactgctgcagaagagggaaatcgagagcaagcttttcggcgacccagacgaatttcctctggcgcacctgttggagccgtttaggcagtattatctgcaggcggagcattctctcccagcgctgatccagattcgacacgactgggatcaatacctcgtgccatcggaccacccaaaaggcaacttcgtcccgcagggttgggttctgcctcccctgccaagcaatgatatatgggctacggccgtgaagctccactag

SEQ ID NO: 158627 - DNA, 2851 bp, Artificial Sequence
  derived and/or modified sequence
ctcatgaggagccactcagattcctgtcacttctcaaagcatctccgtcgtgaacatggccctgccaccattcttcggccagggtcgcccaggcccaccgcccccgcagccgccgcctcctgctcctttcggctgtccgccaccgccgctgccctccccggctttcccgccgcctctcccccagcggcccggcccttttccgggggcctccgcccccttccttcagcctccgctggctctgcagccccgagcctccgcggaggcctcccgcggcggaggcggcgctggcgccttctacccggtgccaccaccgccgctgcctcctccgccgccccagtgtcggcccttcccggggaccgacgccggcgagcggccgcggccaccgcctcccggcccggggccgccctggagcccgcggtggcctgaggcgccgccgccgccggccgacgtgctcggggatgcggccctccaacgcctgcgcgaccggcagtggctggaggcggtgttcgggaccccgcggcgggcaggctgtccggtgccccagcgcacgcatgccgggcccagccttggcgaagtgcgcgcgcgattgctccgggctctgcgcctggtgcggcggctgcgcggcctgagccaggccctgcgcgaggccgaagccgacggcgcggcctgggtcctgctgtactcccagaccgcgccgctgcgcgcggaactggccgagcggctacagccgttgacccaggctgcctatgtgggcgaggcgcggaggaggctggagagggtccggcgccgccggctgcggcttcgcgagagggcccgggaacgcgaggccgagcgggaggcagaggccgcgcgggcagtggaacgcgagcaggagattgaccgctggagggtgaagtgtgtgcaggaggtggaggagaagaagcgggagcaggaactcaaagcagccgctgatggcgtactatctgaagtgaggaaaaaacaagcagataccaaaagaatggtggacattctacgggctttggagaaattgaggaaactgaggaaagaggctgcagcgaggaaaggggtctgtcctccagcctcagcagatgagacttttacgcatcatcttcagcgactgagaaaactcattaaaaagcgctctgaactgtatgaagctgaagagagagccctcagagttatgctagaaggagaacaagaggaagagaggaaaagagaattagaaaagaaacaaagaaaagaaaaagagaaaattttacttcagaaacgtgaaattgagtccaagttgtttggggatccagatgagttcccacttgctcacctcttggagcctttccgacagtattatctccaagccgagcactccctgccagcgctcatccagatcaggcatgattgggatcagtacctggtgccatccgatcatcccaaaggcaacttcgttccccaaggatgggtccttcccccgctccccagcaacgacatctgggcaactgctgttaagctgcattagtaaagatgctccaggagtgtggtccagccagcgctctttccagctgtaaatattagcgatggtgccatcttttgctgtagactaaactgcaacttctaaattccatgtggcattcccctaccctgaagttatgctttccttctgtgctctgtgctggccagaggtgcctcttgaatcagattaatgtggtttttcaggaaaggacttaggtgaactgaggtttttaccacaggcagtgaatgaccttggttcaccaaatttgcctctgttttgaggggcttggtccagagtgacttgttaatttactctaacttccttgtgtgttgatgggtaagtacactcaaacactgaatacaggtgtgtgatgggtagatttcacagcccttctactaatagtgagtgtgaaggcaagcttgatgcaaaacctcctgacctttcctacctgaagagccctttgacttctaggaagaaaggtcaaaaatgttatcttcagttgtgttaatcccagttttagtgcagcttaggaggctgctagttaggaagatggcagtggctgtaggctgggttgccagaaaagatggtggcctagtcttattattcagatggagaacttagaaaacctgaagagtacccaaattggattgtattttaatggacaatggctgtattttttccatgttagaaggatcctaatgaaagcacctgttatttttaagtttctaagggtctagttgttcagaatccccaaggatatttccctaacctcactcagtcacattgtaggagccagtgtagctatggaattatcttaggaactcaagcttctaaaactatccatgtagtcaaatctaggggaaaaagcaaataaaaatagtaaaatttggccgggcacagtggctcacgcctgtaatcccaacactttgggaggccgaggcgggccgatcacgaggtcaggagatcaaggccatcctggctaacacggtgaaaccctgtctctactaaaaatacaaaaaaatattagctgggcgtaggtggtgcacacctgtagtcccagctactggggaggctgaggcaggagaatggtgtaaaacccaggaggcagagcttgcagtgagccgagatcgcgccacggcactccagcctgggagacagagcaagactccgtctcaaaaaaaaaaaaagtaaaatttattttttatattcattaataaatgctgttgtgcttggagatgatcactcatataacatgtcatttttttggttctgttttggtttggtttttgccaattattttgttatatttccaaaaaactaaataaaaatcatttttatttttta

SEQ ID NO: 158628 - DNA, 934 bp, Artificial Sequence
  derived and/or modified sequence
ctcatgaggagccactcagattcctgtcacttctcaaagcatctccgtcgtgaacatggccctgccaccattcttcggccagggtcgcccaggccccctccgcccccttccttcagcctccgccggcttcgcgagagggcccgggaacgcgaggccgagcgggaggcagaggccgcgcgggcagtggaacgcgagcaggagattgaccgctggagggtgaagtgtgtgcaggaggtggaggagaagaagcgggagcaggaactcaaagcagccgctgatggcgtactatctgaagtgaggaaaaaacaagcagataccaaaagaatggtggacattctacgggctttggagaaattgaggaaactgaggaaagaggctgcagcgaggaaaggggtctgtcctccagcctcagcagatgagacttttacgcatcatcttcagcgactgagaaaactcattaaaaagcgctctgaactgtatgaagctgaagagagagccctcagagttatgctagaaggagaacaagaggaagagaggaaaagagaattagaaaagaaacaaagaaaagaaaaagagaaaattttacttcagaaacgtgaaattgagtccaagttgtttggggatccagatgagttcccacttgctcacctcttggagcctttccgacagtattatctccaagccgagcactccctgccagcgctcatccagatcaggcatgattgggatcagtacctggtgccatccgatcatcccaaaggcaacttcgttccccaaggatgggtccttcccccgctccccagcaacgacatctgggcaactgctgttaagctgcattagtaaagatgctccaggagtgtggtccagccagcgctctttccagctgtaaatattagcgatggtgccatcttttgctgtagactaaactgcaact

SEQ ID NO: 158629 - DNA, 2150 bp, Artificial Sequence
  derived and/or modified sequence
agccactcagattcctgtcacttctcaaagcatctccgtcgtgaacatggccctgccaccattcttcggccagggtcgccccggcgccgccggctgcggcttcgcgagagggcccgggaacgcgaggccgagcgggaggcagaggccgcgcgggcagtggaacgcgagcaggagattgaccgctggagggtgaagtgtgtgcaggaggtggaggagaagaagcgggagcaggaactcaaagcagccgctgatggcgtactatctgaagtgaggaaaaaacaagcagataccaaaagaatggtggacattctacgggctttggagaaattgaggaaactgaggaaagaggctgcagcgaggaaaggggtctgtcctccagcctcagcagatgagacttttacgcatcatcttcagcgactgagaaaactcattaaaaagcgctctgaactgtatgaagctgaagagagagccctcagagttatgctagaaggagaacaagaggaagagaggaaaagagaattagaaaagaaacaaagaaaagaaaaagagaaaattttacttcagaaacgtgaaattgagtccaagttgtttggggatccagatgagttcccacttgctcacctcttggagcctttccgacagtattatctccaagccgagcactccctgccagcgctcatccagatcaggcatgattgggatcagtacctggtgccatccgatcatcccaaaggcaacttcgttccccaaggatgggtccttcccccgctccccagcaacgacatctgggcaactgctgttaagctgcattagtaaagatgctccaggagtgtggtccagccagcgctctttccagctgtaaatattagcgatggtgccatcttttgctgtagactaaactgcaacttctaaattccatgtggcattcccctaccctgaagttatgctttccttctgtgctctgtgctggccagaggtgcctcttgaatcagattaatgtggtttttcaggaaaggacttaggtgaactgaggtttttaccacaggcagtgaatgaccttggttcaccaaatttgcctctgttttgaggggcttggtccagagtgacttgttaatttactctaacttccttgtgtgttgatgggtaagtacactcaaacactgaatacaggtgtgtgatgggtagatttcacagcccttctactaatagtgagtgtgaaggcaagcttgatgcaaaacctcctgacctttcctacctgaagagccctttgacttctaggaagaaaggtcaaaaatgttatcttcagttgtgttaatcccagttttagtgcagcttaggaggctgctagttaggaagatggcagtggctgtaggctgggttgccagaaaagatggtggcctagtcttattattcagatggagaacttagaaaacctgaagagtacccaaattggattgtattttaatggacaatggctgtattttttccatgttagaaggatcctaatgaaagcacctgttatttttaagtttctaagggtctagttgttcagaatccccaaggatatttccctaacctcactcagtcacattgtaggagccagtgtagctatggaattatcttaggaactcaagcttctaaaactatccatgtagtcaaatctaggggaaaaagcaaataaaaatagtaaaatttggccgggcacagtggctcacgcctgtaatcccaacactttgggaggccgaggcgggccgatcacgaggtcaggagatcaaggccatcctggctaacacggtgaaaccctgtctctactaaaaatacaaaaaaatattagctgggcgtaggtggtgcacacctgtagtcccagctactggggaggctgaggcaggagaatggtgtaaaacccaggaggcagagcttgcagtgagccgagatcgcgccacggcactccagcctgggagacagagcaagactccgtctcaaaaaaaaaaaaagtaaaatttattttttatattcattaataaatgctgttgtgcttggagatgatcactcatataacatgtcatttttttggttctgttttggtttggtttttgccaattattttgttatatttccaaaaaactaaataaaaatcatttttatttttt

SEQ ID NO: 158630 - DNA, 1458 bp, Artificial Sequence
  derived and/or modified sequence
atggccctgccccccttcttcggccagggcagacccggccccccccccccccagccccccccccccgcccccttcggctgcccccccccccccctgcccagccccgccttccccccccccctgccccagagacccggccccttccccggcgccagcgcccccttcctgcagccccccctggccctgcagcccagagccagcgccgaggccagcagaggcggcggcggcgccggcgccttctaccccgtgccccccccccccctgccccccccccccccccagtgcagacccttccccggcaccgacgccggcgagagacccagaccccccccccccggccccggccccccctggagccccagatggcccgaggccccccccccccccgccgacgtgctgggcgacgccgccctgcagagactgagagacagacagtggctggaggccgtgttcggcacccccagaagagccggctgccccgtgccccagagaacccacgccggccccagcctgggcgaggtgagagccagactgctgagagccctgagactggtgagaagactgagaggcctgagccaggccctgagagaggccgaggccgacggcgccgcctgggtgctgctgtacagccagaccgcccccctgagagccgagctggccgagagactgcagcccctgacccaggccgcctacgtgggcgaggccagaagaagactggagagagtgagaagaagaagactgagactgagagagagagccagagagagagaggccgagagagaggccgaggccgccagagccgtggagagagagcaggagatcgacagatggagagtgaagtgcgtgcaggaggtggaggagaagaagagagagcaggagctgaaggccgccgccgacggcgtgctgagcgaggtgagaaagaagcaggccgacaccaagagaatggtggacatcctgagagccctggagaagctgagaaagctgagaaaggaggccgccgccagaaagggcgtgtgcccccccgccagcgccgacgagaccttcacccaccacctgcagagactgagaaagctgatcaagaagagaagcgagctgtacgaggccgaggagagagccctgagagtgatgctggagggcgagcaggaggaggagagaaagagagagctggagaagaagcagagaaaggagaaggagaagatcctgctgcagaagagagagatcgagagcaagctgttcggcgaccccgacgagttccccctggcccacctgctggagcccttcagacagtactacctgcaggccgagcacagcctgcccgccctgatccagatcagacacgactgggaccagtacctggtgcccagcgaccaccccaagggcaacttcgtgccccagggctgggtgctgccccccctgcccagcaacgacatctgggccaccgccgtgaagctgcactag

SEQ ID NO: 158631 - DNA, 840 bp, Artificial Sequence
  derived and/or modified sequence
ctgatgagaagccacagcgacagctgccacttcagcaagcacctgagaagagagcacggccccgccaccatcctgagacccggcagccccagacccccccccccccccagcttcagcctgagaagactgagagagagagccagagagagagaggccgagagagaggccgaggccgccagagccgtggagagagagcaggagatcgacagatggagagtgaagtgcgtgcaggaggtggaggagaagaagagagagcaggagctgaaggccgccgccgacggcgtgctgagcgaggtgagaaagaagcaggccgacaccaagagaatggtggacatcctgagagccctggagaagctgagaaagctgagaaaggaggccgccgccagaaagggcgtgtgcccccccgccagcgccgacgagaccttcacccaccacctgcagagactgagaaagctgatcaagaagagaagcgagctgtacgaggccgaggagagagccctgagagtgatgctggagggcgagcaggaggaggagagaaagagagagctggagaagaagcagagaaaggagaaggagaagatcctgctgcagaagagagagatcgagagcaagctgttcggcgaccccgacgagttccccctggcccacctgctggagcccttcagacagtactacctgcaggccgagcacagcctgcccgccctgatccagatcagacacgactgggaccagtacctggtgcccagcgaccaccccaagggcaacttcgtgccccagggctgggtgctgccccccctgcccagcaacgacatctgggccaccgccgtgaagctgcactag

SEQ ID NO: 158632 - DNA, 813 bp, Artificial Sequence
  derived and/or modified sequence
agccacagcgacagctgccacttcagcaagcacctgagaagagagcacggccccgccaccatcctgagacccggcagccccagaagaagaagactgagactgagagagagagccagagagagagaggccgagagagaggccgaggccgccagagccgtggagagagagcaggagatcgacagatggagagtgaagtgcgtgcaggaggtggaggagaagaagagagagcaggagctgaaggccgccgccgacggcgtgctgagcgaggtgagaaagaagcaggccgacaccaagagaatggtggacatcctgagagccctggagaagctgagaaagctgagaaaggaggccgccgccagaaagggcgtgtgcccccccgccagcgccgacgagaccttcacccaccacctgcagagactgagaaagctgatcaagaagagaagcgagctgtacgaggccgaggagagagccctgagagtgatgctggagggcgagcaggaggaggagagaaagagagagctggagaagaagcagagaaaggagaaggagaagatcctgctgcagaagagagagatcgagagcaagctgttcggcgaccccgacgagttccccctggcccacctgctggagcccttcagacagtactacctgcaggccgagcacagcctgcccgccctgatccagatcagacacgactgggaccagtacctggtgcccagcgaccaccccaagggcaacttcgtgccccagggctgggtgctgccccccctgcccagcaacgacatctgggccaccgccgtgaagctgcactag

SEQ ID NO: 158633 - protein, 555 aa, Artificial Sequence
  derived and/or modified sequence
MPSWIGAVILPLLGLLLSLPAGADVKARSCGEVRQAYGAKGFSLADIPYQEIAGEHLRICPQEYTCCTTEMEDKLSQQSKLEFENLVEETSHFVRTTFVSRHKKFDEFFRELLENAEKSLNDMFVRTYGMLYMQNSEVFQDLFTELKRYYTGGNVNLEEMLNDFWARLLERMFQLINPQYHFSEDYLECVSKYTDQLKPFGDVPRKLKIQVTRAFIAARTFVQGLTVGREVANRVSKVSPTPGCIRALMKMLYCPYCRGLPTVRPCNNYCLNVMKGCLANQADLDTEWNLFIDAMLLVAERLEGPFNIESVMDPIDVKISEAIMNMQENSMQVSAKVFQGCGQPKPAPALRSARSAPENFNTRFRPYNPEERPTTAAGTSLDRLVTDIKEKLKLSKKVWSALPYTICKDESVTAGTSNEEECWNGHSKARYLPEIMNDGLTNQINNPEVDVDITRPDTFIRQQIMALRVMTNKLKNAYNGNDVNFQDTSDESSGSGSGSGCMDDVCPTEFEFVTTEAPAVDPDRREVDSSAAQRGHSLLSWSLTCIVLALQRLCR

SEQ ID NO: 158634 - DNA, 1668 bp, Artificial Sequence
  derived and/or modified sequence
atgccgtcctggatcggtgctgtgatactccctctgttggggctgctcctaagcctgcccgccggagcggatgttaaggcacgtagttgcggagaagtgcggcaggcttacggagccaagggttttagcctggcagatatcccataccaggagatagcgggggagcacctgcgcatctgcccgcaggagtatacctgctgtacaacggagatggaagataaactctctcaacagtccaagctggagtttgagaacctggtagaggaaaccagccacttcgtaagaacgactttcgtttcacgacataaaaaattcgatgagttctttcgggagttgctggagaatgccgaaaagtctctgaatgacatgtttgtcagaacatacggcatgctttacatgcagaactctgaagtcttccaagacctgtttacagaactcaagcgttattataccggggggaatgttaacctggaagaaatgcttaatgacttctgggcccggcttctggagaggatgtttcagctaattaatccacagtaccacttcagcgaggactatttggagtgcgtatccaagtataccgaccagcttaagccattcggggatgttcctagaaaactcaagatccaggtgactcgggcttttatcgccgcgcggactttcgtgcaagggctgaccgtgggcagagaggtcgccaaccgggtgtccaaggtctcccctactccaggctgcatcagggccctgatgaaaatgctgtattgcccatattgtcgagggcttcctacggttaggccatgtaacaactattgcttgaatgtgatgaagggatgtcttgccaaccaggccgaccttgacactgaatggaatctcttcattgatgcaatgctactcgttgctgagcgcctggagggaccttttaacatagaaagtgtaatggaccccatcgacgtcaagatcagcgaagcaatcatgaacatgcaggaaaatagtatgcaggtgagcgccaaagtgtttcaggggtgtggtcagccgaagcctgctcccgccttgcgtagcgcccgttccgcccccgagaatttcaacaccaggttccgaccatacaatccagaggaacggccgacaaccgccgccggtacaagtcttgaccgactcgtgaccgatattaaggaaaagctaaaactgtccaaaaaagtttggagtgccctcccgtatacgatctgcaaggatgaaagcgtcaccgccgggacaagcaatgaggaagaatgttggaacggccactccaaggcccgttacctgccagaaatcatgaatgacggactgactaaccagattaataatccagaagttgatgtcgacattactcggcctgatacattcatcaggcagcagattatggcacttagagtgatgactaataagttgaaaaatgcgtacaatgggaacgacgtcaattttcaagataccagtgacgagagttctgggagcggctcaggttcagggtgcatggacgatgtctgccctaccgaattcgaattcgtgaccactgaggcccccgccgtagacccggatagacgcgaggtggactctagcgccgcccagcgaggccacagcctgctgtcttggagcctcacttgcattgtacttgcactacagaggttatgtcggtag

SEQ ID NO: 158635 - DNA, 2624 bp, Artificial Sequence
  derived and/or modified sequence
ccaggatttctctcttcctatttcaggaggactctcacaggctcccacagcctgtgttaagctgaggtttcccctagatctcgtatatccccaacacatacctccacgcacacacatccccaagaacctcgagctcacaccaacagacacacgcgcgcatacacactcgctctcgcttgtccatctccctcccgggggagccggcgcgcgctcccacctttgccgcacactccggcgagccgagcccgcagcgctccaggattctgcggctcggaactcggattgcagctctgaacccccatggtggttttttaaacacttcttttccttctcttcctcgttttgattgcaccgtttccatctgggggctagaggagcaaggcagcagccttcccagccagcccttgttggcttgccatcgtccatctggcttataaaagtttgctgagcgcagtccagagggctgcgctgctcgtcccctcggctggcagaagggggtgacgctgggcagcggcgaggagcgcgccgctgcctctggcgggctttcggcttgaggggcaaggtgaagagcgcaccggccgtggggtttaccgagctggatttgtatgttgcaccatgccttcttggatcggggctgtgattcttcccctcttggggctgctgctctccctccccgccggggcggatgtgaaggctcggagctgcggagaggtccgccaggcgtacggtgccaagggattcagcctggcggacatcccctaccaggagatcgcaggggaacacttaagaatctgtcctcaggaatatacatgctgcaccacagaaatggaagacaagttaagccaacaaagcaaactcgaatttgaaaaccttgtggaagagacaagccattttgtgcgcaccacttttgtgtccaggcataagaaatttgacgaatttttccgagagctcctggagaatgcagaaaagtcactaaatgatatgtttgtacggacctatggcatgctgtacatgcagaattcagaagtcttccaggacctcttcacagagctgaaaaggtactacactgggggtaatgtgaatctggaggaaatgctcaatgacttttgggctcggctcctggaacggatgtttcagctgataaaccctcagtatcacttcagtgaagactacctggaatgtgtgagcaaatacactgaccagctcaagccatttggagacgtgccccggaaactgaagattcaggttacccgcgccttcattgctgccaggacctttgtccaggggctgactgtgggcagagaagttgcaaaccgagtttccaaggtcagcccaaccccagggtgtatccgtgccctcatgaagatgctgtactgcccatactgtcgggggcttcccactgtgaggccctgcaacaactactgtctcaacgtcatgaagggctgcttggcaaatcaggctgacctcgacacagagtggaatctgtttatagatgcaatgctcttggtggcagagcgactggaggggccattcaacattgagtcggtcatggacccgatagatgtcaagatttctgaagccattatgaacatgcaagaaaacagcatgcaggtgtctgcaaaggtctttcagggatgtggtcagcccaaacctgctccagccctcagatctgcccgctcagctcctgaaaattttaatacacgtttcaggccctacaatcctgaggaaagaccaacaactgctgcaggcacaagcttggaccggctggtcacagacataaaagagaaattgaagctctctaaaaaggtctggtcagcattaccctacactatctgcaaggacgagagcgtgacagcgggcacgtccaacgaggaggaatgctggaacgggcacagcaaagccagatacttgcctgagatcatgaatgatgggctcaccaaccagatcaacaatcccgaggtggatgtggacatcactcggcctgacactttcatcagacagcagattatggctctccgtgtgatgaccaacaaactaaaaaacgcctacaatggcaatgatgtcaatttccaggacacaagtgatgaatccagtggctcagggagtggcagtgggtgcatggatgacgtgtgtcccacggagtttgagtttgtcaccacagaggcccccgcagtggatcccgaccggagagaggtggactcttctgcagcccagcgtggccactccctgctctcctggtctctcacctgcattgtcctggcactgcagagactgtgcagataatcttgggtttttggtcagatgaaactgcattttagctatctgaatggccaactcacttcttttcttacactcttggacaatggaccatgccacaaaaacttaccgttttctatgagaagagagcagtaatgcaatctgcctccctttttgttttcccaaagagtaccgggtgccagactgaactgcttcctctttccttcagctatctgtggggaccttgtttattctagagagaattcttactcaaatttttcgtaccaggagattttcttaccttcatttgcttttatgctgcagaagtaaaggaatctcacgttgtgagggttttttttttctcattt

SEQ ID NO: 158636 - DNA, 1668 bp, Artificial Sequence
  derived and/or modified sequence
atgcccagctggattggagctgtgatcctgcccctgctgggcctgctgctgagcctgcctgctggagcagatgtgaaggcccggagctgtggggaggtgcggcaggcctatggagccaagggcttcagcctggccgacatcccctaccaggagattgctggggagcacctgcgcatctgcccccaggagtacacctgctgcaccacagagatggaggacaagctgagccagcagagcaagctggagtttgagaacctggtggaggagaccagccactttgtgaggaccacctttgtgagccgccacaagaagtttgatgagttcttccgggagctgctggagaatgctgagaagagcctgaatgacatgtttgtgaggacctacggcatgctgtacatgcagaacagcgaggtgttccaggacctcttcacagagctgaagcgctactacacaggaggaaatgtgaacctggaggagatgctgaatgacttctgggcccggctgctggagaggatgttccagctgatcaacccccagtaccacttcagcgaggactacctggagtgtgtgtccaagtacacagaccagctgaagccctttggagatgtgcccaggaagctgaagatccaggtgacccgggccttcatcgccgcccggacctttgtgcagggcctgactgtgggccgggaggtggccaacagagtgtccaaggtgagccccaccccaggctgcatccgggccctgatgaagatgctgtactgcccctactgccggggcctgcccaccgtgcggccctgcaacaactactgcctgaatgtgatgaagggctgcctggccaaccaggccgacctggacacagagtggaacctcttcattgatgccatgctgctggtggccgagcggctggagggccccttcaacatcgagagcgtgatggaccccattgatgtgaagatcagcgaggccatcatgaacatgcaggagaacagcatgcaggtgtctgccaaggtgttccagggctgcggccagcccaagccagccccagccctgcggagcgcccggagcgcccctgagaacttcaacacccgcttccggccctacaaccctgaggagcggcccaccacagctgctggcaccagcctggaccggctggtgacagacatcaaggagaagctgaagctgagcaagaaggtgtggagcgccctgccctacaccatctgcaaggatgaatctgtgacagctggcaccagcaatgaggaggagtgctggaatggccacagcaaggcccgctacctgcctgagatcatgaatgatggcctgaccaaccagatcaacaaccctgaggtggatgtggacatcaccaggccagacaccttcatccggcagcagatcatggccctgcgggtgatgaccaacaagctgaagaatgcctacaatggaaatgatgtgaacttccaggacaccagtgatgagagcagcggcagcggcagcggcagcggctgcatggatgatgtgtgccccacagaatttgaatttgtgaccacagaggccccagctgtggaccctgaccggcgggaggtggacagcagcgctgcccagaggggccacagcctgctgtcctggagcctgacctgcatcgtgctggccctgcagaggctgtgcaggtag

SEQ ID NO: 158637 - DNA, 1668 bp, Artificial Sequence
  derived and/or modified sequence
atgcccagctggatcggcgccgtgatcctgcccctgctgggcctgctactgtctctgcccgcgggcgcagacgttaaagcccgctcgtgtggggaagttcgccaggcgtacggcgccaaagggttctctctggccgatatcccctatcaagaaatcgcgggggagcatctgcgcatttgtccccaggagtatacctgttgcacaacagagatggaggataaattatctcagcaatcgaagctggagtttgagaaccttgtggaagagacgagtcacttcgttagaaccacctttgtgtcccgccacaagaagttcgatgaatttttcagggaactcctggagaatgccgaaaagtccctgaacgacatgttcgttagaacttatgggatgttgtacatgcagaactcggaggtgtttcaggacctcttcacggagctgaagagatactacaccggaggcaatgtaaacctggaggagatgctgaatgacttctgggcgcggctgctggagcgaatgttccagcttattaaccctcagtaccatttctctgaagattatctggagtgcgtgagcaagtacacagaccagctcaaaccctttggtgacgtgccccggaaacttaaaattcaagtgacacgcgcgtttatagctgcacgaaccttcgtgcagggactcacggttggccgtgaggttgctaatagggtaagtaaggtctctcctacgcctgggtgcatccgcgctctaatgaagatgctttactgtccctattgccgcgggctgcccacagtgagaccttgtaataactattgtctgaatgtaatgaaagggtgtctagcaaaccaggctgatctcgacacggagtggaacttgttcattgatgccatgctacttgtagctgagcggctggaagggccctttaatattgagtccgtgatggatccaattgacgttaaaatctccgaagccatcatgaacatgcaggaaaactctatgcaggtctctgctaaggttttccagggatgtggtcaacccaagccagcaccagctctacgctcggctagatcagcgcctgagaacttcaacaccagattccgcccctataacccggaggaaagacccaccaccgctgcaggaacctcgctggatcgtctagtgaccgacattaaggagaagttgaagctcagcaaaaaagtttggagtgccctgccctacacaatttgcaaggacgaatcagtaaccgcaggaacctcaaatgaggaagaatgttggaacggacactccaaggctcgatacctgccagaaattatgaacgatggcctaacaaaccaaataaacaatcctgaggtggacgttgacatcaccaggccagacacattcatcaggcagcagataatggcattgagggtgatgactaataaacttaaaaatgcctacaacgggaacgatgtgaatttccaggatacaagcgacgagtcttctggcagtgggtccgggtcaggctgtatggacgatgtctgtcctacggagttcgaatttgtcactacggaggcgccagccgtggaccctgacagacgggaagtagattcctccgctgcccagagaggccactctctgcttagttggagcctgacttgtatcgttttggcactgcagcggctgtgtcggtag

SEQ ID NO: 158638 - DNA, 1668 bp, Artificial Sequence
  derived and/or modified sequence
atgccctcatggattggtgccgtcatcttaccgctcttagggctgttgctgtcattacccgctggagctgatgtcaaagcccgatcctgtggcgaagtgcggcaggcgtatggagctaaggggttttcattggctgatatcccatatcaggaaatcgcaggtgagcatcttagaatctgtccccaagagtatacatgttgcacaacggaaatggaagataagctatcacagcaaagtaagctggagtttgaaaatctggtggaggaaacttctcacttcgtgcgcacaacattcgtcagcaggcataagaagtttgacgagttcttcagagaactactggagaacgccgagaaaagtttaaacgacatgtttgttaggacatacggaatgctgtacatgcagaatagtgaggtgttccaagatctatttactgagctgaaacggtattataccggcggaaatgtgaaccttgaggagatgctgaatgacttctgggctcgtctcctggagagaatgttccagttaataaaccctcagtaccacttttccgaagactatctggagtgtgtaagtaaatacacagaccagctaaaaccgtttggggatgtaccccgtaagcttaagattcaggtgacgagagccttcatcgctgcaagaacgtttgtgcagggtctgacagtgggcagggaagttgccaacagggtgtcaaaggtgtcacccactcctgggtgcatccgggctctgatgaaaatgctctactgtccttactgccgcggacttcccaccgtgcggccatgcaacaactactgcctcaatgtcatgaaaggatgcttggctaaccaggcggatttagataccgagtggaatctctttatcgatgcgatgctcctggtggctgaaaggttggaaggcccatttaacatcgaatcagtcatggaccctatcgatgtcaagatctcagaggcgataatgaacatgcaggagaatagcatgcaggtctccgccaaggtgtttcaaggatgcgggcagcctaagcctgctccagccctaaggtctgcgcgtagtgcacctgagaatttcaacactcgctttcggccttacaatcctgaagaaaggcccaccacagcagcgggtacctcactggataggcttgtgactgacattaaagagaagctcaagctgagcaaaaaagtgtggagcgcactcccatataccatttgtaaggatgaatctgtaaccgcgggaactagcaacgaagaggaatgttggaatggccattccaaagcacggtacctgcctgagatcatgaatgacggacttacaaatcagatcaataaccctgaggtggacgtcgacatcacacgaccagacaccttcatccgccagcagattatggccctgcgggtcatgacgaacaagcttaaaaacgcctacaacggaaacgatgtcaatttccaggacacgagcgatgagagctctggctccggcagtggatcaggctgcatggacgacgtctgtcctacagagtttgaattcgtgacaacagaggctcccgctgtggaccctgataggcgcgaggtggattccagcgcagcccagcgagggcatagcctgttaagctggtcattgacatgcatcgtgctggcgcttcagcggctgtgcaggtag

SEQ ID NO: 158639 - DNA, 1668 bp, Artificial Sequence
  derived and/or modified sequence
atgcccagctggatcggcgccgtgatcctgcccctgctgggcctgctgctgagcctgcccgccggcgccgacgtgaaggccagaagctgcggcgaggtgagacaggcctacggcgccaagggcttcagcctggccgacatcccctaccaggagatcgccggcgagcacctgagaatctgcccccaggagtacacctgctgcaccaccgagatggaggacaagctgagccagcagagcaagctggagttcgagaacctggtggaggagaccagccacttcgtgagaaccaccttcgtgagcagacacaagaagttcgacgagttcttcagagagctgctggagaacgccgagaagagcctgaacgacatgttcgtgagaacctacggcatgctgtacatgcagaacagcgaggtgttccaggacctgttcaccgagctgaagagatactacaccggcggcaacgtgaacctggaggagatgctgaacgacttctgggccagactgctggagagaatgttccagctgatcaacccccagtaccacttcagcgaggactacctggagtgcgtgagcaagtacaccgaccagctgaagcccttcggcgacgtgcccagaaagctgaagatccaggtgaccagagccttcatcgccgccagaaccttcgtgcagggcctgaccgtgggcagagaggtggccaacagagtgagcaaggtgagccccacccccggctgcatcagagccctgatgaagatgctgtactgcccctactgcagaggcctgcccaccgtgagaccctgcaacaactactgcctgaacgtgatgaagggctgcctggccaaccaggccgacctggacaccgagtggaacctgttcatcgacgccatgctgctggtggccgagagactggagggccccttcaacatcgagagcgtgatggaccccatcgacgtgaagatcagcgaggccatcatgaacatgcaggagaacagcatgcaggtgagcgccaaggtgttccagggctgcggccagcccaagcccgcccccgccctgagaagcgccagaagcgcccccgagaacttcaacaccagattcagaccctacaaccccgaggagagacccaccaccgccgccggcaccagcctggacagactggtgaccgacatcaaggagaagctgaagctgagcaagaaggtgtggagcgccctgccctacaccatctgcaaggacgagagcgtgaccgccggcaccagcaacgaggaggagtgctggaacggccacagcaaggccagatacctgcccgagatcatgaacgacggcctgaccaaccagatcaacaaccccgaggtggacgtggacatcaccagacccgacaccttcatcagacagcagatcatggccctgagagtgatgaccaacaagctgaagaacgcctacaacggcaacgacgtgaacttccaggacaccagcgacgagagcagcggcagcggcagcggcagcggctgcatggacgacgtgtgccccaccgagttcgagttcgtgaccaccgaggcccccgccgtggaccccgacagaagagaggtggacagcagcgccgcccagagaggccacagcctgctgagctggagcctgacctgcatcgtgctggccctgcagagactgtgcagatag

SEQ ID NO: 158640 - protein, 552 aa, Artificial Sequence
  derived and/or modified sequence
MDRKVAREFRHKVDFLIENDAEKDYLYDVLRMYHQTMDVAVLVGDLKLVINEPSRLPLFDAIRPLIPLKHQVEYDQLTPRRSRKLKEVRLDRLHPEGLGLSVRGGLEFGCGLFISHLIKGGQADSVGLQVGDEIVRINGYSISSCTHEEVINLIRTKKTVSIKVRHIGLIPVKSSPDEPLTWQYVDQFVSESGGVRGSLGSPGNRENKEKKVFISLVGSRGLGCSISSGPIQKPGIFISHVKPGSLSAEVGLEIGDQIVEVNGVDFSNLDHKEAVNVLKSSRSLTISIVAAAGRELFMTDRERLAEARQRELQRQELLMQKRLAMESNKILQEQQEMERQRRKEIAQKAAEENERYRKEMEQIVEEEEKFKKQWEEDWGSKEQLLLPKTITAEVHPVPLRKPKYDQGVEPELEPADDLDGGTEEQGEQDFRKYEEGFDPYSMFTPEQIMGKDVRLLRIKKEGSLDLALEGGVDSPIGKVVVSAVYERGAAERHGGIVKGDEIMAINGKIVTDYTLAEAEAALQKAWNQGGDWIDLVVAVCPPKEYDDELTFF

SEQ ID NO: 158641 - protein, 521 aa, Artificial Sequence
  derived and/or modified sequence
MYHQTMDVAVLVGDLKLVINEPSRLPLFDAIRPLIPLKHQVEYDQLTPRRSRKLKEVRLDRLHPEGLGLSVRGGLEFGCGLFISHLIKGGQADSVGLQVGDEIVRINGYSISSCTHEEVINLIRTKKTVSIKVRHIGLIPVKSSPDEPLTWQYVDQFVSESGGVRGSLGSPGNRENKEKKVFISLVGSRGLGCSISSGPIQKPGIFISHVKPGSLSAEVGLEIGDQIVEVNGVDFSNLDHKEAVNVLKSSRSLTISIVAAAGRELFMTDRERLAEARQRELQRQELLMQKRLAMESNKILQEQQEMERQRRKEIAQKAAEENERYRKEMEQIVEEEEKFKKQWEEDWGSKEQLLLPKTITAEVHPVPLRKPKYDQGVEPELEPADDLDGGTEEQGEQDFRKYEEGFDPYSMFTPEQIMGKDVRLLRIKKEGSLDLALEGGVDSPIGKVVVSAVYERGAAERHGGIVKGDEIMAINGKIVTDYTLAEAEAALQKAWNQGGDWIDLVVAVCPPKEYDDELTFF

SEQ ID NO: 158642 - DNA, 1659 bp, Artificial Sequence
  derived and/or modified sequence
atggacagaaaggtggccagagagttcagacacaaggtggacttcctgatcgagaacgacgccgagaaggactacctgtacgacgtgctgagaatgtaccaccagaccatggacgtggccgtgctggtgggcgacctgaagctggtgatcaacgagcccagcagactgcccctgttcgacgccatcagacccctgatccccctgaagcaccaggtggagtacgaccagctgacccccagaagaagcagaaagctgaaggaggtgagactggacagactgcaccccgagggcctgggcctgagcgtgagaggcggcctggagttcggctgcggcctgttcatcagccacctgatcaagggcggccaggccgacagcgtgggcctgcaggtgggcgacgagatcgtgagaatcaacggctacagcatcagcagctgcacccacgaggaggtgatcaacctgatcagaaccaagaagaccgtgagcatcaaggtgagacacatcggcctgatccccgtgaagagcagccccgacgagcccctgacctggcagtacgtggaccagttcgtgagcgagagcggcggcgtgagaggcagcctgggcagccccggcaacagagagaacaaggagaagaaggtgttcatcagcctggtgggcagcagaggcctgggctgcagcatcagcagcggccccatccagaagcccggcatcttcatcagccacgtgaagcccggcagcctgagcgccgaggtgggcctggagatcggcgaccagatcgtggaggtgaacggcgtggacttcagcaacctggaccacaaggaggccgtgaacgtgctgaagagcagcagaagcctgaccatcagcatcgtggccgccgccggcagagagctgttcatgaccgacagagagagactggccgaggccagacagagagagctgcagagacaggagctgctgatgcagaagagactggccatggagagcaacaagatcctgcaggagcagcaggagatggagagacagagaagaaaggagatcgcccagaaggccgccgaggagaacgagagatacagaaaggagatggagcagatcgtggaggaggaggagaagttcaagaagcagtgggaggaggactggggcagcaaggagcagctgctgctgcccaagaccatcaccgccgaggtgcaccccgtgcccctgagaaagcccaagtacgaccagggcgtggagcccgagctggagcccgccgacgacctggacggcggcaccgaggagcagggcgagcaggacttcagaaagtacgaggagggcttcgacccctacagcatgttcacccccgagcagatcatgggcaaggacgtgagactgctgagaatcaagaaggagggcagcctggacctggccctggagggcggcgtggacagccccatcggcaaggtggtggtgagcgccgtgtacgagagaggcgccgccgagagacacggcggcatcgtgaagggcgacgagatcatggccatcaacggcaagatcgtgaccgactacaccctggccgaggccgaggccgccctgcagaaggcctggaaccagggcggcgactggatcgacctggtggtggccgtgtgcccccccaaggagtacgacgacgagctgaccttcttctag

SEQ ID NO: 158643 - DNA, 1566 bp, Artificial Sequence
  derived and/or modified sequence
atgtaccaccagaccatggacgtggccgtgctggtgggcgacctgaagctggtgatcaacgagcccagcagactgcccctgttcgacgccatcagacccctgatccccctgaagcaccaggtggagtacgaccagctgacccccagaagaagcagaaagctgaaggaggtgagactggacagactgcaccccgagggcctgggcctgagcgtgagaggcggcctggagttcggctgcggcctgttcatcagccacctgatcaagggcggccaggccgacagcgtgggcctgcaggtgggcgacgagatcgtgagaatcaacggctacagcatcagcagctgcacccacgaggaggtgatcaacctgatcagaaccaagaagaccgtgagcatcaaggtgagacacatcggcctgatccccgtgaagagcagccccgacgagcccctgacctggcagtacgtggaccagttcgtgagcgagagcggcggcgtgagaggcagcctgggcagccccggcaacagagagaacaaggagaagaaggtgttcatcagcctggtgggcagcagaggcctgggctgcagcatcagcagcggccccatccagaagcccggcatcttcatcagccacgtgaagcccggcagcctgagcgccgaggtgggcctggagatcggcgaccagatcgtggaggtgaacggcgtggacttcagcaacctggaccacaaggaggccgtgaacgtgctgaagagcagcagaagcctgaccatcagcatcgtggccgccgccggcagagagctgttcatgaccgacagagagagactggccgaggccagacagagagagctgcagagacaggagctgctgatgcagaagagactggccatggagagcaacaagatcctgcaggagcagcaggagatggagagacagagaagaaaggagatcgcccagaaggccgccgaggagaacgagagatacagaaaggagatggagcagatcgtggaggaggaggagaagttcaagaagcagtgggaggaggactggggcagcaaggagcagctgctgctgcccaagaccatcaccgccgaggtgcaccccgtgcccctgagaaagcccaagtacgaccagggcgtggagcccgagctggagcccgccgacgacctggacggcggcaccgaggagcagggcgagcaggacttcagaaagtacgaggagggcttcgacccctacagcatgttcacccccgagcagatcatgggcaaggacgtgagactgctgagaatcaagaaggagggcagcctggacctggccctggagggcggcgtggacagccccatcggcaaggtggtggtgagcgccgtgtacgagagaggcgccgccgagagacacggcggcatcgtgaagggcgacgagatcatggccatcaacggcaagatcgtgaccgactacaccctggccgaggccgaggccgccctgcagaaggcctggaaccagggcggcgactggatcgacctggtggtggccgtgtgcccccccaaggagtacgacgacgagctgaccttcttctag

SEQ ID NO: 158644 - DNA, 1659 bp, Artificial Sequence
  derived and/or modified sequence
atggatcgcaaagtggcacgcgagtttcgtcacaaggtggactttctgattgagaatgatgcggagaaggactacttgtatgacgtgcttcggatgtatcaccagaccatggacgtcgctgtactcgtgggcgatctgaagctcgtgattaatgaaccatcacggctgccgctgttcgatgctattcgtccactgatcccgctgaagcaccaggtcgaatacgatcagctgaccccacgcaggagcagaaagctgaaagaggttcgactggaccgtctccaccctgaggggctgggactgagcgtgagaggcggattggagtttggctgtggactcttcattagccacctgatcaaaggaggccaggcggacagtgttggactgcaggtgggggacgaaatcgtaaggatcaatgggtactcaatttcttcctgtacgcacgaggaagtgattaacctaatcaggaccaaaaaaacagtgtccatcaaggtgcgccacatagggttaataccggtgaagagttcaccagacgagccactcacatggcaatacgtggaccagtttgtttctgaaagtggaggggtgcgcggaagtctcggatcccccggaaacagagaaaacaaggagaagaaagtgtttatcagcctagtgggtagtcgcggcttaggctgcagtatatccagcggccctatacaaaagcccggcatctttatctctcacgtaaaacccgggagcctttccgccgaggtgggattagaaattggcgatcagatcgttgaggtgaacggcgtcgatttctccaacctcgatcacaaagaggccgtaaatgtactcaaaagtagtagaagcttaacgattagcatagtggccgccgccggacgggaactttttatgacagatagagagcggctggccgaggcgaggcagagggagcttcagcgccaagagctgctgatgcagaagcggctagccatggaatccaacaaaatactgcaggaacagcaggaaatggaacgccagaggcgtaaggagattgcccagaaagccgctgaagagaacgaacggtataggaaagagatggagcagattgttgaggaggaggagaaattcaagaagcagtgggaggaggactgggggagcaaggagcagctcctcttgcctaagactataacagctgaagtccacccagtcccgcttcgcaagccaaagtatgatcaaggagtcgaaccagaactggagcctgccgacgacttggacggcgggacggaagagcagggggaacaggacttccgaaagtacgaagagggcttcgatccgtatagtatgtttacccctgagcagataatggggaaagatgtgaggctgctccgcatcaagaaggagggatccctcgacctggcacttgagggcggcgtggattcccccatcggaaaagtcgtggtgagcgccgtatatgagcgcggagcagctgagcgtcacggtggaattgtgaagggcgatgaaattatggcaatcaatggaaaaatcgttactgactacacattggctgaagcagaggccgccctccagaaagcgtggaatcagggcggggactggatcgacctggtcgtagccgtgtgccctcccaaagagtacgatgacgagctgacctttttctag

SEQ ID NO: 158645 - DNA, 1566 bp, Artificial Sequence
  derived and/or modified sequence
atgtatcaccagacgatggacgtcgccgtgctggtaggggacctgaagttggtgatcaatgaaccctctagactccctctgtttgacgctattcggcccctgatccccctgaagcaccaagttgagtatgaccagctgactccgcgacggtcgaggaagctcaaggaggtgcgcctagacagactgcacccagaaggactgggactttctgtaaggggcggtttggagttcggatgtggcctgttcatcagccaccttatcaagggcggccaggctgactcggttggcctgcaggtgggggatgagattgttcgaattaacggatactcaatctcttcttgcacccacgaggaggtgatcaatctgattcgcaccaaaaagacagtttccattaaggtgcgtcacataggccttattcccgttaaatcctcccctgacgaacccctgacctggcagtatgtggatcagttcgtgtccgaaagcggcggagtcaggggcagcttgggatccccagggaacagggagaacaaagagaagaaagttttcatttctctggtcggaagtcgtgggctgggctgctcaatatcatctggaccgatccagaaacctggaatctttataagtcacgtgaaacctggcagcctctctgccgaagtcggcttggagatcggcgatcagatcgtcgaggtaaatggagttgatttttcaaacttagaccacaaggaggccgtcaacgtgctgaaaagctcacgttcattgaccatatcaatcgtggccgctgccggacgggagctgttcatgacagatagggagcggctcgccgaagccagacagagagagctccagagacaggaactgttaatgcagaaacggctggccatggagagcaataagattcttcaggaacagcaagaaatggagagacaaagacgcaaagagatagctcaaaaagcggccgaagagaacgaacgttatcgaaaagaaatggagcagattgtggaagaggaggaaaagttcaagaagcagtgggaggaagattggggatcaaaggaacaactcttgctgcctaagaccattaccgccgaagttcatccagttccactgagaaagcccaagtatgatcagggcgtggaacctgagctggagccagctgatgacctggatggggggacagaagaacagggcgagcaggactttaggaaatatgaggagggttttgatccctactcgatgtttacacctgagcagattatgggaaaggatgtgcggttactaaggataaagaaggaaggcagtcttgacttggcacttgaagggggcgtggactcccctatagggaaggtggtggttagcgccgtgtacgaacgtggcgctgccgagcgacatggtggcatagtgaagggcgacgagatcatggccatcaacggaaagattgtgaccgattacactttagctgaggctgaagccgctcttcagaaggcttggaatcaaggcggagattggatcgacctggtggtggccgtgtgccctcccaaggaatacgatgatgaactgacattcttctag

SEQ ID NO: 158646 - DNA, 1659 bp, Artificial Sequence
  derived and/or modified sequence
atggacaggaaggtggcccgggagttccgccacaaggtggacttcctgattgaaaatgatgctgagaaggactacctgtatgatgtgctgaggatgtaccaccagaccatggatgtggccgtgctggtgggggacctgaagctggtgatcaatgagcccagccggctgcccctgtttgatgccatccggcccctcatccccctgaagcaccaggtggagtatgaccagctgaccccccggcgcagcaggaagctgaaggaggtgcggctggaccggctgcaccctgagggcctgggcctgtctgtgcggggcggcctggagtttggctgcggcctcttcatcagccacctgatcaagggcggccaggccgacagcgtgggcctgcaggtgggagatgagatcgtgcgcatcaatggctacagcatcagcagctgcacccatgaggaggtgatcaacctgatccgcaccaagaagacagtgtccatcaaggtgcgccacatcggcctcatccctgtgaagagcagcccagatgagcccctgacctggcagtatgtggaccagtttgtgtctgagagcggcggcgtgcggggcagcctgggcagccctggcaaccgggagaacaaggagaagaaggtgttcatcagcctggtgggcagccggggcctgggctgcagcatcagcagcggccccatccagaagccaggcatcttcatcagccacgtgaagccaggcagcctgtctgctgaggtgggcctggagatcggggaccagatcgtggaggtgaatggagtggacttcagcaacctggaccacaaggaggccgtgaatgtgctgaagagcagccgcagcctgaccatcagcatcgtggccgccgccggccgggagctgttcatgacagaccgggagcggctggccgaggcccggcagcgggagctgcagaggcaggagctgctgatgcagaagaggctggccatggagagcaacaagatcctgcaggagcagcaggagatggagcggcagaggaggaaggagatcgcccagaaggctgctgaggagaatgaaagatacaggaaggagatggagcagatcgtggaggaggaggagaagttcaagaagcagtgggaggaggactggggcagcaaggagcagctgctgctgcccaagaccatcacagctgaggtgcaccctgtgcccctgaggaagcccaagtatgaccagggcgtggagcctgagctggagccagcagatgacctggatggcggcacagaggagcagggcgagcaggacttcagaaaatatgaggagggctttgacccctacagcatgttcaccccagagcagatcatgggcaaggatgtgcggctgctgcgcatcaagaaggagggcagcctggacctggccctggagggcggcgtggacagccccatcggcaaggtggtggtgtctgctgtgtatgaaagaggagctgctgagagacatggaggcatcgtgaagggagatgagatcatggccatcaacgggaagatcgtgacagactacaccctggccgaggccgaggccgccctgcagaaggcctggaaccagggcggggactggattgacctggtggtggccgtgtgcccccccaaggagtatgatgatgagctgaccttcttctag

SEQ ID NO: 158647 - DNA, 1566 bp, Artificial Sequence
  derived and/or modified sequence
atgtaccaccagaccatggatgtggccgtgctggtgggggacctgaagctggtgatcaatgagcccagccggctgcccctgtttgatgccatccggcccctcatccccctgaagcaccaggtggagtatgaccagctgaccccaagaagaagcaggaagctgaaggaggtgcggctggaccggctgcaccctgagggcctgggcctgtctgtgcggggcggcctggagtttggctgcggcctcttcatcagccacctgatcaagggcggccaggccgacagcgtgggcctgcaggtgggagatgaaattgtgcgcatcaatggctacagcatcagcagctgcacccatgaggaggtgatcaacctgatccgcaccaagaagacagtgtccatcaaggtgcgccacatcggcctcatccctgtgaagagcagcccagatgagcccctgacctggcagtatgtggaccagtttgtgtctgagagcggaggagtgcggggcagcctgggcagccctggcaaccgggagaacaaggagaagaaggtgttcatcagcctggtgggcagccggggcctgggctgcagcatcagcagcggccccatccagaagccaggcatcttcatcagccacgtgaagccaggcagcctgtctgctgaggtgggcctggagattggagaccagatcgtggaggtgaatggagtggacttcagcaacctggaccacaaggaggccgtgaatgtgctgaagagcagccgcagcctgaccatcagcatcgtggccgctgctggccgggagctgttcatgacagaccgggagcggctggccgaggcccggcagcgggagctgcagaggcaggagctgctgatgcagaagaggctggccatggagagcaacaagatcctgcaggagcagcaggagatggagcggcagaggaggaaggagatcgcccagaaggctgctgaagaaaatgaaagatacaggaaggagatggagcagatcgtggaggaggaggagaagttcaagaagcagtgggaggaggactggggcagcaaggagcagctgctgctgcccaagaccatcacagctgaggtgcaccctgtgcccctgaggaagcccaagtatgaccagggcgtggagcctgagctggagccagcagatgacctggatggcggcacagaggagcagggcgagcaggacttcagaaaatatgaggagggctttgacccctacagcatgttcaccccagagcagatcatgggcaaggatgtgcggctgctgcgcatcaagaaggagggcagcctggacctggccctggagggcggcgtggacagccccatcggcaaggtggtggtgtctgctgtgtatgaaagaggagctgctgagcggcacggcggcatcgtgaagggagatgagatcatggccatcaatggcaagatcgtgacagactacaccctggccgaggccgaggccgccctgcagaaggcctggaaccagggcggggactggattgacctggtggtggccgtgtgcccccccaaggagtatgatgatgagctgaccttcttctag

SEQ ID NO: 158648 - DNA, 1659 bp, Artificial Sequence
  derived and/or modified sequence
atggaccggaaggtggcccgggagttccggcacaaggtggacttcctcatcgagaatgacgcagagaaggactacttgtatgatgttttgcgaatgtaccaccagacaatggacgtggcggtgttggtcggagacctcaaattggtgataaacgagccttctaggctgccattgttcgatgcaatccggcccctcatccccctaaagcaccaggtcgaatacgatcaattaacacctcgaaggtctcggaagttgaaggaggtgcggctggaccgtctgcatcctgaagggctgggtctgtctgtccggggaggcctggagttcggttgtggcctgtttatttcacacctgatcaagggtgggcaagctgactctgtggggctgcaggtgggggatgagatcgtgcgaatcaacggttattcaataagtagttgtacccatgaggaggtgatcaacctaattaggactaaaaaaaccgtgagtatcaaggtcagacacattggtttgatccccgtgaaaagctcgccagatgagcccctgacatggcagtacgtggatcaattcgtttcggaatccggcggggtacggggttccctgggaagccccggcaatagggagaataaggagaagaaagtattcataagtctagtggggtcccgcggcttgggatgcagtattagttcaggaccaattcagaagccaggcatatttattagtcacgtcaaaccggggagtctgtcagccgaagtcggactggagatcggggaccaaatcgtcgaggtcaatggcgtcgactttagcaacctcgaccataaggaagctgtgaacgtgctaaaaagcagccggtctctaacaatctcgatcgtggctgcagccgggagagagctgttcatgactgatcgggaaagacttgccgaggctcggcagcgagaacttcagcgccaggagctgctcatgcagaagaggctcgcaatggaatcgaataagatactccaggagcagcaggagatggagaggcagcggcgtaaggagatcgcgcagaaagccgcagaagagaatgaacgttatcgaaaggaaatggaacaaatagtggaggaagaggagaagtttaaaaaacagtgggaggaggattgggggtcgaaagagcagttgttactacccaaaacaattaccgcagaagtgcaccccgtccccctgcgcaagccgaagtacgatcagggcgtggaacctgagctcgagccagcggacgacctggacggtggaaccgaggagcaaggggagcaggactttcgcaaatacgaggaaggttttgacccatactctatgtttactccggaacaaatcatgggcaaggacgtacgcctcctgagaatcaaaaaagaaggttctttggatcttgctctggaggggggggtggatagtcccattgggaaggttgtagtgtccgcggtttacgaacgcggagctgccgagcggcacggtgggatcgtcaaaggcgacgaaattatggccatcaatggaaaaatcgtcaccgattacaccttggcagaggcggaagccgccctccagaaggcgtggaatcaaggaggagattggatcgacctggtcgtagccgtgtgccctccaaaagagtatgacgacgagttgacctttttctag

SEQ ID NO: 158649 - DNA, 1566 bp, Artificial Sequence
  derived and/or modified sequence
atgtaccaccagaccatggacgtggccgtgctggtgggcgacctgaagctcgtgatcaatgagccctcacggcttcctctgtttgacgcgatccgtccattgatccccctaaagcatcaagttgaatatgatcagctgacgcctaggcggtcacgcaaattaaaagaggttcggctagaccgcttacaccccgaagggctcggactgtctgtaagaggtggattagagttcgggtgtgggctcttcattagccatctgataaaaggcggtcaggctgattccgtaggcctgcaagttggtgacgaaattgtgcgcataaacggatactccatttcctcctgcacccacgaggaagtaatcaacctgattcggacgaaaaagaccgtgagcattaaagtgcggcatattggactgatccctgttaaatcctctcctgatgagcctctcacttggcaatacgtggatcagtttgtctcagagtctggcggggtcagaggctccttgggatctccaggcaacagagaaaataaggaaaaaaaagtgttcatctcactggtgggcagcagggggctgggttgctccatctcatccggaccgatccagaagcctggtattttcatttctcacgtgaaaccaggcagcctatctgccgaggtaggcctcgaaataggagaccaaatcgtggaagtcaacggcgtagatttttcgaacctggatcacaaagaagcggtgaacgtgctcaagagcagccgatcgctgaccatcagtatcgtggcggccgcggggcgcgagttattcatgacagatcgagaaagactggccgaggctaggcaacgcgaattgcaaagacaagaattgctgatgcagaagcggctggccatggagagtaacaaaattctgcaggagcagcaggagatggagaggcagcggcgcaaagaaattgctcagaaggccgcagaagagaatgaacgttatcgtaaggagatggaacagattgttgaagaggaggaaaaatttaagaaacagtgggaggaagattggggaagcaaagaacagcttctgctaccaaaaactattaccgcagaagtacacccagtgcccctgaggaagcctaagtatgatcagggggttgaacccgagttagagcctgcagacgacttagacggtggaaccgaagagcagggtgagcaagactttagaaaatacgaagagggtttcgacccatactcaatgttcacacctgaacaaattatgggaaaggatgtaagactgctaaggattaaaaaagaaggcagcctcgacctggccctggagggcggggtagactctcccatcggaaaggtggtcgtgagcgctgtgtacgaaagaggggcagctgagaggcatggtgggatagtaaagggcgacgaaatcatggccattaacggtaagatcgtcacagactacaccctagccgaagccgaagccgccctgcagaaggcctggaatcagggcggagactggattgatctagttgtggccgtctgccctccaaaggagtacgatgacgagttgacctttttctag

SEQ ID NO: 158650 - DNA, 1659 bp, Artificial Sequence
  derived and/or modified sequence
atggaccggaaggttgcaagagaatttaggcataaggttgatttcctcatcgagaatgatgcagagaaggactacctgtatgacgttcttaggatgtatcaccaaacaatggatgtcgccgtcctggttggtgacctgaaactagtcatcaatgaaccttctcgtctcccgttgtttgacgccattagaccgctcatcccactgaaacaccaggttgagtatgaccagctgaccccacggcgtagtaggaaactgaaagaggtcaggttggatagactccaccccgaggggctgggactgtctgttaggggcggactggagtttggatgcgggctttttatttctcatctgattaaagggggacaggcggattccgtcggcttgcaggtaggagacgagatcgtccggattaacggttacagcattagcagctgcacccatgaggaagtcataaaccttataagaacgaagaaaacggtgtccatcaaagtccggcatattggtctcatccctgtgaaaagttcacctgatgaaccactgacctggcagtacgtcgatcaatttgtgagtgaaagtggaggagtcagaggttctctgggcagcccaggcaaccgggagaataaagagaagaaggtattcatctctctcgtggggagtcgcggactcggatgctccataagcagcggccctatccaaaagccaggaatctttatctctcacgtcaagcctggatctttgtccgccgaggtgggactggaaatcggtgaccaaatcgtggaagtaaatggggtggacttcagtaacctcgatcataaagaggctgtaaacgtcttgaagtcaagtcgttccctgacaataagtatagtggcggctgcgggacgggaactatttatgacggatagggaacgcctggccgaggccagacagcgggaattgcaaagacaggagctgcttatgcagaagcggttggccatggagtctaataaaatactccaggagcagcaagagatggaaagacaaaggcgaaaagaaatagctcaaaaggccgctgaggagaacgagcgttatagaaaggagatggagcagattgttgaagaagaggaaaaattcaagaagcaatgggaggaggattggggatccaaggaacagctcctgctcccaaagaccattaccgccgaggtgcatcctgtgcctctgagaaagccgaaatatgatcaaggagttgagcctgaacttgaacccgcagacgaccttgatggcggaaccgaggagcaaggggaacaagacttcaggaaatacgaggaggggttcgacccctactctatgtttacgcccgaacaaattatgggaaaggatgtgaggttgctccggattaagaaggagggaagtctggatctggctctggaaggtggggtggattcgccgatcggcaaggttgtggtgagtgcagtatatgaaaggggtgccgcagaacgtcacggcggaattgtcaaaggcgacgagatcatggcaattaacggtaaaatcgtcaccgattatactcttgccgaggccgaagcggcattgcagaaagcctggaaccaaggcggagattggatcgatcttgtggttgcggtttgcccaccgaaagagtacgatgacgagcttactttcttctag

SEQ ID NO: 158651 - DNA, 1566 bp, Artificial Sequence
  derived and/or modified sequence
atgtaccaccaaactatggacgtcgcagttttggtaggtgacctcaaactggtgattaacgagccgagccggctgcctctgtttgatgccatccggcctctaatcccgcttaagcatcaagtggagtacgaccagctgactccacggagaagccgcaagttaaaagaagtgagactcgaccggctgcatccggagggactgggtctgtccgtacgaggtggcctggaattcggttgcggactctttatttctcacttaatcaagggcggtcaagctgattctgtaggccttcaagtgggagatgagatagtgcggatcaacggctactccatcagcagctgtactcacgaagaagtaatcaatctcatccgaacaaagaagactgtgtccattaaagtgcgccatattgggctgattcccgttaagagttctcctgatgagcccttaacgtggcagtacgtagaccagtttgtgtccgaatccgggggagtgcgaggaagccttggaagtccaggtaaccgtgagaacaaggagaaaaaagttttcatatccctggtcggctccaggggactgggatgcagtatttcttcaggcccaattcagaaaccaggtattttcatcagtcacgtcaaacccggtagcctcagcgcagaagtcggtttggagatcggagatcagattgtggaagtgaacggtgtagatttcagcaatcttgaccacaaagaggctgttaatgtcctaaaatcttctagatcacttacgattagcatcgtggcagccgctggaagagaacttttcatgacagacagagagcgactggccgaggctagacagcgcgaactgcaacgccaggaactgcttatgcagaaaagactggcaatggagtccaacaagattctgcaggagcagcaggagatggaaaggcagcgaagaaaagagattgcccaaaaagccgctgaggagaacgaaagataccgaaaagagatggagcaaatagtggaagaggaggagaaatttaagaaacaatgggaggaagactggggaagcaaggagcagttactgcttcctaagaccatcaccgctgaggtgcatccagttccactgagaaagcccaaatatgaccagggcgtagaacctgaactggaacccgcagacgaccttgacgggggtaccgaggagcagggagaacaagattttcgcaaatatgaggagggttttgatccatacagcatgtttactcctgagcagattatgggcaaggatgtccgcctgttacgcataaagaaagagggcagtctggacctggcacttgaaggcggtgtggattcaccaatcggcaaagtggttgttagcgctgtttacgagagaggagccgctgagcggcacggtgggatcgttaaaggtgacgaaatcatggccataaatggcaagatagtcactgattatacactcgcagaggcagaggctgctctgcaaaaggcgtggaaccaaggcggtgactggatagatctggtcgtggctgtatgtccgccaaaggagtacgacgacgagctcaccttcttctag

SEQ ID NO: 158652 - DNA, 2237 bp, Artificial Sequence
  derived and/or modified sequence
agctccgagggcggctggcccggtcgcggtcgcggctctttccagctcctggcagccgggcacccgaaggaacgggtcgtgcaacgacgcagctggacctggcccagccatggaccgaaaagtggcccgagaattccggcataaggtggattttctgattgaaaatgatgcagagaaggactatctctatgatgtgctgcgaatgtaccaccagaccatggacgtggccgtgctcgtgggagacctgaagctggtcatcaatgaacccagccgtctgcctctgtttgatgccattcggccgctgatcccactgaagcaccaggtggaatatgatcagctgaccccccggcgctccaggaagctgaaggaggtgcgtctggaccgtctgcaccccgaaggcctcggcctgagtgtgcgtggtggcctggagtttggctgtgggctcttcatctcccacctcatcaaaggcggtcaggcagacagcgtcgggctccaggtaggggacgagatcgtccggatcaatggatattccatctcctcctgtacccatgaggaggtcatcaacctcattcgaaccaagaaaactgtgtccatcaaagtgagacacatcggcctgatccccgtgaaaagctctcctgatgagcccctcacttggcagtatgtggatcagtttgtgtcggaatctgggggcgtgcgaggcagcctgggctcccctggaaatcgggaaaacaaggagaagaaggtcttcatcagcctggtaggctcccgaggccttggctgcagcatttccagcggccccatccagaagcctggcatctttatcagccatgtgaaacctggctccctgtctgctgaggtgggattggagataggggaccagattgtcgaagtcaatggcgtcgacttctctaacctggatcacaaggaggctgtaaatgtgctgaagagtagccgcagcctgaccatctccattgtagctgcagctggccgggagctgttcatgacagaccgggagcggctggcagaggcgcggcagcgtgagctgcagcggcaggagcttctcatgcagaagcggctggcgatggagtccaacaagatcctccaggagcagcaggagatggagcggcaaaggagaaaagaaattgcccagaaggcagcagaggaaaatgagagataccggaaggagatggaacagattgtagaggaggaagagaagtttaagaagcaatgggaagaagactggggctcaaaggaacagctactcttgcctaaaaccatcactgctgaggtacacccagtaccccttcgcaagccaaagtatgatcagggagtggaacctgagctcgagcccgcagatgacctggatggaggcacggaggagcagggagagcaggatttccggaaatatgaggaaggctttgacccctactctatgttcaccccagagcagatcatggggaaggatgtccggctcctacgcatcaagaaggagggatccttagacctggccctggaaggcggtgtggactcccccattgggaaggtggtcgtttctgctgtgtatgagcggggagctgctgagcggcatggtggcattgtgaaaggggacgagatcatggcaatcaacggcaagattgtgacagactacaccctggctgaggctgaggctgccctgcagaaggcctggaatcagggcggggactggatcgaccttgtggttgccgtctgccccccaaaggagtatgacgatgagctgaccttcttctgaagtccaaaaggggaaaccaaattcaccgttaggaaacagtgagctccggccccacctcgtgaacacaaagcctcggatcagccttgagagaggccacactacacacaccagatggcatccttgggacctgaatctatcacccaggaatctcaaactccctttggccctgaaccagggccagataaggaacagctcgggccactcttctgaaggccaacgtggaggaaagggagcagccagccatttgggagaagatctcaaggatccagactctcattcctttcctctggcccagtgaatttggtctctcccagctctgggggactccttccttgaaccctaataagaccccactggagtctctctctctccatccctctcctctgccctctgctctaattgctgccaggattgtcactccaaaccttactctgagctcattaataaaatagatttattttccagctta

SEQ ID NO: 158653 - DNA, 2278 bp, Artificial Sequence
  derived and/or modified sequence
gtggtctgcataggtctgatgcattggggtcagaggggcagcctggcctgtggctcctcttctctcctcacaactccagccctgaaaagctgctggggaggcccttggggatgacctctcctccctgaggtctgctatgggggcgggtgctgagcctggagctgtgattctgctattggattttccaggtggattttctgattgaaaatgatgcagagaaggactatctctatgatgtgctgcgaatgtaccaccagaccatggacgtggccgtgctcgtgggagacctgaagctggtcatcaatgaacccagccgtctgcctctgtttgatgccattcggccgctgatcccactgaagcaccaggtggaatatgatcagctgaccccccggcgctccaggaagctgaaggaggtgcgtctggaccgtctgcaccccgaaggcctcggcctgagtgtgcgtggtggcctggagtttggctgtgggctcttcatctcccacctcatcaaaggcggtcaggcagacagcgtcgggctccaggtaggggacgagatcgtccggatcaatggatattccatctcctcctgtacccatgaggaggtcatcaacctcattcgaaccaagaaaactgtgtccatcaaagtgagacacatcggcctgatccccgtgaaaagctctcctgatgagcccctcacttggcagtatgtggatcagtttgtgtcggaatctgggggcgtgcgaggcagcctgggctcccctggaaatcgggaaaacaaggagaagaaggtcttcatcagcctggtaggctcccgaggccttggctgcagcatttccagcggccccatccagaagcctggcatctttatcagccatgtgaaacctggctccctgtctgctgaggtgggattggagataggggaccagattgtcgaagtcaatggcgtcgacttctctaacctggatcacaaggaggctgtaaatgtgctgaagagtagccgcagcctgaccatctccattgtagctgcagctggccgggagctgttcatgacagaccgggagcggctggcagaggcgcggcagcgtgagctgcagcggcaggagcttctcatgcagaagcggctggcgatggagtccaacaagatcctccaggagcagcaggagatggagcggcaaaggagaaaagaaattgcccagaaggcagcagaggaaaatgagagataccggaaggagatggaacagattgtagaggaggaagagaagtttaagaagcaatgggaagaagactggggctcaaaggaacagctactcttgcctaaaaccatcactgctgaggtacacccagtaccccttcgcaagccaaagtatgatcagggagtggaacctgagctcgagcccgcagatgacctggatggaggcacggaggagcagggagagcaggatttccggaaatatgaggaaggctttgacccctactctatgttcaccccagagcagatcatggggaaggatgtccggctcctacgcatcaagaaggagggatccttagacctggccctggaaggcggtgtggactcccccattgggaaggtggtcgtttctgctgtgtatgagcggggagctgctgagcggcatggtggcattgtgaaaggggacgagatcatggcaatcaacggcaagattgtgacagactacaccctggctgaggctgaggctgccctgcagaaggcctggaatcagggcggggactggatcgaccttgtggttgccgtctgccccccaaaggagtatgacgatgagctgaccttcttctgaagtccaaaaggggaaaccaaattcaccgttaggaaacagtgagctccggccccacctcgtgaacacaaagcctcggatcagccttgagagaggccacactacacacaccagatggcatccttgggacctgaatctatcacccaggaatctcaaactccctttggccctgaaccagggccagataaggaacagctcgggccactcttctgaaggccaacgtggaggaaagggagcagccagccatttgggagaagatctcaaggatccagactctcattcctttcctctggcccagtgaatttggtctctcccagctctgggggactccttccttgaaccctaataagaccccactggagtctctctctctccatccctctcctctgccctctgctctaattgctgccaggattgtcactccaaaccttactctgagctcattaataaaatagatttattttccagct

SEQ ID NO: 158654 - protein, 480 aa, Artificial Sequence
  derived and/or modified sequence
MKRSVAVWLLVGLSLGVPQFGKGDICDPNPCENGGICLPGLADGSFSCECPDGFTDPNCSSVVEVASDEEEPTSAGPCTPNPCHNGGTCEISEAYRGDTFIGYVCKCPRGFNGIHCQHNINECEVEPCKNGGICTDLVANYSCECPGEFMGRNCQYKCSGPLGIEGGIISNQQITASSTHRALFGLQKWYPYYARLNKKGLINAWTAAENDRWPWIQINLQRKMRVTGVITQGAKRIGSPEYIKSYKIAYSNDGKTWAMYKVKGTNEDMVFRGNIDNNTPYANSFTPPIKAQYVRLYPQVCRRHCTLRMELLGCELSGCSEPLGMKSGHIQDYQITASSIFRTLNMDMFTWEPRKARLDKQGKVNAWTSGHNDQSQWLQVDLLVPTKVTGIITQGAKDFGHVQFVGSYKLAYSNDGEHWTVYQDEKQRKDKVFQGNFDNDTHRKNVIDPPIYARHIRILPWSWYGRITLRSELLGCTEEE

SEQ ID NO: 158655 - DNA, 1443 bp, Artificial Sequence
  derived and/or modified sequence
atgaaaagaagtgtagctgtgtggctgctggtaggcctgtctctgggtgttccccagttcggcaaaggcgacatctgtgaccctaacccatgtgaaaatggtggaatctgcctgcccggactagccgacggctcatttagctgtgagtgccccgacggctttactgacccaaattgctcatcagtggtcgaagtggcctctgacgaggaggaacccactagcgctgggccttgtactcctaatccttgccataacggtggtacctgcgagatcagcgaagcgtacaggggggacacttttattggatacgtctgtaaatgtcctagagggttcaatggcatccactgccagcacaatatcaacgagtgtgaggtggagccctgtaagaatggcggaatctgcactgacctggttgctaattacagctgcgaatgccccggtgagtttatgggaaggaactgccaatacaagtgcagcggtcccctgggcatagaaggaggcatcatctccaatcagcagattaccgcctctagcacacaccgcgctctttttgggcttcaaaaatggtacccatattacgccaggctcaataaaaaagggctgattaatgcatggaccgcagctgaaaatgaccggtggccgtggatacagataaacctgcagcgtaagatgagggtgactggagtcatcactcagggcgctaagcgcatcgggtcacccgagtacatcaaatcctataaaatcgcctactccaacgatggcaaaacctgggccatgtacaaagtgaagggcaccaacgaagacatggtgttccgcggaaatattgacaacaataccccatacgctaacagtttcacaccccctatcaaggcacaatatgtgcggctgtatccacaggtgtgcaggagacactgcaccctaagaatggagctgctgggctgcgagctttcggggtgctccgagccattgggcatgaaatcagggcatatccaagactatcagatcaccgcttccagtatctttagaaccctgaacatggacatgttcacctgggaacccaggaaggccaggctggacaaacaaggaaaggtcaatgcctggacgagcggtcacaacgatcagagccaatggttacaggttgatctgctggtgcctactaaagtgactggcatcatcactcagggtgccaaggacttcggacacgttcaattcgtcgggtcttataagttggcttactccaacgatggggaacactggactgtgtaccaagacgaaaagcaaagaaaggataaggtgtttcaagggaacttcgacaatgatacacacagaaagaacgtaattgaccctcctatctacgccaggcacatcagaatactaccttggtcttggtatggacgaatcacactcaggtctgagctcctcgggtgcacagaagaggaatag

SEQ ID NO: 158656 - DNA, 1443 bp, Artificial Sequence
  derived and/or modified sequence
atgaaacgaagcgtagcagtgtggctgctagttggattatcgctaggggtcccacagttcggtaaaggagatatctgtgatccgaatccctgtgagaacggcggaatttgtttgccagggttggccgatggaagttttagttgcgagtgtcccgacggtttcactgaccctaactgttccagcgtggttgaagtggcaagtgatgaggaggaaccgacgagtgccgggccctgcacacctaatccatgccataacggtgggacttgtgaaatctctgaagcttacagaggagataccttcatcgggtatgtctgcaaatgcccacgcggtttcaatgggattcattgccagcataatattaatgaatgcgaggtcgaaccctgcaaaaacgggggaatatgcactgatctggtggctaactattcatgtgagtgccccggggaatttatgggtcgaaattgccagtacaaatgctccggtcccctgggcatcgaaggtggaattatatccaaccagcagataacagcctcctccacacatagagcactctttggattgcagaagtggtatccttattacgcacggctgaacaagaaggggctcataaacgcatggacagcggccgagaacgatagatggccttggattcaaatcaatcttcagaggaaaatgcgggtgaccggcgtgattactcagggcgccaagaggattggctcccccgagtacatcaagagttacaagattgcatacagtaacgacgggaaaacatgggctatgtataaagtgaagggaactaatgaagatatggttttcagaggaaatattgacaataatacaccctacgccaattcctttaccccgcccatcaaggctcaatatgttaggttataccctcaggtctgtcgcagacactgcactctccggatggaactgctcggttgtgagttgtccggatgctctgaaccccttgggatgaagtccggccacatccaggactatcaaattactgcgagctctattttcaggacgctcaacatggacatgttcacgtgggagccccgcaaagcaaggctcgataagcagggcaaggtgaatgcttggacttccggccataacgaccagtctcagtggcttcaggttgacctgctggtcccaacaaaggttacaggcattattacccaaggggccaaggatttcggccatgttcagttcgttggatcttataaactggcctattcgaatgatggtgaacactggacggtgtaccaggatgaaaagcagaggaaagataaagtattccagggtaatttcgacaatgacacacatcggaaaaatgtgattgacccaccaatctacgctaggcatattcgtattttaccatggagctggtacggaaggatcacgctgaggtctgaacttctgggatgcactgaggaggaatag

SEQ ID NO: 158657 - DNA, 1443 bp, Artificial Sequence
  derived and/or modified sequence
atgaaacgaagcgtagcagtgtggctgctagttggattatcgctaggggtcccacagttcggtaaaggagatatctgtgatccgaatccctgtgagaacggcggaatttgtttgccagggttggccgatggaagttttagttgcgagtgtcccgacggtttcactgaccctaactgttccagcgtggttgaagtggcaagtgatgaggaggaaccgacgagtgccgggccctgcacacctaatccatgccataacggtgggacttgtgaaatctctgaagcttacagaggagataccttcatcggttacgtctgcaaatgtcccaggggatttaacggcatacactgccagcacaacatcaatgaatgcgaggtggaaccatgcaagaatggagggatatgtacagatctggtggcgaactattcctgcgaatgcccaggagaattcatggggagaaattgtcagtacaagtgtagcggacctctgggaattgaaggcggtataatttccaatcaacaaataacggccagctcaacacatagggctctttttggattacagaaatggtatccctattacgcgcgtcttaacaagaaaggattgatcaacgcctggacagccgcagagaacgatcgatggccctggatacaaattaatctccaacggaaaatgcgcgtcaccggtgtcataacacaaggagctaagagaataggatctcccgagtatatcaaaagttataaaatcgcttattctaacgatggaaaaacgtgggccatgtacaaagtcaaaggcactaacgaggatatggtattccgaggcaatatcgacaataacacaccctacgcgaactctttcacacccccaatcaaggcccaatacgtgcgtctctaccctcaggtgtgccgccggcattgtaccttgcgtatggaactgctcgggtgcgagctgtctggttgctcagagccccttggcatgaagtccgggcacattcaggactatcaaattactgcttcttcgatattccggacactcaatatggacatgtttacttgggaacccagaaaggccagactggacaagcaaggcaaggtcaacgcctggacttctggacataatgaccagtcccaatggctgcaggttgacctccttgtgccgactaaagttacaggaattatcacacagggcgcgaaagatttcggacatgtgcaattcgtgggaagctataaactggcctattctaatgacggcgaacactggactgtgtaccaagacgagaaacagagaaaagacaaagtttttcagggcaactttgacaatgacacgcaccggaagaacgttatcgatcctcctatatatgctagacatatccgaatacttccttggtcatggtatggcaggatcacgcttagatccgaattgttaggttgtacagaggaggagtag

SEQ ID NO: 158658 - DNA, 4727 bp, Artificial Sequence
  derived and/or modified sequence
agaagccccgcagccgccgcgcggagaacagcgacagccgagcgcccggtccgcctgtctgccggtgggtctgcctgcccgcgcagcagacccggggcggccgcgggagcccgcgccccgcccgccgcgcctctgccgggacccacccgcagcggagggctgagcccgccggcggctccccggagctcacccacctccgcgcgccggagcgcaggcaaaaggggaggaaaggctcctctctttagtcaccactctcgccctctccaagaatttgtttaacaaagcgctgaggaaagagaacgtcttcttgaattctttagtaggggcggagtctgctgctgccctgcgctgccacctcggctacactgccctccgcgacgacccctgaccagccggggtcacgtccgggagacgggatcatgaagcgctcggtagccgtctggctcttggtcgggctcagcctcggtgtcccccagttcggcaaaggtgatatttgtgatcccaatccatgtgaaaatggaggtatctgtttgccaggattggctgatggttccttttcctgtgagtgtccagatggcttcacagaccccaactgttctagtgttgtggaggttgcatcagatgaagaagaaccaacttcagcaggtccctgcactcctaatccatgccataatggaggaacctgtgaaataagtgaagcataccgaggggatacattcataggctatgtttgtaaatgtccccgaggatttaatgggattcactgtcagcacaacataaatgaatgcgaagttgagccttgcaaaaatggtggaatatgtacagatcttgttgctaactattcctgtgagtgcccaggcgaatttatgggaagaaattgtcaatacaaatgctcaggcccactgggaattgaaggtggaattatatcaaaccagcaaatcacagcttcctctactcaccgagctctttttggactccaaaaatggtatccctactatgcacgtcttaataagaaggggcttataaatgcgtggacagctgcagaaaatgacagatggccgtggattcagataaatttgcaaaggaaaatgagagttactggtgtgattacccaaggagccaagaggattggaagcccagagtatataaaatcctacaaaattgcctacagtaatgatggaaagacttgggcaatgtacaaagtgaaaggcaccaatgaagacatggtgtttcgtggaaacattgataacaacactccatatgctaactctttcacaccccccataaaagctcagtatgtaagactctatccccaagtttgtcgaagacattgcactttgcgaatggaacttcttggctgtgaactgtcgggttgttctgagcctctgggtatgaaatcaggacatatacaagactatcagatcactgcctccagcatcttcagaacgctcaacatggacatgttcacttgggaaccaaggaaagctcggctggacaagcaaggcaaagtgaatgcctggacctctggccacaatgaccagtcacaatggttacaggtggatcttcttgttccaaccaaagtgactggcatcattacacaaggagctaaagattttggtcatgtacagtttgttggctcctacaaactggcttacagcaatgatggagaacactggactgtataccaggatgaaaagcaaagaaaagataaggttttccagggaaattttgacaatgacactcacagaaaaaatgtcatcgaccctcccatctatgcacgacacataagaatccttccttggtcctggtacgggaggatcacattgcggtcagagctgctgggctgcacagaggaggaatgaggggaggctacatttcacaaccctcttccctatttccctaaaagtatctccatggaatgaactgtgcaaaatctgtaggaaactgaatggtttttttttttttttcatgaaaaagtgctcaaattatggtaggcaactaacggtgtttttaagggggtctaagcctgccttttcaatgatttaatttgattttattttatccgtcaaatctcttaagtaacaacacattaagtgtgaattacttttctctcattgtttcctgaattattcgcattggtagaaatatattagggaaagaaagtagccttctttttatagcaagagtaaaaaagtctcaaagtcatcaaataagagcaagagttgatagagcttttacaatcaatactcacctaattctgataaaaggaatactgcaatgttagcaataagtttttttcttctgtaatgactctacgttatcctgtttccctgtgcctaccaaacactgtcaatgtttattacaaaattttaaagaagaatatgtaacatgcagtactgatattataattctcattttactttcattatttctaataagagattatgtgacttctttttcttttagttctattctacattcttaatattgtatattacctgaataattcaatttttttctaattgaatttcctattagttgactaaaagaagtgtcatgtttactcatatatgtagaacatgactgcctatcagtagattgatctgtatttaatattcgttaattaaatctgcagttttatttttgaaggaagccataactatttaatttccaaataattgcttcataaagaatcccatactctcagtttgcacaaaagaacaaaaaatatatatgtctctttaaatttaaatcttcatttagatggtaattacatatccttatatttactttaaaaaatcggcttatttgtttattttataaaaaatttagcaaagaaatattaatatagtgctgcatagtttggccaagcatactcatcatttctttgttcagctccacatttcctgtgaaactaacatcttattgagatttgaaactggtggtagtttcccaggaaggcacaggtggagttatttgtgagaagcaaagtgtttactaatgacaaagtagtaaaccattttcaagatgaaaactgatttctatttattttgcttcaaaggtcctgaaaaaataagcaattatcataacaatttgttattgatactggaggtttcattgacatgtctctcaaattaaagctcacactgcctccataaaagtcttcaacatctaatttataagctttacaagtatttattttataaggcttagacagaattattggagttttaaattaagtgtattggaaaagaaaggatggtatgtgtatgaaatgttaagatcctacgcaacactgctatttttttcctttaatatttgtgctgcataacaaaagccactagactgttactgtcttgtctgtccatgtgttaacagcatttcttaatgatgtatatatggagtggtcttcaatcatagtgaagaatttaaagagaaagtcaattgtattggcatttttaataagaacaaaattagttcgtctaaggggactggctggccacatatttgttccttgcccatatgctttctacttcttgttcttattatgaaattatgaatttgaagcctctgaaatggtgatcagttttcaacatctttcaaaaacaaaattactatttcctccatattgccttttttagataactttaaagttaggattttaaaatatttgtaactggctaaattttaaagtcgtgacaaataattacttaggttcagaaatatacacacacttactctttagccagtttctttcaaggtttactgtcccatcagatatctagccattttcctttgcaaattacataccttcttaagagtgtatttttaagattattacttacgctttatgatgatatagtttttcaaaattatttatagcttcatatgatgttttgtaattttttctattgatacctgttttaaaaatattttccaaggaagttgattaaaattatatttgttaccttttagaaaaagcattgaaatgagtttctcttgctttttcattttccctctgctttatatgctcttcgcaatacatcatgtccaacgggatacctattgttctcatgacacccaaaattgatgagagcaaaggggtcgcaccatatggaaatgttgaaaactattgtaaagtagtattatgaagtagcttttgtgtcattcatgtcgatgacatgaaagtgaagtaaatttattctatgtaaattcacactaaaaccagtacagtaccataagtagaatacatgtaagaatcacctagtcttcactatattgagtaaatataacatgctaattttacaattaatgaaactaaacttttaaacatctccattatatctacatccttttgaaggtatttatcatagttgccaattttaattttaggattgactttctctttctgaatgacttcataaagtttggtgtgaattttgaagacttgggttactaatgattgtatctttgctagtcaacaacttatgaaatatactcaatgcgtctgatgtgtcattaagtgcagaaataactaagacacaaataacctttgcaaaccttcaagctgtgtaatattccaatgttgtttttttctttgtatatatacttatatcacgtaggatgtaaaaccagtatgaccttgtctagtctccaaacttaaaataaacttttgaaaagctgggattcttttgaagcagttgtaattaaacacatttataagaata

SEQ ID NO: 158659 - DNA, 1443 bp, Artificial Sequence
  derived and/or modified sequence
atgaagagaagcgtggccgtgtggctgctggtgggcctgagcctgggcgtgccccagttcggcaagggcgacatctgcgaccccaacccctgcgagaacggcggcatctgcctgcccggcctggccgacggcagcttcagctgcgagtgccccgacggcttcaccgaccccaactgcagcagcgtggtggaggtggccagcgacgaggaggagcccaccagcgccggcccctgcacccccaacccctgccacaacggcggcacctgcgagatcagcgaggcctacagaggcgacaccttcatcggctacgtgtgcaagtgccccagaggcttcaacggcatccactgccagcacaacatcaacgagtgcgaggtggagccctgcaagaacggcggcatctgcaccgacctggtggccaactacagctgcgagtgccccggcgagttcatgggcagaaactgccagtacaagtgcagcggccccctgggcatcgagggcggcatcatcagcaaccagcagatcaccgccagcagcacccacagagccctgttcggcctgcagaagtggtacccctactacgccagactgaacaagaagggcctgatcaacgcctggaccgccgccgagaacgacagatggccctggatccagatcaacctgcagagaaagatgagagtgaccggcgtgatcacccagggcgccaagagaatcggcagccccgagtacatcaagagctacaagatcgcctacagcaacgacggcaagacctgggccatgtacaaggtgaagggcaccaacgaggacatggtgttcagaggcaacatcgacaacaacaccccctacgccaacagcttcaccccccccatcaaggcccagtacgtgagactgtacccccaggtgtgcagaagacactgcaccctgagaatggagctgctgggctgcgagctgagcggctgcagcgagcccctgggcatgaagagcggccacatccaggactaccagatcaccgccagcagcatcttcagaaccctgaacatggacatgttcacctgggagcccagaaaggccagactggacaagcagggcaaggtgaacgcctggaccagcggccacaacgaccagagccagtggctgcaggtggacctgctggtgcccaccaaggtgaccggcatcatcacccagggcgccaaggacttcggccacgtgcagttcgtgggcagctacaagctggcctacagcaacgacggcgagcactggaccgtgtaccaggacgagaagcagagaaaggacaaggtgttccagggcaacttcgacaacgacacccacagaaagaacgtgatcgacccccccatctacgccagacacatcagaatcctgccctggagctggtacggcagaatcaccctgagaagcgagctgctgggctgcaccgaggaggagtag

SEQ ID NO: 158660 - DNA, 1443 bp, Artificial Sequence
  derived and/or modified sequence
atgaagcgcagcgttgctgtttggttgcttgtcggcctgagcctcggcgtgcctcagtttggcaagggagatatatgtgatccgaacccatgcgaaaacggtgggatatgtttgccaggccttgccgacggaagtttttcctgtgagtgcccagacggctttacagaccctaactgttcctccgtagttgaggtggcctcagatgaggaggagccgacctctgccggcccttgcactccgaacccatgtcacaacgggggtacatgtgagatttctgaggcctatcggggagacacctttattgggtacgtctgcaagtgccccagaggctttaacgggattcactgtcagcataatattaacgaatgcgaggtggaaccctgtaagaatggcgggatctgtaccgaccttgtggctaattacagttgtgagtgccccggcgagttcatgggtaggaattgccagtataaatgttccggtcctttgggtatcgagggaggcatcattagtaaccaacagataacagcctccagtacacacagggcactatttgggctccagaaatggtacccgtactacgccaggctgaacaaaaagggtttgatcaacgcttggaccgctgccgagaatgaccggtggccatggatccagataaatttgcagaggaaaatgagggtcacaggcgttattacccaaggcgcgaaacggatcgggagccccgaatacatcaagtcatataagattgcgtactccaacgacgggaaaacctgggcaatgtataaggttaagggtacaaacgaggatatggtgtttagaggcaatattgataacaacaccccctatgcaaatagtttcaccccacctatcaaggcacaatatgtcagattatatccacaggtttgcaggcgccactgcaccctgcggatggagctcttgggatgcgaattatccggctgttcagaacctctggggatgaaatcgggccatatccaggattaccagatcacagctagcagtatttttagaactttgaacatggatatgtttacctgggaacctcggaaagcccggctggacaagcagggcaaagtcaatgcctggacatctggccacaatgaccaatctcagtggctacaagtggacctcctcgtccctaccaaggtgaccggaattatcactcaaggcgccaaggattttggccacgtccagtttgtcgggagttataaactagcctattcgaacgatggtgagcactggacagtataccaggatgagaagcagcgaaaggacaaagtctttcaaggcaacttcgacaatgatacccatcgcaagaacgtcatcgatccacccatttatgcacgtcatatccggatcttgccttggtcatggtatgggcgaatcacccttcggtcggaacttctgggatgtacagaagaagagtag

SEQ ID NO: 158661 - DNA, 1443 bp, Artificial Sequence
  derived and/or modified sequence
atgaagaggtctgtggccgtgtggctgctggtgggcctgagcctgggcgtgccccagtttgggaagggggacatctgtgaccccaacccctgtgaaaatggaggcatctgcctgcccggcctggctgatggcagcttcagctgtgaatgtccagatggcttcacagaccccaactgcagctctgtggtggaggtggccagtgatgaggaggagcccaccagcgctggcccctgcacccccaacccctgccacaatggaggcacctgtgagatcagcgaggcctacagaggagacaccttcatcggctacgtgtgcaagtgcccccggggcttcaacggcatccactgccagcacaacatcaatgaatgtgaggtggagccctgcaagaatggaggcatctgcacagacctggtggccaactacagctgtgagtgccctggagagttcatgggcaggaactgccagtacaagtgcagcggccccctgggcatcgagggcggcatcatcagcaaccagcagatcacagccagcagcacccaccgggccctgtttggcctgcagaagtggtacccctactatgcccggctgaacaagaagggcctcatcaatgcctggacagctgctgaaaatgaccgctggccctggatccagatcaacctgcagaggaagatgagggtgactggagtcatcacccagggcgccaagagaattggcagccctgagtacatcaagagctacaagatcgcctacagcaatgatggcaagacctgggccatgtacaaggtgaagggcaccaatgaagacatggtgttccggggcaacatcgacaacaacaccccctatgccaacagcttcaccccacccatcaaggcccagtatgtgcggctgtacccccaggtgtgccgccgccactgcaccctgaggatggagctgctgggctgtgagctgagcggctgcagcgagcccctgggcatgaagagcggccacatccaggactaccagatcacagccagcagcatcttccgcaccctgaacatggacatgttcacctgggagcccaggaaggcccggctggacaagcagggcaaggtgaatgcctggaccagcggccacaatgaccagagccagtggctgcaggtggacctgctggtgcccaccaaggtgacaggcatcatcacccagggcgccaaggactttggacatgtgcagtttgtgggcagctacaagctggcctacagcaatgatggagagcactggacagtgtaccaggatgagaagcagaggaaggacaaggtgttccagggcaactttgacaatgacacccacaggaagaatgtgattgatcctcccatctatgcccggcacatccgcatcctgccctggagctggtacggccgcatcaccctgcggtctgagctgctgggctgcacagaggaggagtag

SEQ ID NO: 158662 - DNA, 1443 bp, Artificial Sequence
  derived and/or modified sequence
atgaagcggagcgtggccgtgtggctgctggtgggcctgagcctgggtgtgccacagtttggaaagggggacatctgtgaccccaacccttgcgagaatggcggcatttgtctgccaggtctcgctgacgggagtttttcctgcgaatgccccgatgggtttaccgatcctaactgttcatccgtcgttgaagtggccagcgatgaggaggaacccacctcagccggcccgtgcactcccaatccctgccacaacggcggaacctgcgaaattagcgaggcctatcgcggtgacacatttattgggtacgtttgtaagtgtccgcgggggttcaacgggatccattgccagcataacatcaatgagtgcgaggttgaaccttgcaaaaatgggggtatatgtaccgatctggtggcaaattattcgtgcgagtgtccaggagaattcatgggtcgcaattgccagtacaaatgctctggccccctcggcatcgaaggtggcatcatttcgaatcagcagatcactgccagcagcacccatcgggcactgtttggactgcagaagtggtacccctattacgcccgcctgaacaagaaaggactcattaatgcctggaccgctgctgaaaatgacaggtggccttggattcagattaatctgcagcgaaagatgagggttaccggagtgattacacagggcgcgaaacgcatcggaagccctgaatatataaaatcatacaagatcgcatactccaacgacggcaagacatgggcaatgtataaagtcaagggcactaacgaagatatggtgtttcgcggcaacatcgataataacaccccttacgcaaactcctttacccctccaattaaagcccagtacgtgcggttatacccacaggtgtgccgcagacactgcactctgcggatggagctcctcggatgcgaactttccggctgctctgagccgctgggaatgaagtctggtcacatccaggactaccagatcactgcaagtagtatattccgaaccctgaatatggatatgttcacctgggaaccccgcaaggctcgtctcgataagcaggggaaggtcaacgcctggacaagtggccacaacgatcagtcgcagtggctgcaggtggacctcctggtgcctaccaaagtgaccggcatcataacgcagggcgccaaggacttcggccacgttcaatttgtgggatcatacaaactggcttacagcaatgacggagagcattggactgtctatcaagacgaaaagcaacggaaagacaaggtgtttcaggggaactttgataacgacacacaccgtaagaatgtcatcgatccccccatctacgctaggcacattcgaattttgccatggagctggtacggcagaatcactttgaggagcgaactacttggttgcaccgaggaagaatag

SEQ ID NO: 158663 - RNA, 1443 nt, Artificial Sequence
  derived and/or modified sequence
augaaacgaagcguagcaguguggcugcuaguuggauuaucgcuaggggucccacaguucgguaaaggagauaucugugauccgaaucccugugagaacggcggaauuuguuugccaggguuggccgauggaaguuuuaguugcgagugucccgacgguuucacugacccuaacuguuccagcgugguugaaguggcaagugaugaggaggaaccgacgagugccgggcccugcacaccuaauccaugccauaacggugggacuugugaaaucucugaagcuuacagaggagauaccuucaucggguaugucugcaaaugcccacgcgguuucaaugggauucauugccagcauaauauuaaugaaugcgaggucgaacccugcaaaaacgggggaauaugcacugaucugguggcuaacuauucaugugagugccccggggaauuuaugggucgaaauugccaguacaaaugcuccgguccccugggcaucgaagguggaauuauauccaaccagcagauaacagccuccuccacacauagagcacucuuuggauugcagaagugguauccuuauuacgcacggcugaacaagaaggggcucauaaacgcauggacagcggccgagaacgauagauggccuuggauucaaaucaaucuucagaggaaaaugcgggugaccggcgugauuacucagggcgccaagaggauuggcucccccgaguacaucaagaguuacaagauugcauacaguaacgacgggaaaacaugggcuauguauaaagugaagggaacuaaugaagauaugguuuucagaggaaauauugacaauaauacacccuacgccaauuccuuuaccccgcccaucaaggcucaauauguuagguuauacccucaggucugucgcagacacugcacucuccggauggaacugcucgguugugaguuguccggaugcucugaaccccuugggaugaaguccggccacauccaggacuaucaaauuacugcgagcucuauuuucaggacgcucaacauggacauguucacgugggagccccgcaaagcaaggcucgauaagcagggcaaggugaaugcuuggacuuccggccauaacgaccagucucaguggcuucagguugaccugcuggucccaacaaagguuacaggcauuauuacccaaggggccaaggauuucggccauguucaguucguuggaucuuauaaacuggccuauucgaaugauggugaacacuggacgguguaccaggaugaaaagcagaggaaagauaaaguauuccaggguaauuucgacaaugacacacaucggaaaaaugugauugacccaccaaucuacgcuaggcauauucguauuuuaccauggagcugguacggaaggaucacgcugaggucugaacuucugggaugcacugaggaggaauag

SEQ ID NO: 158664 - RNA, 1443 nt, Artificial Sequence
  derived and/or modified sequence
augaaacgaagcguagcaguguggcugcuaguuggauuaucgcuaggggucccacaguucgguaaaggagauaucugugauccgaaucccugugagaacggcggaauuuguuugccaggguuggccgauggaaguuuuaguugcgagugucccgacgguuucacugacccuaacuguuccagcgugguugaaguggcaagugaugaggaggaaccgacgagugccgggcccugcacaccuaauccaugccauaacggugggacuugugaaaucucugaagcuuacagaggagauaccuucaucgguuacgucugcaaaugucccaggggauuuaacggcauacacugccagcacaacaucaaugaaugcgagguggaaccaugcaagaauggagggauauguacagaucugguggcgaacuauuccugcgaaugcccaggagaauucauggggagaaauugucaguacaaguguagcggaccucugggaauugaaggcgguauaauuuccaaucaacaaauaacggccagcucaacacauagggcucuuuuuggauuacagaaaugguaucccuauuacgcgcgucuuaacaagaaaggauugaucaacgccuggacagccgcagagaacgaucgauggcccuggauacaaauuaaucuccaacggaaaaugcgcgucaccggugucauaacacaaggagcuaagagaauaggaucucccgaguauaucaaaaguuauaaaaucgcuuauucuaacgauggaaaaacgugggccauguacaaagucaaaggcacuaacgaggauaugguauuccgaggcaauaucgacaauaacacacccuacgcgaacucuuucacacccccaaucaaggcccaauacgugcgucucuacccucaggugugccgccggcauuguaccuugcguauggaacugcucgggugcgagcugucugguugcucagagccccuuggcaugaaguccgggcacauucaggacuaucaaauuacugcuucuucgauauuccggacacucaauauggacauguuuacuugggaacccagaaaggccagacuggacaagcaaggcaaggucaacgccuggacuucuggacauaaugaccagucccaauggcugcagguugaccuccuugugccgacuaaaguuacaggaauuaucacacagggcgcgaaagauuucggacaugugcaauucgugggaagcuauaaacuggccuauucuaaugacggcgaacacuggacuguguaccaagacgagaaacagagaaaagacaaaguuuuucagggcaacuuugacaaugacacgcaccggaagaacguuaucgauccuccuauauaugcuagacauauccgaauacuuccuuggucaugguauggcaggaucacgcuuagauccgaauuguuagguuguacagaggaggaguag

SEQ ID NO: 158665 - protein, 126 aa, Artificial Sequence
  derived and/or modified sequence
  misc_feature (1)..(1): Xaa can be any naturally occurring amino acid
XPASQRDVLYLSVIRKIPALTENDPETWIVCNFSVDHDSAPLNNRCVRAKINVAMICQTLVSPPEGNQEISRDNILCKITYVANVNPGGWAPASVLRAVAKREYPKFLKRFTSYVQEKTAGKPILF

SEQ ID NO: 158666 - protein, 406 aa, Artificial Sequence
  derived and/or modified sequence
MKKKQQHPGGGADPWPHGAPMGGAPPGLGSWKRRVPLLPFLRFSLRDYGFCMATLLVFCLGSLLYQLSGGPPRFLLDLRQYLGNSTYLDDHGPPPSKVLPFPSQVVYNRVGKCGSRTVVLLLRILSEKHGFNLVTSDIHNKTRLTKNEQMELIKNISTAEQPYLFTRHVHFLNFSRFGGDQPVYINIIRDPVNRFLSNYFFRRFGDWRGEQNHMIRTPSMRQEERYLDINECILENYPECSNPRLFYIIPYFCGQHPRCREPGEWALERAKLNVNENFLLVGILEELEDVLLLLERFLPHYFKGVLSIYKDPEHRKLGNMTVTVKKTVPSPEAVQILYQRMRYEYEFYHYVKEQFHLLKRKFGLKSHVSKPPLRPHFFIPTPLETEEPIDDEEQDDEKWLEDIYKR

SEQ ID NO: 158667 - DNA, 1221 bp, Artificial Sequence
  derived and/or modified sequence
atgaagaagaagcagcagcaccccggcggcggcgccgacccctggccccacggcgcccccatgggcggcgccccccccggcctgggcagctggaagagaagagtgcccctgctgcccttcctgagattcagcctgagagactacggcttctgcatggccaccctgctggtgttctgcctgggcagcctgctgtaccagctgagcggcggcccccccagattcctgctggacctgagacagtacctgggcaacagcacctacctggacgaccacggccccccccccagcaaggtgctgcccttccccagccaggtggtgtacaacagagtgggcaagtgcggcagcagaaccgtggtgctgctgctgagaatcctgagcgagaagcacggcttcaacctggtgaccagcgacatccacaacaagaccagactgaccaagaacgagcagatggagctgatcaagaacatcagcaccgccgagcagccctacctgttcaccagacacgtgcacttcctgaacttcagcagattcggcggcgaccagcccgtgtacatcaacatcatcagagaccccgtgaacagattcctgagcaactacttcttcagaagattcggcgactggagaggcgagcagaaccacatgatcagaacccccagcatgagacaggaggagagatacctggacatcaacgagtgcatcctggagaactaccccgagtgcagcaaccccagactgttctacatcatcccctacttctgcggccagcaccccagatgcagagagcccggcgagtgggccctggagagagccaagctgaacgtgaacgagaacttcctgctggtgggcatcctggaggagctggaggacgtgctgctgctgctggagagattcctgccccactacttcaagggcgtgctgagcatctacaaggaccccgagcacagaaagctgggcaacatgaccgtgaccgtgaagaagaccgtgcccagccccgaggccgtgcagatcctgtaccagagaatgagatacgagtacgagttctaccactacgtgaaggagcagttccacctgctgaagagaaagttcggcctgaagagccacgtgagcaagccccccctgagaccccacttcttcatccccacccccctggagaccgaggagcccatcgacgacgaggagcaggacgacgagaagtggctggaggacatctacaagagatag

SEQ ID NO: 158668 - DNA, 1221 bp, Artificial Sequence
  derived and/or modified sequence
atgaaaaagaagcagcagcacccaggcggtggggcggatccatggccgcatggtgctcctatggggggggcaccccccggcctgggctcatggaaaagaagggtcccattgcttccctttcttcggtttagtctgagggattatggattctgtatggccaccctccttgttttctgccttggctcactcctctatcagttatctggcggcccccctcgattcctgctggatctgcggcagtacctgggtaattcaacctacctcgacgaccacggacccccccccagtaaggtactcccattccccagtcaagtggtgtacaatcgtgtgggaaagtgcggttcaaggaccgtggtgttactgctccgcatcctgagtgaaaaacatgggtttaacctcgttacctccgacatccacaacaagactagactcactaaaaatgaacaaatggaattgattaagaacattagcactgctgaacagccttacctcttcaccagacacgttcattttcttaatttctccaggtttgggggtgatcagccggtgtacatcaacatcatccgggacccagtgaaccggtttctttccaactatttcttccggcggttcggcgattggaggggcgaacagaatcacatgatccgtactcccagtatgcgccaggaggagcggtatctggacatcaacgagtgcatactggagaattatccggaatgttctaatccacgattgttttacataattccgtacttctgtggccagcaccccaggtgtcgagagcccggcgaatgggccctggagagagccaagctgaacgtgaatgagaacttcctcttggtcggtattctggaggaactagaggacgtgctcctgctcctggagagattcctaccccactattttaaaggcgtgctctccatttacaaggacccggagcataggaagttaggcaatatgactgtgactgtcaaaaaaaccgtcccttctcctgaggcggttcagatcctctatcagcgaatgagatacgaatacgaattctatcattacgttaaggaacagttccaccttctcaagcggaagtttgggcttaagtctcacgtctcgaagccccccctgcgaccacacttctttatcccgacccccctcgaaacagaggaacctatagacgatgaagaacaggatgatgagaagtggctggaggatatctacaaaaggtag

SEQ ID NO: 158669 - DNA, 1221 bp, Artificial Sequence
  derived and/or modified sequence
atgaagaagaagcagcagcaccctgggggcggcgctgacccctggccccatggagcccccatgggcggggcccctcctggcctgggctcctggaagagaagagtgcccctgctgcccttcctgcgcttcagcctgcgggactatggcttctgcatggccaccctgctggtgttctgcctgggcagcctgctgtaccagctgagcggcggccccccacgcttcctgctggacctgcggcagtacctgggcaacagcacctacctggatgaccacggccccccacccagcaaggtgctgcccttccccagccaggtggtgtacaacagagtgggcaaatgtggcagcaggacagtggtgctgctgctgcgcatcctgtctgagaagcacggcttcaacctggtgaccagtgacatccacaacaagacccggctgaccaagaatgagcagatggagctgatcaagaacatcagcacagctgagcagccctacctgttcaccaggcatgtgcacttcctgaacttcagcagatttggaggagaccagcctgtgtacatcaacatcatccgggaccctgtgaaccgcttcctgagcaactacttcttccgccgctttggagactggagaggagagcagaaccacatgatccgcacccccagcatgaggcaggaggagcgctacctggacatcaatgaatgcatcctggagaactacccagaatgtagcaaccccaggctcttctacatcatcccctacttctgtggccagcacccccgctgccgggagcccggggagtgggccctggagcgggccaagctgaatgtgaatgaaaacttcctgctggtgggcatcctggaggagctggaggatgtgctgctgctgctggagcgcttcctgccccactacttcaagggcgtgctgagcatctacaaggaccctgagcacaggaagctgggcaacatgacagtgacagtgaagaagacagtgcccagccctgaggccgtgcagatcctgtaccagaggatgagatatgaatatgagttctaccactacgtgaaggagcagttccacctgctgaagaggaagtttggcctgaagagccacgtgtccaagccacccctgcggccccacttcttcatccccacccccctggagacagaggagcccattgatgatgaggagcaggatgatgagaagtggctggaggacatctacaagaggtag

SEQ ID NO: 158670 - DNA, 1221 bp, Artificial Sequence
  derived and/or modified sequence
atgaagaagaagcagcagcaccccggcggcggcgccgacccctggcctcacggtgctcccatgggcggagctccgccgggcctcggctcatggaaacgccgcgtgccactcctgcctttccttcggttcagtctgcgggattatggtttctgcatggccacactgctggttttctgtctcggttcattactgtatcagttgtcaggtgggccaccaaggttcttgctggaccttagacaatacctggggaacagtacatatcttgacgaccatggaccgcccccctcaaaggtcctcccgtttccgtcccaggttgtatataacagggttggtaaatgtgggagcaggaccgtagtcctcctgttgcgtatcctgagcgagaaacatggctttaacctggtgacatccgacattcacaacaagacgcgactaacaaaaaacgaacagatggaactcattaagaacatctcaactgcagaacagccgtacctgttcactcggcatgtgcatttcttaaacttttcccgctttggtggcgatcagccagtatacattaatattatcagagaccccgtgaaccgattcctgagcaactacttctttcgccgctttggagattggcggggggaacagaaccacatgattcggacaccgagcatgcgtcaggaggaaaggtacctggacatcaacgagtgcattctggagaactacccagagtgtagcaatccacgcctgttttacattataccttatttctgtggacagcatccacgatgccgcgaaccaggggaatgggccctggagcgcgctaaattgaacgtcaatgagaacttcctgcttgtcggcatcctcgaggagctggaagacgtgttgttgctgttggagcgttttctgccccattacttcaagggggtgcttagtatttacaaggaccccgagcacagaaagctcgggaatatgacggtcaccgtgaaaaaaactgtacccagtcccgaagctgtccagatcttatatcagcggatgcgatatgaatatgagttttaccactatgtgaaggagcagtttcacctgctcaagagaaagtttggcctcaagtcacatgtgtcgaagccccccctccggccacacttcttcatacctacccctctggaaactgaggaaccgatcgatgacgaggagcaagacgatgaaaagtggttagaggatatttacaagcgctag

SEQ ID NO: 158671 - DNA, 1221 bp, Artificial Sequence
  derived and/or modified sequence
atgaaaaaaaagcaacagcaccctggaggcggagctgatccttggccacatggggcacccatgggaggcgcaccccctggcctgggcagttggaagaggcgtgtccccttattacctttcctgcggttcagcctccgggactatggcttctgcatggccaccctactcgtgttctgtctcggcagcctgctttaccagctgtctgggggaccacccaggtttctcctcgacctcaggcagtacctgggaaactctacttatctcgacgaccatggcccacctccatcaaaagtcctgccatttcctagccaggtggtctacaacagggttggtaagtgtggctcgcgcacagtggtcctgctcttgagaattttgtctgaaaagcatgggttcaacctagtaacctctgacatccacaataagacccggctcacgaagaacgaacagatggagctgatcaagaacatttccaccgctgagcagccatatctgtttacgaggcacgttcatttcttaaatttttctaggtttggtggcgaccagcccgtttacatcaacatcatacgggatcccgtgaatcgattcctaagcaattattttttccgcagatttggtgattggaggggcgagcagaaccatatgattcgcactcctagtatgcgccaagaagaaaggtacctggacatcaatgagtgtattctggagaactaccccgaatgttccaatccgagattattttacatcatcccctatttttgcggtcagcaccccaggtgcagggagcccggtgaatgggctctggagcgggcaaaactgaatgtcaatgaaaatttcttactggtagggattctggaggaactggaagatgtcctcttgttgcttgagcggttccttcctcattatttcaagggtgtactctcaatctacaaagaccctgagcatcgcaagctgggaaatatgactgtaactgttaaaaaaacagtgccaagccccgaagcagtgcagatcttgtaccagcggatgcgatatgagtatgaattctaccattacgtgaaggagcaatttcacctgctaaaaagaaagttcggtctgaagagtcatgtttctaaaccacctctgagaccccactttttcatccccacaccactggagactgaggagccaattgatgacgaggaacaggacgatgagaaatggcttgaagatatctataagaggtag

SEQ ID NO: 158672 - DNA, 4198 bp, Artificial Sequence
  derived and/or modified sequence
cggccctccccatgtgcagccggccagccgggctctcctcctcgcggcggatgggtgaccttttcctggcacgggcaggctgtgggaggcagcggagcaggcgatgaagaagaagcagcagcatcccggcggcggcgcggatccctggccccatggggcccctatggggggcgcccctccgggcctgggcagctggaagcgtcgggtgcccctgctgcctttcctgcgcttctccctccgggactacggcttctgcatggccaccctgctggtcttctgcctgggctccctcctctatcagctcagcgggggaccccctcgcttcctgctcgacctgcggcagtacttgggaaattccacttacttggatgaccatggaccacctcctagtaaggtactacctttcccaagccaggtggtgtacaacagggtaggcaagtgtgggagccgtactgtggtcttgcttctgagaatcttgtcggagaagcacggatttaatttggtcacatcagacattcacaacaaaaccaggcttactaaaaatgaacaaatggaactgattaaaaatataagtactgccgaacaaccctatttattcactcgacatgttcatttcctcaacttctcaaggtttggaggagaccagcctgtctacatcaacatcattagagaccccgtcaaccggttcttatccaactattttttccgtcgctttggagactggagaggggaacaaaatcacatgatccgcacccccagcatgaggcaggaggagcgctacctggatatcaatgagtgtattcttgaaaactatcccgagtgctccaaccccaggttattttacatcattccgtacttttgtggacagcatcccagatgcagggagcctggtgaatgggcccttgagagagcaaagctgaacgtgaatgaaaacttcctgctcgtggggattcttgaagagttggaagatgtgctgctgttactggaaagatttttacctcattacttcaagggcgtgctcagtatctacaaagacccagagcacaggaagcttggaaacatgactgtgacggtgaagaagactgtcccctctcctgaggctgtgcagatcctctaccagcggatgagatacgagtacgagttttaccactacgtcaaagagcagttccacctgctgaagcgcaagtttggacttaagtctcacgtcagcaagccccccctgaggccacacttctttatcccaactccactggaaaccgaggagccaatcgacgatgaagaacaggatgatgaaaagtggctggaagatatttataagaggtgatgtgactgtgttgcctctatggctttatctcccttttccagaaagttctttgtttggggaagtaaaatccttaagggactaaattaatgcttgggtgcattaaaaagaacaaaacattcccacatgttggggtcattgggagatgcccggttttgcgggttttatttgtttaattttattctgtgttttctcttggctctttgggtctttcccgggtacactagatggctccatcccaaggcatcttgtcataaaacagctttcccccaccccatatcatgggaaaagggggagaaatatagcccctagcctaataacttatcatttgtaaaatgacttataaaaatattacctcaatggtaggagacatccagacttgtatatttcagtggaaatacaaaaccacttcagagaccagggtatctcctctggaaggatctaagagaaggtaagacagattaggacatcgaaaaggaggatggagccaggtgccatggcttgagcctataatccgaggctgaggtgggaggatcacttgagcccaggagtttgaggttgcagtgagctgtgatcacaccactgcactccagcctgggtgacagagtgagactctgtctcaattaattttttttttttaaaggaggaggatctccatgggtaagtggtttctacccgcatgggtagagttctgcctctggtccttctcagggggcactttcaccaagagcagtgtaattatctctgaaagagcaagtcagcttgtgccgcatccccaaccaatccacagcctggagtacctttcaaggtcaaagtgcatggccagctccattgagacattccatttcaaagcaccgtgctgacagatatcaaagtactctagcagggaaaataatttgtttgctgtgtaaggaagaatgtagacaagacagataaatctgaaggtcatgtggcatcagggaaagggcatggctgtgtcttttgcacccaatatgaaacatcttctcccaacactgctttaatggaagttctaggaaccaatttagctcaggcatttgactcctacagcagaagttctgagcctgaccacagatggtgtgtaatctatcaaacacacccctggccaagttgggtcctataggacctggtactatgtactattgtaacttctagttccctaagaggtacctgttttcagtaaaaaggggtcctgagttctgtgcaggtggaagagctacccgagaactacctgagttctgtgcaggtagagtcccatttcttatgggacctgtgtgctcctgagaactcttacttgagacatcaaaaagaagcagcaagagcttctgggacagagactgcttggccagctttgtaagtaagtggctgcctccaatgtgatgtgagtacatgttgggcagtctcactgtcctaaggtatgtcttctttccacctcccactgcccctcccctgccacctatcaatgatgccttggttcagtcattagaaatctgttgctttgagttctgaaatattttcaccttaaaaaaaatgctgaaaatacacattctcctgggaagacgataaacagctagctaagaagccgaggttcagtggtggcagcaggaaggacactgccacaaattttgtctatttcatatttgtcccctagagccagccctagcaaatgtgtgagttgggagtagttaatagtaaataagactctgactttacacaagctacacattttatacttttcataaaccacaaagtctctctagaattttttctgccttcactaaaattggactgtagccaagatataaagcaagtcatttggaacctgccgagtgagcactgaagctactttatcatgagatgtgtgttaagaaggctgcagcccacaggagtccagggaaggcggggaccacagaggcacagagtccagcacttggccgctcatgggccttctttctgcctcagaggacgggggcagagaagtgatgaagggaaatgttcttagaggaggaaatatcctttgtcctgttcagagagaccagggccctaccattaggcatactttcagaagcaacctggagaacagctatcaatcatattcaaaaccagtacaagaactgctgcctggtaccctgtgagtcatttctatgaaattccatataaagaatgatgataagtttacacactgtgcaatctcacaatctgaaaataaagttgagttggctgtgttttctctgctcttgtcagaacattgggacaattggtcgttcaaaaacattcatcctcttactgcaagtttatctgggtacttttacctgtgtgttcaaaggcatttcttttcagcagtgatcattataacttcacaaaaaaagatgctgacggatttacttacagggccttaatgttattttgtcccagccaacaccctctaggtcctaaaagtcaaggtacttcagtttatttggcaaacatgacaacattttttttggccctgggcccaacagtttgtacttcatgaaacatattgtacattttacatagtttaatttaaaaaataccttttaagctagttgatctttgactgtcttatttattataacctttcagcacattccaaggttttagttactcaggaaggagttaattaaaatgattttattttggtctgatggatgttttttaaaaggaaaattattattatgaaccttcagcctactttcttgagtgccgtaaaagtgcttgtaaatctttttttttttttaagaagaaagaaaaaaatggtgtttgacgttgatggaaattcaaaaatatatatggaactgaaacattaacttagctaaaataaaagcaatctgtgtttga

SEQ ID NO: 158673 - protein, 333 aa, Artificial Sequence
  derived and/or modified sequence
MPLGLGRRKKAPPLVENEEAEPGRGGLGVGEPGPLGGGGSGGPQMGLPPPPPALRPRLVFHTQLAHGSPTGRIEGFTNVKELYGKIAEAFRLPTAEVMFCTLNTHKVDMDKLLGGQIGLEDFIFAHVKGQRKEVEVFKSEDALGLTITDNGAGYAFIKRIKEGSVIDHIHLISVGDMIEAINGQSLLGCRHYEVARLLKELPRGRTFTLKLTEPRKAFDMISQRSAGGRPGSGPQLGTGRGTLRLRSRGPATVEDLPSAFEEKAIEKVDDLLESYMGIRDTELAATMVELGKDKRNPDELAEALDERLGDFAFPDEFVFDVWGAIGDAKVGRY

SEQ ID NO: 158674 - DNA, 1002 bp, Artificial Sequence
  derived and/or modified sequence
atgcccctgggcctgggcagaagaaagaaggccccccccctggtggagaacgaggaggccgagcccggcagaggcggcctgggcgtgggcgagcccggccccctgggcggcggcggcagcggcggcccccagatgggcctgcccccccccccccccgccctgagacccagactggtgttccacacccagctggcccacggcagccccaccggcagaatcgagggcttcaccaacgtgaaggagctgtacggcaagatcgccgaggccttcagactgcccaccgccgaggtgatgttctgcaccctgaacacccacaaggtggacatggacaagctgctgggcggccagatcggcctggaggacttcatcttcgcccacgtgaagggccagagaaaggaggtggaggtgttcaagagcgaggacgccctgggcctgaccatcaccgacaacggcgccggctacgccttcatcaagagaatcaaggagggcagcgtgatcgaccacatccacctgatcagcgtgggcgacatgatcgaggccatcaacggccagagcctgctgggctgcagacactacgaggtggccagactgctgaaggagctgcccagaggcagaaccttcaccctgaagctgaccgagcccagaaaggccttcgacatgatcagccagagaagcgccggcggcagacccggcagcggcccccagctgggcaccggcagaggcaccctgagactgagaagcagaggccccgccaccgtggaggacctgcccagcgccttcgaggagaaggccatcgagaaggtggacgacctgctggagagctacatgggcatcagagacaccgagctggccgccaccatggtggagctgggcaaggacaagagaaaccccgacgagctggccgaggccctggacgagagactgggcgacttcgccttccccgacgagttcgtgttcgacgtgtggggcgccatcggcgacgccaaggtgggcagatactag

SEQ ID NO: 158675 - DNA, 1784 bp, Artificial Sequence
  derived and/or modified sequence
ggcccggtctggagtttgcggagggccgagccgggtgcgcacggggaggcggaggcagcggcggcggcggcggcggcggcggcggcggcggagcagatcttctggtgaccccacttctcgctgctcatgccgctgggactggggcggcggaaaaaggcgccccctctagtggaaaatgaggaggctgagccaggccgtggagggctgggcgtgggggagccagggcctctgggcggaggtgggtcggggggcccccaaatgggcttgcccccccctcccccagccctgcggccccgcctcgtgttccacacccagctggcccatggcagtcccactggccgcatcgagggcttcaccaacgtcaaggagctgtatggcaagatcgccgaggccttccgcctgccaactgccgaggtgatgttctgcaccctgaacacccacaaagtggacatggacaagctcctggggggccagatcgggctggaggacttcatcttcgcccacgtgaaggggcagcgcaaggaggtggaggtgttcaagtcggaggatgcactcgggctcaccatcacggacaacggggctggctacgccttcatcaagcgcatcaaggagggcagcgtgatcgaccacatccacctcatcagcgtgggcgacatgatcgaggccattaacgggcagagcctgctgggctgccggcactacgaggtggcccggctgctcaaggagctgccccgaggccgtaccttcacgctgaagctcacggagcctcgcaaggccttcgacatgatcagccagcgttcagcgggtggccgccctggctctggcccacaactgggcactggccgagggaccctgcggctccgatcccggggccccgccacggtggaggatctgccctctgcctttgaagagaaggccattgagaaggtggatgacctgctggagagttacatgggtatcagggacacggagctggcggccaccatggtggagctgggaaaggacaaaaggaacccggatgagctggccgaggccctggacgaacggctgggtgactttgccttccctgacgagttcgtctttgacgtctggggcgccattggggacgccaaggtcggccgctactaggactgcccccggaccctgcgatgatgacccgggcgcaacctggtgggggcccccagcagggacactgacgtcaggacccgagcctccagcctgagcctagctcagcagcccaaggacgatggtgaggggaggtggggccaggccccctgccccgctccaatcggtaccatcccctccctggttcccagtctggccggggtccccggcccccctgtgccctgttccccacctacctcagctgggtcaggcacagggaggggagggatcagccaaattgggcggccacccccgcctccaccactttccaccatcagctgccaaactggtccctctgtctccctggggccttgggttctgtttgggggtcatgaccttcctagtttcctgacgcagggaatacaggggagagggttgtccttccccccagcaaatgcaataatgccctcacccctcctgagaggagccccctccctgtggagcctgttacctccgcatttgacacgagtctgctgtgaaccccgcaacctcctccccacctcccatctctccttccaggcccatccctggcccagagcaggagggagggagggacgatggcggtgggtttttgtatctgaatttgctgtcttgaacataaagaatctatctgctgttgg

SEQ ID NO: 158676 - DNA, 1509 bp, Artificial Sequence
  derived and/or modified sequence
gagccgggtgcgcacggggaggcggaggcagcggcggcggcggcggcggcggcggcggcggcggagcagcaggaccattctggctgctgtctggacaagaagtcgtagggggtgagggtggaagctgggaaacccacaggaggcaaccacactagtttagatcttctggtgaccccacttctcgctgctcatgccgctgggactggggcggcggaaaaaggcgccccctctagtggaaaatgaggaggctgagccaggccgtggagggctgggcgtgggggagccagggcctctgggcggaggtgggtcggggggcccccaaatgggcttgcccccccctcccccagccctgcggccccgcctcgtgttccacacccagctggcccatggcagtcccactggccgcatcgagggcttcaccaacgtcaaggagctgtatggcaagatcgccgaggccttccgcctgccaactgccgaggtgatgttctgcaccctgaacacccacaaagtggacatggacaagctcctggggggccagatcgggctggaggacttcatcttcgcccacgtgaaggggcagcgcaaggaggtggaggtgttcaagtcggaggatgcactcgggctcaccatcacggacaacggggctggctacgccttcatcaagcgcatcaaggagggcagcgtgatcgaccacatccacctcatcagcgtgggcgacatgatcgaggccattaacgggcagagcctgctgggctgccggcactacgaggtggcccggctgctcaaggagctgccccgaggccgtaccttcacgctgaagctcacggagcctcgcaaggccttcgacatgatcagccagcgttcagcgggtggccgccctggctctggcccacaactgggcactggccgagggaccctgcggctccgatcccggggccccgccacggtggaggatctgccctctgcctttgaagagaaggccattgagaaggtggatgacctgctggagagttacatgggtatcagggacacggagctggcggccaccatggtggagctgggaaaggacaaaaggaacccggatgagctggccgaggccctggacgaacggctgggtgactttgccttccctgacgagttcgtctttgacgtctggggcgccattggggacgccaaggtcggccgctactaggactgcccccggaccctgcgatgatgacccgggcgcaacctggtgggggcccccagcagggacactgacgtcaggacccgagcctccagcctgagcctagctcagcagcccaaggacgatggtgaggggaggtggggccaggccccctgccccgctccaatcggtaccatcccctccctggttcccagtctggccggggtccccggcccccctgtgccctgttccccacctacctcagctgggtcaggcacagggaggggagggatcagccaaattgggcggccacccccgcctccaccactttccaccatcagctg

SEQ ID NO: 158677 - DNA, 1928 bp, Artificial Sequence
  derived and/or modified sequence
ggcccggtctggagtttgcggagggccgagccgggtgcgcacggggaggcggaggcagcggcggcggcggcggcggcggcggcggcggcggagcagatgaagaaactgaggccctgtgatgtgaagtgacttgccccccagccacacagctggaccattctggctgctgtctggacaagaagtcgtagggggtgagggtggaagctgggaaacccacaggaggcaaccacactagtttagatcttctggtgaccccacttctcgctgctcatgccgctgggactggggcggcggaaaaaggcgccccctctagtggaaaatgaggaggctgagccaggccgtggagggctgggcgtgggggagccagggcctctgggcggaggtgggtcggggggcccccaaatgggcttgcccccccctcccccagccctgcggccccgcctcgtgttccacacccagctggcccatggcagtcccactggccgcatcgagggcttcaccaacgtcaaggagctgtatggcaagatcgccgaggccttccgcctgccaactgccgaggtgatgttctgcaccctgaacacccacaaagtggacatggacaagctcctggggggccagatcgggctggaggacttcatcttcgcccacgtgaaggggcagcgcaaggaggtggaggtgttcaagtcggaggatgcactcgggctcaccatcacggacaacggggctggctacgccttcatcaagcgcatcaaggagggcagcgtgatcgaccacatccacctcatcagcgtgggcgacatgatcgaggccattaacgggcagagcctgctgggctgccggcactacgaggtggcccggctgctcaaggagctgccccgaggccgtaccttcacgctgaagctcacggagcctcgcaaggccttcgacatgatcagccagcgttcagcgggtggccgccctggctctggcccacaactgggcactggccgagggaccctgcggctccgatcccggggccccgccacggtggaggatctgccctctgcctttgaagagaaggccattgagaaggtggatgacctgctggagagttacatgggtatcagggacacggagctggcggccaccatggtggagctgggaaaggacaaaaggaacccggatgagctggccgaggccctggacgaacggctgggtgactttgccttccctgacgagttcgtctttgacgtctggggcgccattggggacgccaaggtcggccgctactaggactgcccccggaccctgcgatgatgacccgggcgcaacctggtgggggcccccagcagggacactgacgtcaggacccgagcctccagcctgagcctagctcagcagcccaaggacgatggtgaggggaggtggggccaggccccctgccccgctccaatcggtaccatcccctccctggttcccagtctggccggggtccccggcccccctgtgccctgttccccacctacctcagctgggtcaggcacagggaggggagggatcagccaaattgggcggccacccccgcctccaccactttccaccatcagctgccaaactggtccctctgtctccctggggccttgggttctgtttgggggtcatgaccttcctagtttcctgacgcagggaatacaggggagagggttgtccttccccccagcaaatgcaataatgccctcacccctcctgagaggagccccctccctgtggagcctgttacctccgcatttgacacgagtctgctgtgaaccccgcaacctcctccccacctcccatctctccttccaggcccatccctggcccagagcaggagggagggagggacgatggcggtgggtttttgtatctgaatttgctgtcttgaacataaagaatctatctgctgttgg

SEQ ID NO: 158678 - DNA, 1002 bp, Artificial Sequence
  derived and/or modified sequence
atgccgttgggcctcggcaggcggaagaaagctccaccgctagtggagaacgaagaagccgaaccaggcagaggcgggcttggcgtgggtgaacctggccctttaggtggcggagggagcggcggcccacagatgggactgccccccccaccacccgcactccgtcctagactcgtgtttcatacccaacttgcgcacggatcacccactggcagaatcgagggatttactaacgtgaaggaattgtacggaaagattgccgaagcctttcgcctcccaaccgcagaggtaatgttctgtacacttaatacccataaggttgacatggacaaactactgggaggccagataggactggaagatttcatatttgcccatgttaaaggtcagaggaaagaggttgaggtgttcaaatcggaggacgccttgggtctcactataacggataacggggctggctatgcctttatcaagcgcatcaaggagggctccgttatagaccacatccatctcatctccgttggtgatatgattgaagccataaatggccaatcactgttgggctgccggcactatgaagtggcccgtcttcttaaagaactcccacgcgggaggacattcacacttaagctgacggagccccgcaaggctttcgacatgatcagccagagatctgcgggcggaaggcccggatctggcccacaactggggactggaagaggtaccctccgacttcggtcccgtgggcctgctacggtggaagatttgccctctgctttcgaggagaaagcgattgagaaagtggacgatttgttggagtcgtacatgggcatacgagacacagagcttgccgcaaccatggtggaactaggcaaggataaaagaaacccagacgaactggccgaggcgctggacgagaggctgggtgactttgcatttccggacgagttcgtattcgacgtgtggggagcaatcggagacgcgaaggttggtaggtattag

SEQ ID NO: 158679 - DNA, 1002 bp, Artificial Sequence
  derived and/or modified sequence
atgccgttgggcctagggcggcgcaagaaggcccctcccctggtggagaatgaggaggcggagcctggaaggggcggcctaggagtgggggaacccggtccgcttggcgggggcggtagcggtggcccacagatgggtttaccaccccctccacctgccctgcgccccagactggtgttccatactcagctggcgcacggatcccctaccggacggattgaggggttcacgaacgtcaaggaactgtatggaaagatcgctgaggctttccgtctcccaacagcagaggtcatgttttgcactttgaatactcacaaagtggacatggacaagctgcttggcggtcaaatcggattggaggactttatctttgctcatgtcaaaggacagcgcaaggaggttgaggtctttaaaagtgaagacgccctcggtctgacgatcacagacaacggagcgggatacgccttcataaaaaggatcaaagaagggagtgtgatagaccacatccacctcattagtgttggcgacatgatcgaagctattaatggtcagtccctcctcggctgtcggcattatgaagtggcgcggttactcaaagaactgcccagaggaaggacattcacgctcaagcttacggagcctcgcaaggctttcgacatgatttcgcagcggtccgctggaggacgaccggggagcggcccgcagctcgggacgggcaggggcaccttaagactcagatcgcgcggtccagccacagtcgaagatttgccgagcgcttttgaggagaaggctatcgaaaaagtcgatgacctactggagtcttatatggggatcagagacactgaattagctgccactatggtggaacttggcaaggacaaaagaaatcccgacgagctcgcagaggccctggacgagcgcttgggcgatttcgccttcccagatgaatttgtgttcgacgtgtggggggctatcggcgacgcaaaagttggtcggtactag

SEQ ID NO: 158680 - DNA, 1002 bp, Artificial Sequence
  derived and/or modified sequence
atgccgctaggtctagggcgcagaaagaaagcgccgccccttgtagagaacgaagaggccgagcctgggcggggaggcctgggtgtgggtgagcccggcccactgggcgggggcggcagcggcggcccacagatggggctgcctccaccgccgcccgccctgagaccacgcctggtgttccacacccagctggcccacggatctcctaccggacggatcgagggatttactaacgtgaaggagctgtacggaaagatcgcagaagctttcaggttgcctaccgctgaggtgatgttctgtacccttaatactcacaaggtggatatggataagttactcggaggacagattggtctggaggattttatcttcgcacatgtgaagggtcagagaaaagaggtggaggtcttcaaatctgaggatgcgttgggattgacaattaccgacaacggagctggatacgctttcattaaaagaatcaaagaaggaagcgtcatagatcatatccacctgatcagtgtcggggacatgatcgaagccatcaacggccaaagcttgttggggtgtaggcactatgaggtcgcacggcttcttaaggagcttccacggggacgaacattcactttgaaactcactgagccccgtaaagcttttgatatgattagccagcgctcagctggagggcggcccggctcaggtccacagctcggaaccggacgcggaaccttgcggctgaggtccagaggacccgcaacggttgaagatctacccagtgccttcgaagaaaaagcaattgagaaggtcgacgaccttttggagagctatatgggaatccgcgacaccgagctagccgccacaatggtcgaattgggcaaggacaagcgaaaccctgacgagttagccgaggctctcgacgaacggcttggcgactttgccttcccagacgaatttgtttttgacgtttggggcgctatcggggacgccaaggtgggtcggtattag

SEQ ID NO: 158681 - DNA, 1002 bp, Artificial Sequence
  derived and/or modified sequence
atgcccctgggcctgggccgcaggaagaaggccccacccctggtggagaatgaggaggccgagcccggccggggcggcctgggcgtgggggagcccggccccctgggcggcggcggcagcggcggcccccagatgggcctgcccccacctcctccagccctgcggccccggctggtgttccacacccagctggcccacggcagccccaccggcagaattgagggcttcaccaacgtgaaggagctgtatggcaagattgctgaggccttccggctgcccacagctgaggtgatgttctgcaccctgaacacccacaaggtggacatggacaagctgctgggcggccagatcggcctggaggacttcatctttgcccacgtgaagggccagaggaaggaggtggaggtgttcaagtcagaagatgccctgggcctgaccatcacagacaacggggccggctacgccttcatcaagaggatcaaggagggcagcgtcatcgaccacatccacctgatctctgtgggggacatgattgaggccatcaatggccagagcctgctgggctgccgccactatgaggtggcccggctgctgaaggagctgccccggggccgcaccttcaccctgaagctgacagagcccaggaaggcctttgacatgatcagccagaggtctgctgggggccggcccggcagcggcccccagctgggcaccggccggggcaccctgcggctgcggagccggggccctgccaccgtggaggacctgcccagcgcctttgaggagaaggccatcgagaaggtggatgacctgctggagagctacatgggcatccgggacacagagctggccgccaccatggtggagctgggcaaggacaagagaaatccagatgagctggccgaggccctggatgagcggctgggggactttgccttcccagatgaatttgtgtttgatgtgtggggcgccatcggagatgccaaggtgggccgctactag

SEQ ID NO: 158682 - DNA, 1002 bp, Artificial Sequence
  derived and/or modified sequence
atgcccctgggcctgggccggcggaagaaggccccccccctggtggaaaatgaggaagccgagcctgggagagggggacttggcgtgggagaacccggcccactaggcggcggtggtagtggcggtcctcagatggggctgccccctccaccccccgccctgcgcccacggctggtgtttcatacccagctggcgcatgggtcccctacaggccgcatagaagggtttactaatgtcaaggaactgtacgggaaaatcgccgaggccttccgcctgccgaccgccgaagtaatgttctgtacactgaacacgcataaggttgatatggacaagctgttgggtggtcagatcgggttggaggattttatattcgctcacgtgaaggggcaacgcaaggaagtggaggtgtttaaatcagaagacgcactggggcttacaatcacagataatggagcaggttatgcctttataaagcgcatcaaggaaggttccgtaatcgatcacatacacctgatctctgtgggtgacatgattgaggctatcaacggacaatctttactcgggtgtaggcattatgaggtggcgaggttgctaaaagagctgcctcgaggtcgcacctttactctgaagcttaccgaacctagaaaggcattcgatatgatctctcagagatcagctggcggcaggccagggagcggaccacagctgggaacagggaggggcactctgagactgcgcagtcgaggacccgctactgtagaggacctgccatccgccttcgaagagaaggccatagagaaagtcgacgaccttctcgaatcttacatgggcattcgtgacacagaactcgcagccactatggtcgagctgggtaaagacaagcggaatcccgacgagctggctgaagccttagatgaacggctgggcgatttcgcctttcctgacgagttcgtcttcgatgtctggggcgccataggcgacgccaaggttgggcggtattag

SEQ ID NO: 158683 - DNA, 1002 bp, Artificial Sequence
  derived and/or modified sequence
atgcccctgggcctgggccggcggaagaaggccccccccctggtggagaatgaggaggcagagccaggccgcggcggattgggggtaggggagcctggccctctcgggggtggggggagcggcggccctcagatgggcttgccccctcctcccccagccttaaggcctcggctggtgttccatactcagctagctcacgggtcgccaaccgggcggatagaagggttcacgaatgttaaggagctttacggaaagattgcagaagcattcaggctccccaccgccgaagttatgttctgtacattaaacacccacaaagttgacatggacaaactgctgggtggccagattggcctggaggacttcattttcgcacatgttaagggtcaacgcaaagaagtcgaagtgtttaagtctgaggatgcgctagggctgacgatcaccgacaatggtgctggttatgcctttatcaagcggatcaaggagggctctgtgattgatcatattcatctgattagtgtcggcgacatgattgaggcgattaacggacagagtctgctgggatgccgtcattatgaagttgcaagactgctgaaggaactgccccggggaagaacctttacactcaaattgactgagccaaggaaggcctttgacatgatcagccagagaagcgctgggggacgcccaggctcaggaccgcagcttggcacgggacgggggactcttcgccttcgatcacggggacctgctactgtcgaggacctgccaagcgcttttgaggaaaaggccatcgagaaggtggacgacctgcttgagagttatatgggtatcagggatacggaattggctgccaccatggtcgaacttggaaaggacaagaggaaccccgacgaactggccgaggcactggatgaacgattaggtgacttcgctttcccagatgagtttgtgttcgatgtatggggggccatcggggatgccaaagttgggcgttactag

SEQ ID NO: 158684 - DNA, 1002 bp, Artificial Sequence
  derived and/or modified sequence
atgcccctgggcctgggccggcggaagaaggccccccccctggtggagaacgaagaggctgaacccggccggggaggccttggagtcggcgagcccggcccactcgggggtggcggcagtggcggcccccaaatggggctgcctccccccccacctgctctgcgtcctagactggtgtttcacacccagctcgctcacggcagccccacaggccgcattgagggcttcactaacgtgaaggagctgtacggtaagatcgctgaagccttccgactaccaactgcagaggttatgttctgtaccctaaatacacataaggtcgacatggacaaattgttgggcggccaaataggattagaagatttcatctttgctcacgtgaaaggccagaggaaagaagtcgaggtgtttaaaagcgaggacgcacttggcctcaccataaccgataatggagcaggatacgcatttatcaaaaggattaaagaaggatccgttatcgaccacattcatttgatctcggtcggcgacatgatagaagctattaacggacagtcactgctgggctgtaggcactatgaggtggcacgtctcctgaaagagctgcctcgagggcgcacctttaccctaaagttgaccgagccacggaaggcgttcgatatgatctcccagcggagcgccgggggacgaccggggtctggtccgcaactcggcaccgggcgagggaccttgagactgcggtctagagggccggcaactgtagaagacctaccctcagcttttgaggagaaggcaatcgagaaagtagatgacctcctcgagtcctacatgggtatacgagacactgagttggcagccacgatggttgaattaggaaaggacaaacgtaacccagacgaactggccgaggccctggatgagagactgggcgatttcgcatttcctgatgagtttgtcttcgacgtgtggggcgccattggggacgccaaggttggcagatactag

SEQ ID NO: 158685 - DNA, 1002 bp, Artificial Sequence
  derived and/or modified sequence
atgcccctgggcctaggcagacgaaaaaaagcccctcccctggtagaaaacgaggaggcagaaccgggtcgaggaggcctgggagttggggagccaggaccacttggcggaggagggagtggtggccctcagatgggacttcctcctccccctccagcgctgcggccacggctggtgttccacacacagcttgcccacgggtcacccaccggacgcatagagggattcactaacgttaaagagctgtacggcaaaattgccgaggcctttagacttccaacagcagaagtcatgttttgcaccctgaatacccataaggttgatatggataagctgttaggcggacaaatcgggcttgaagacttcatttttgcacatgtgaaaggtcagcgcaaggaagtggaggtttttaaatctgaggacgctcttgggctgaccataacggataatggagccggttatgcattcattaagaggattaaggaagggtccgttatagaccacatacacttgatatcagtgggagacatgatcgaggctatcaatgggcagagcctgttgggctgtcgccactacgaggtggctagactgctaaaggagctgcctcgcggtcggactttcacgttaaaacttaccgagccccgaaaagctttcgatatgatcagtcagcgcagtgccggtggccgacccggaagtggacctcagttgggaaccggacggggtactttgcgcctgcgcagtcgaggacctgcaaccgtcgaggatctgccatctgcctttgaggagaaggccatcgagaaggtcgacgatctcctggagagttacatgggcattagggatacagagctggccgcaacgatggtcgagctgggcaaggacaaacggaaccccgacgaattggctgaagctcttgatgagcgactcggagactttgctttccccgacgagtttgtttttgacgtctggggagccatcggggatgctaaggtgggcaggtattag

SEQ ID NO: 158686 - DNA, 1002 bp, Artificial Sequence
  derived and/or modified sequence
atgcctcttggactaggtagacgaaagaaggcgccacccctggttgagaacgaagaagcagagcccggtcgaggaggcttgggtgttggcgagcctggacccctcggaggaggaggttccggcggaccacagatgggtctcccacctccaccaccagcgctgaggcccagactcgtcttccacactcaactggcccatggaagtccgacaggaaggatagaagggttcaccaatgtcaaagagctgtatgggaaaattgccgaagcgttcaggctgcctaccgctgaggtgatgttttgtaccctcaacacacacaaagttgacatggataagctgttgggcggtcaaatcggcctcgaggacttcatttttgctcacgttaagggtcaacggaaggaggttgaggtattcaagagcgaggatgctctgggcttaacaataactgataacggagctggttatgcatttattaaacgaatcaaggagggttctgttatcgaccatatccatctcatcagcgtcggggatatgatagaggcgataaatgggcagagcctgcttggttgccggcactacgaggtggcccgtctcctgaaggagctgcccagaggaagaaccttcacactcaaacttacagagcctcgaaaagcctttgatatgattagccaacgcagtgccggaggcagaccagggagcgggccacagctgggaaccggccgaggcacattacgtctccgcagccggggtcccgctacggtggaggatcttccatccgcctttgaggaaaaggctattgagaaggttgacgatctattagaatcgtatatgggaatcagagacactgagttggcggctactatggtcgaactcgggaaggataagcgcaatccggacgaactcgccgaagcacttgacgagaggttaggtgatttcgcttttccggacgagtttgtttttgacgtgtggggtgcaatcggagatgccaaagtcggcaggtattag

SEQ ID NO: 158687 - DNA, 1002 bp, Artificial Sequence
  derived and/or modified sequence
atgccactaggccttgggagacggaaaaaggccccacctctggttgagaatgaagaggccgagcccggacggggaggcctgggcgtcggcgaaccaggccctctgggaggtggaggctcaggaggaccccaaatggggctgccccctcctcccccagctttgaggccgagactggtattccacacccagcttgcccacggctctcctacgggacgcattgagggctttactaatgtaaaggaactctacgggaaaatcgcagaagcgtttaggctgcctactgctgaagtgatgttctgtacgttaaatacacataaggtagacatggacaagttactgggagggcaaatcggtctcgaggacttcatatttgcccatgttaaagggcagaggaaggaggtcgaagtcttcaaaagtgaggatgccctgggactgactatcaccgataacggggctggctatgcttttataaagagaatcaaggaggggtccgtaatcgatcacatccatttgatatctgtcggtgacatgatagaggccatcaacggccagtcccttcttggctgtcgtcattacgaagtcgcgaggctgctgaaggagcttcccaggggccgtacctttacccttaagttgacagaaccacggaaagcttttgatatgataagccaaaggagcgccggaggcaggcctggcagcgggcctcaacttgggaccggcaggggaaccctccgccttcgtagccgcggtccagccactgtggaggatctgccctccgcttttgaggaaaaggccatagaaaaggtggatgatctgctggaatcctatatggggatcagagacaccgagttagctgcgacaatggtcgagttaggtaaggataagcgcaatcccgatgagttagccgaggctttggacgagcggttgggcgattttgctttccccgatgaattcgtattcgacgtgtggggagcaatcggagacgccaaagttggtcggtattag

SEQ ID NO: 158688 - DNA, 456 bp, Artificial Sequence
  derived and/or modified sequence
atgcacgccggcaagcggagccccctgacccagagcatcagctgcgtctgcctgccagagctgggcgctctgtgggagatcgaatctgcgcgggtcaacctcagggtctcggggcgcgaggcgagccgagagatggagtctagcccccgcccacaccggatcgctggcgtgaaacgcttcctaaagcatgccggaaaatggtctcttcgctggtttctttctcccagatggattttgcagtttcggcgctgggcaagaaagtggtccaggttcacgcgcagcagttttcaagtgcgatgggctgcagttccagctggcaagtgttctcagcatcaagggttaagcgcagtggctacggccagtccgggcgtattctgggagatggaatttgacgtgtcatctcctttaacagagggcgcaggcagtcctatgagcagtaaacatgcaggcgagtag

SEQ ID NO: 158689 - protein, 151 aa, Artificial Sequence
  derived and/or modified sequence
MSKNTVSSARFRKVDVDEYDENKFVDEEDGGDGQAGPDEGEVDSCLRQGNMTAALQAALKNPPINTKSQAVKDRAGSIVLKVLISFKANDIEKAVQSLDKNGVDLLMKYIYKGFESPSDNSSAMLLQWHEKALAAGGVGSIVRVLTARKTV

SEQ ID NO: 158690 - protein, 135 aa, Artificial Sequence
  derived and/or modified sequence
MSKNTVSSARFRKVDVDEYDENKFVDEEDGGDGQAGPDEGEVDSCLRQGNMTAALQAALKNPPINTKSQAVKDRAGSIVLKVLISFKANDIEKAVQSLDKNGVDLLMKYIYKGFESPSDNSSAMLLQWHEKVPLV

SEQ ID NO: 158691 - DNA, 456 bp, Artificial Sequence
  derived and/or modified sequence
atgagcaagaacaccgtgagcagcgccagattcagaaaggtggacgtggacgagtacgacgagaacaagttcgtggacgaggaggacggcggcgacggccaggccggccccgacgagggcgaggtggacagctgcctgagacagggcaacatgaccgccgccctgcaggccgccctgaagaacccccccatcaacaccaagagccaggccgtgaaggacagagccggcagcatcgtgctgaaggtgctgatcagcttcaaggccaacgacatcgagaaggccgtgcagagcctggacaagaacggcgtggacctgctgatgaagtacatctacaagggcttcgagagccccagcgacaacagcagcgccatgctgctgcagtggcacgagaaggccctggccgccggcggcgtgggcagcatcgtgagagtgctgaccgccagaaagaccgtgtag

SEQ ID NO: 158692 - DNA, 408 bp, Artificial Sequence
  derived and/or modified sequence
atgagcaagaacaccgtgagcagcgccagattcagaaaggtggacgtggacgagtacgacgagaacaagttcgtggacgaggaggacggcggcgacggccaggccggccccgacgagggcgaggtggacagctgcctgagacagggcaacatgaccgccgccctgcaggccgccctgaagaacccccccatcaacaccaagagccaggccgtgaaggacagagccggcagcatcgtgctgaaggtgctgatcagcttcaaggccaacgacatcgagaaggccgtgcagagcctggacaagaacggcgtggacctgctgatgaagtacatctacaagggcttcgagagccccagcgacaacagcagcgccatgctgctgcagtggcacgagaaggtgcccctggtgtag

SEQ ID NO: 158693 - DNA, 1838 bp, Artificial Sequence
  derived and/or modified sequence
gctgggctgggcttgctgaggtagaggcagcgccaagaagaggcctttgccgctggtcgggattgggatgtcgaagaacacagtgtcgtcggcccgcttccggaaggtggacgtggatgaatatgacgagaacaagttcgtggacgaagaagatgggggcgacggccaggccgggcccgacgagggcgaggtggactcctgcctgcggcaaggaaacatgacagctgccctacaggcagctctgaagaacccccctatcaacaccaagagtcaggcagtgaaggaccgggcaggcagcattgtcttgaaggtgctcatctcttttaaagctaatgatatagaaaaggcagttcaatctctggacaagaatggtgtggatctcctaatgaagtatatttataaaggatttgagagcccgtctgacaatagcagtgctatgttactgcaatggcatgaaaaggcacttgctgctggaggagtagggtccattgttcgtgtcttgactgcaagaaaaactgtgtagtctggcaggaagtggattatctgcctcgggagtgggaattgctggtacaaagaccaaaacaaccaaatgccaccgctgccctgtgggtagcatctgtttctctcagctttgccttcttgctttttcatatctgtaaagaaaaaaattacatatcagttgtcctttaatgaaaattgggataatatagaagaaattgtgttaaaatagaagtgtttcatcctttcaaaaccatttcagtgatgtttataccaatctgtatatagtataatttacattcaagtttaattgtgcaacttttaacccctgttggctggttttttgttctgttttgttttgtattatttttaactaatactgagagatttggtcagaatttgaggccagtttcctagctcattgctagtcaggaaatgatatttataaaaaatatgagagactggcagctattaacattgcaaaactggaccatatttcccttatttaataagcaaaatatgtttttggaataagtggtgggtgaataccactgctaagttatagctttgtttttgcttgcctcctgattatctgtactgtgggtttaagtatgctactttctctcagcatccaataatcatggcccctcaatttatttgtggtcacccagggttcagagcaagaagtcttgctttatacaaatgtatccataaaatatcagagcttgttgggcatgaacatcaaacttttgttccactaatatggctctgtttggaaaaaactgcaaatcagaaagaatgatttgcagaaagaaagaaaaactatggtgtaatttaaactctgggcagcctctgaatgaaatgctactttctttagaaatataatagctgccttagacattatgaggtatacaactagtatttaagataccatttaatatgccccgtaaatgtcttcagtgttcttcagggtagttgggatctcaaaagatttggttcagatccaaacaaatacacattctgtgttttagctcagtgttttctaaaaaaagaaactgccacacagcaaaaaattgtttactttgttggacaaaccaaatcagttctcaaaaaatgaccggtgcttataaaaagttataaatatcgagtagctctaaaacaaaccacctgaccaagagggaagtgagcttgtgcttagtatttacattggatgccagttttgtaatcactgacttatgtgcaaactggtgcagaaattctataaactctttgctgtttttgatacctgctttttgtttcattttgttttgttttgtaaaaatgataaaacttcagaaaat

SEQ ID NO: 158694 - DNA, 456 bp, Artificial Sequence
  derived and/or modified sequence
atgtccaaaaacaccgtgtcctctgctcgcttccgtaaggtcgatgttgatgaatacgatgaaaacaagttcgtcgacgaagaggacggcggcgacggccaggccgggcctgacgagggagaagtggattcatgcctgcgtcaggggaacatgacagctgcccttcaggcagcccttaaaaatcctcctattaatacaaaaagccaggccgttaaggaccgggcgggctccatcgtcctgaaagtgctgatctccttcaaagcgaacgatattgaaaaggcagtacagtccttggataaaaacggcgtggatctgctgatgaagtatatctataaaggatttgagtcaccttcagataatagttcagctatgctgttgcaatggcatgagaaggctctcgccgctgggggcgtgggcagcatagtaagggtgctgactgctagaaaaactgtctag

SEQ ID NO: 158695 - DNA, 408 bp, Artificial Sequence
  derived and/or modified sequence
atgtccaagaatacagtgtcatctgcacggtttcgcaaggtggacgtcgacgaatacgacgaaaataaattcgtcgatgaagaagatggcggagacggccaggccgggccggatgaaggcgaggttgacagttgtctccggcagggcaatatgaccgccgccctgcaagccgcactcaagaaccctcctatcaacacaaaatctcaagctgtgaaagacagagccgggagcattgtcctcaaggtgctgatttctttcaaggcaaatgatatcgagaaggcggtacaatctcttgacaagaacggggtggatttgctgatgaaatatatatataaggggttcgagtctccatctgataattccagtgcgatgcttctacaatggcatgagaaagttcctctggtgtag

SEQ ID NO: 158696 - DNA, 622 bp, Artificial Sequence
  derived and/or modified sequence
ctttgccgctggtcgggattgggatgtcgaagaacacagtgtcgtcggcccgcttccggaaggtggacgtggatgaatatgacgagaacaagttcgtggacgaagaagatgggggcgacggccaggccgggcccgacgagggcgaggtggactcctgcctgcggcaaggaaacatgacagctgccctacaggcagctctgaagaacccccctatcaacaccaagagtcaggcagtgaaggaccgggcaggcagcattgtcttgaaggtgctcatctcttttaaagctaatgatatagaaaaggcagttcaatctctggacaagaatggtgtggatctcctaatgaagtatatttataaaggatttgagagcccgtctgacaatagcagtgctatgttactgcaatggcatgaaaaggtgcctcttgtatgattccagatatggaggaggcccgggaagcccacagaggtacagcatgtcatctgcctcaaggtggtgctacttcaccacattgatgatccaaccacaagcaacatgggacacagcattcactttaacatttctattttcctttatcatttctgttacttgagtgtgtaagagtaatcaacataaataatcta

SEQ ID NO: 158697 - DNA, 456 bp, Artificial Sequence
  derived and/or modified sequence
atgagcaagaacacagtgagcagcgcccgcttcaggaaggtggatgtggatgaatatgatgagaacaagtttgtggatgaggaggatggaggagatggccaggccggcccagatgaaggagaggtggacagctgcctgcggcagggcaacatgacagctgccctgcaggccgccctgaagaacccccccatcaacaccaagagccaggccgtgaaggacagagctggcagcatcgtgctgaaggtgctgatctccttcaaggccaatgacatcgagaaggctgtgcagagcctggacaagaatggagtggacctgctgatgaagtacatctacaagggctttgagagccccagcgacaacagcagcgccatgctgctgcagtggcatgagaaggccctggccgccggcggcgtgggcagcatcgtgcgggtgctgacagccaggaagacagtgtag

SEQ ID NO: 158698 - DNA, 408 bp, Artificial Sequence
  derived and/or modified sequence
atgagcaagaacacagtgagcagcgcccgcttcaggaaggtggatgtggatgaatatgatgagaacaagtttgtggatgaggaggatggaggagatggccaggccggcccagatgaaggagaggtggacagctgcctgcggcagggcaacatgacagctgccctgcaggccgccctgaagaacccccccatcaacaccaagagccaggccgtgaaggacagagctggcagcatcgtgctgaaggtgctgatctccttcaaggccaatgacatcgagaaggctgtgcagagcctggacaagaatggagtggacctgctgatgaagtacatctacaagggctttgagagccccagcgacaacagcagcgccatgctgctgcagtggcatgagaaggtgcccctggtgtag

SEQ ID NO: 158699 - DNA, 456 bp, Artificial Sequence
  derived and/or modified sequence
atgagcaagaacaccgtgagcagcgcccggttccggaaggtggacgtcgatgagtatgacgagaacaaattcgtcgacgaggaagatggtggggatggtcaggctgggcccgatgagggcgaagtggactcctgcctgcgccaggggaacatgaccgcagcactgcaggcagccctaaaaaatccaccaattaatacaaaaagtcaagctgtgaaagatcgcgccggaagtatcgtgctgaaggtgcttatcagcttcaaagcaaatgacattgagaaggccgtccagtcactggacaagaacggcgtggatctcctcatgaaatatatctataagggcttcgagagcccgtccgacaatagtagcgcaatgctgctccagtggcacgagaaggccctggcggcaggtggcgttgggagcatagtgcgggtcctgacggcgagaaagaccgtctag

SEQ ID NO: 158700 - DNA, 408 bp, Artificial Sequence
  derived and/or modified sequence
atgagcaagaacaccgtgagcagcgcccggttccggaaggtggacgttgatgagtatgatgagaacaaatttgttgatgaggaagacgggggtgatggtcaagctggtcccgacgagggcgaggtggacagctgtttgcgacaggggaatatgacagctgctttgcaggcagcccttaagaatccccccattaatacaaaaagccaggctgtgaaagatcgggccggtagcatagttctcaaggtgctaattagctttaaagcgaacgatatcgagaaggccgtacagtctttagacaaaaacggcgtcgacctgctgatgaagtacatctataagggatttgaatcgccctctgacaatagttctgccatgctgctgcaatggcacgaaaaagtgcctctggtgtag

SEQ ID NO: 158701 - DNA, 456 bp, Artificial Sequence
  derived and/or modified sequence
atgtctaaaaacaccgtgtcttccgccaggttcagaaaagtcgatgttgacgagtacgatgagaataaattcgttgacgaggaggacggcggagatggccaagccggtccagatgagggcgaggtggactcctgtctccggcaggggaatatgacggcagccctgcaggcagcactgaagaaccctcctatcaatacaaagagccaggctgtgaaagatagggcgggtagcatcgtactcaaagtgctgatcagctttaaggctaatgatatcgagaaagccgtgcaatcattggataaaaatggggtggacctgttaatgaagtacatttataaaggattcgaaagcccatcggataatagttccgcaatgctcctgcagtggcacgagaaggccctcgctgccggtggcgtaggatctatcgtgagagtgttgaccgcaagaaagacagtctag

SEQ ID NO: 158702 - DNA, 408 bp, Artificial Sequence
  derived and/or modified sequence
atgagtaaaaataccgtcagttccgcaagatttagaaaggtggatgtggacgaatatgacgagaataaatttgtcgacgaggaagatggtggggacggacaggctggccctgacgagggggaagtggactcttgccttcggcaaggcaacatgaccgccgctctacaggccgcactaaaaaacccccctataaacacaaaaagtcaagcggtgaaggatcgcgcaggctccatagtcctaaaggtgctcattagttttaaagcgaatgacatcgaaaaagctgtgcagagcctggacaagaatggagtggatttacttatgaagtacatttataaaggattcgagagtcccagtgataacagttcagctatgctcttacagtggcatgagaaggtccctctcgtgtag

SEQ ID NO: 158703 - protein, 372 aa, Artificial Sequence
  derived and/or modified sequence
MAYHSFLVEPISCHAWNKDRTQIAICPNNHEVHIYEKSGAKWTKVHELKEHNGQVTGIDWAPESNRIVTCGTDRNAYVWTLKGRTWKPTLVILRINRAARCVRWAPNENKFAVGSGSRVISICYFEQENDWWVCKHIKKPIRSTVLSLDWHPNNVLLAAGSCDFKCRIFSAYIKEVEERPAPTPWGSKMPFGELMFESSSSCGWVHGVCFSASGSRVAWVSHDSTVCLADADKKMAVATLASETLPLLALTFITDNSLVAAGHDCFPVLFTYDAAAGMLSFGGRLDVPKQSSQRGLTARERFQNLDKKASSEGGTAAGAGLDSLHKNSVSQISVLSGGKAKCSQFCTTGMDGGMSIWDVKSLESALKDLKIK

SEQ ID NO: 158704 - protein, 102 aa, Artificial Sequence
  derived and/or modified sequence
MAYHSFLVEPISCHAWNKDRTQIAICPNNHEVHIYEKSGAKWTKVHELKEHNGQVTGIDWAPESNRIVTCGTDRNAYVWTLKGRTWKPTLVILRINRAARCV

SEQ ID NO: 158705 - protein, 130 aa, Artificial Sequence
  derived and/or modified sequence
MAYHSFLVEPISCHAWNKDRTQIAICPNNHEVHIYEKSGAKWTKVHELKEHNGQVTGIDWAPESNRIVTCGTDRNAYVWTLKGRTWKPTLVILRINRAARCVRWAPNENKFAVGSGSRVISICYFEQEND

SEQ ID NO: 158706 - protein, 83 aa, Artificial Sequence
  derived and/or modified sequence
MAYHSFLVEPISCHAWNKDRTQIAICPNNHEVHIYEKSGAKWTKVHELKEHNGQVTGIDWAPESNRIVTCGTDRNAYVWTLKG

SEQ ID NO: 158707 - protein, 133 aa, Artificial Sequence
  derived and/or modified sequence
MAYHSFLVEPISCHAWNKDRTQIAICPNNHEVHIYEKSGAKWTKVHELKEHNGQVTGIDWAPESNRIVTCGTDRNAYVWTLKGRTWKPTLVILRINRAARCVRWAPNENKFAVGSGSRVISICYFEQENDWWV

SEQ ID NO: 158708 - protein, 21 aa, Artificial Sequence
  derived and/or modified sequence
MAYHSFLVEPISCHAWNKDRT

SEQ ID NO: 158709 - protein, 108 aa, Artificial Sequence
  derived and/or modified sequence
MAYHSFLVEPISCHAWNKDRTQIAICPNNHEVHIYEKSGAKWTKVHELKEHNGQVTGIDWAPESNRIVTCGTDRNAYVWTLKGRTWKPTLVILRINRAARCVRWAPNE

SEQ ID NO: 158710 - protein, 128 aa, Artificial Sequence
  derived and/or modified sequence
MAYHSFLVEPISCHAWNKDRTQIAICPNNHEVHIYEKSGAKWTKVHELKEHNGQVTGIDWAPESNRIVTCGTDRNAYVWTLKGRTWKPTLVILRINRAARCVRWAPNENKFAVGSGSRVISICYFEQE

SEQ ID NO: 158711 - DNA, 1119 bp, Artificial Sequence
  derived and/or modified sequence
atggcttaccattcattcctagtggagccaataagctgccacgcctggaacaaagatagaacacagatcgctatatgccctaacaaccacgaagttcatatttatgaaaagagtggcgccaaatggacaaaagtgcatgagctgaaggaacacaatggacaggtgactggtattgattgggcgcccgaatctaacaggattgtcacttgcggaactgatagaaacgcctatgtttggactttaaagggcagaacatggaagcccacactcgtgattctcaggattaaccgggctgccagatgcgttagatgggcacctaatgagaataaatttgccgtggggagcggaagccgggtgatttctatttgttatttcgagcaggagaacgactggtgggtgtgtaagcatataaagaagccaatccggtcaactgttctcagcctcgattggcacccaaacaatgtactcctggccgccggttcctgtgattttaaatgtagaatattctcagcatacattaaagaggtcgaagagcgcccggcccctaccccctgggggagcaagatgccctttggcgaactgatgttcgagagctcaagctcctgtgggtgggtgcacggcgtgtgtttctcagcctccggctctcgagtcgcctgggtgagccacgacagcactgtgtgtcttgcagacgccgataaaaaaatggccgtcgccactttagcctctgaaacgttgccccttttagctctgacatttatcaccgacaatagtctggtggcagcaggacatgattgcttccctgtgttgtttacttacgatgcggccgctggcatgctgtcattcggaggaagactggatgtccccaagcaaagcagccagcgaggactgactgcccgcgaaaggttccagaacctagacaagaaggcctccagtgagggcgggactgctgccggtgctggcctggactcattgcacaaaaactctgtatcccagatttcggtgctcagcggaggtaaggctaagtgctcccaattctgtaccaccggcatggatggaggaatgtccatttgggatgtgaagagcctggaatccgctctgaaagaccttaagattaagtag

SEQ ID NO: 158712 - DNA, 309 bp, Artificial Sequence
  derived and/or modified sequence
atggcataccacagttttctcgtggaacccattagctgtcacgcgtggaacaaagatcgtacccaaatcgccatttgtcctaacaaccacgaggttcacatttatgagaaatcgggagctaagtggaccaaagtgcacgagttgaaagaacacaacgggcaagtgacagggatcgactgggcccccgagtctaaccgcatcgtgacctgtggcaccgatcggaatgcctacgtgtggacactcaaggggcggacctggaaaccgactcttgtcatattgcgcatcaatcgggccgcacgatgcgtctag

SEQ ID NO: 158713 - DNA, 393 bp, Artificial Sequence
  derived and/or modified sequence
atggcatatcactcttttctggtcgagcccatttcttgtcacgcctggaataaagatcgtacacagatcgccatctgtcctaataaccatgaggtgcacatctatgagaagtccggagccaaatggacaaaagtgcacgaattgaaggaacacaatgggcaggtgacaggtatcgattgggccccagagagcaaccgaatagtcacgtgtgggaccgatcggaacgcttacgtctggaccctcaaaggcaggacctggaagccaacactggtgattctgagaattaatagagcagcccgatgtgtgcgatgggctccaaatgagaataaattcgcagtgggcagtgggagtcgagttatctccatttgctacttcgaacaggagaatgattag

SEQ ID NO: 158714 - DNA, 252 bp, Artificial Sequence
  derived and/or modified sequence
atggcctaccactccttcctggtggagcctatttcatgtcacgcctggaataaggacagaacacagatcgctatctgtcccaataaccatgaggtgcatatttatgagaaatcaggcgccaagtggacaaaagtccacgaactgaaggagcacaacggacaggtaacaggcatagactgggcgccagaaagcaaccggatcgtgacttgtgggaccgatcggaatgcctatgtatggacactgaaggggtag

SEQ ID NO: 158715 - DNA, 402 bp, Artificial Sequence
  derived and/or modified sequence
atggcatatcactctttcctggtcgaacccatcagttgtcatgcctggaataaagatcgaactcagattgccatatgtcctaataaccacgaagtccatatctacgagaaatctggggccaaatggacgaaggtacatgagctgaaggaacataacggccaagtgacgggcatcgactgggcccctgagagcaaccggatcgtcacatgtggcactgaccgaaacgcttatgtttggacattgaagggacgcacatggaagcccacattagtgattctaagaatcaaccgggctgcccgctgcgtgcggtgggcccccaatgagaacaagttcgccgtgggaagcggtagccgagtgattagtatatgttattttgagcaggaaaacgactggtgggtatag

SEQ ID NO: 158716 - DNA, 66 bp, Artificial Sequence
  derived and/or modified sequence
atggcttatcactcatttctcgtggagcccattagttgccatgcctggaacaaggacagaacatag

SEQ ID NO: 158717 - DNA, 402 bp, Artificial Sequence
  derived and/or modified sequence
atggcttaccacagctttctggtggagcctatttcatgccacgcatggaacaaagatcggacccagattgctatttgtcccaacaaccatgaggtacacatctacgaaaaatcaggggcaaaatggaccaaggtgcacgagctaaaagaacacaacgggcaagtgacaggtatcgattgggctcctgagagcaacaggattgtcacatgtgggaccgatagaaacgcttatgtttggactctaaaaggacggacctggaaaccgacgttagttatcctaagaataaatcgagccgccaggtgtgtgaggtgggcaccaaacgagaacaagttcgctgtcggctcaggcagccgcgttatttccatttgctacttcgagcaggagaacgattggtgggtctag

SEQ ID NO: 158718 - DNA, 327 bp, Artificial Sequence
  derived and/or modified sequence
atggcctatcatagttttctggtcgagcccatctcttgccacgcctggaacaaggatcgcactcagatagcaatctgccctaataatcatgaggtccatatttacgagaagtcaggagccaaatggaccaaggtgcacgaactcaaagagcacaacgggcaagtcacaggaatagactgggcaccagagagcaataggatcgtgacttgcggcacagatcggaatgcttatgtatggacgctgaagggtcggacttggaaaccgacactggtgatcctgcggatcaacagggccgcacggtgtgtgaggtgggcacctaatgagtag

SEQ ID NO: 158719 - DNA, 1119 bp, Artificial Sequence
  derived and/or modified sequence
atggcctaccattccttcctcgtggaacccataagttgtcatgcttggaataaagatcgcacccagattgccatttgccctaacaaccatgaagtacatatttatgaaaaatcaggcgcaaagtggactaaggttcacgagctgaaagaacataatggccaggtgacaggcattgattgggctcccgagtctaacagaatcgtcacatgcggaacagatagaaacgcttatgtgtggacgctgaaaggaaggacttggaagccaaccttagtgattctccgtattaacagggctgctcggtgcgtacggtgggcccctaatgagaacaaattcgcggtaggcagtggctcccgcgtgatcagtatatgctacttcgagcaggaaaatgattggtgggtgtgtaagcacattaagaagcctatcaggtccaccgtcctcagcctggattggcacccaaataatgtcctcctagccgccggttcctgtgactttaagtgccgaattttctctgcatacatcaaagaagtggaggaaaggcctgcacctacgccttggggctccaaaatgcctttcggggaactgatgttcgaatcctctagctcttgcgggtgggtgcacggcgtgtgcttctcggctagcggctctcgggttgcctgggtgtcacacgattctactgtttgcctggccgacgccgacaagaagatggccgtcgctaccctggcaagcgaaactctccccctcctcgcgttaacattcataaccgataattcgctggtcgccgccggacacgactgttttcccgtgctgtttacatacgatgctgcagccggaatgctctcatttggaggacgactggatgtgcctaagcagagttcccagcgcggactgaccgccagggagcggtttcaaaacctggacaagaaggcttcctccgagggaggaactgccgcaggagccggcttagacagtctccacaagaactccgtttctcagatatctgttctgtccggcgggaaagctaaatgctctcagttctgtacaaccgggatggatggaggaatgtcaatctgggacgtgaaatccctggagagcgcgctcaaggatctgaagattaagtag

SEQ ID NO: 158720 - DNA, 387 bp, Artificial Sequence
  derived and/or modified sequence
atggcctatcactcatttcttgtggagccgatctcctgccatgcttggaataaagatcggacccagattgccatttgtccaaataatcacgaggtgcacatatacgagaaatcaggagcaaagtggacgaaggtccacgaactgaaggagcacaacggccaagtgaccgggatcgactgggcccctgaaagtaacagaatcgttacttgtgggacagatcgaaacgcctatgtctggactctaaagggcagaacttggaaacccactttagtgattctcagaattaaccgagccgcccgctgtgtgcggtgggcccctaacgaaaacaagttcgccgttggctccgggagtagagtcatttctatttgctacttcgaacaggagtag

SEQ ID NO: 158721 - DNA, 402 bp, Artificial Sequence
  derived and/or modified sequence
atggcttaccactcttttcttgtagagccaatatcatgtcatgcctggaataaggatagaacacagattgcaatttgcccaaataatcatgaggtgcacatttatgaaaagagcggggccaagtggactaaggtgcacgaacttaaagagcataacggacaagtcactggcattgattgggcaccagaaagcaatagaattgttacctgcggaacggataggaacgcttatgtttggactctgaagggccgaacgtggaagcccaccttagtcatcctgagaattaatagggcagccaggtgtgtgaggtgggctcctaacgaaaataaattcgccgtggggtcaggaagtcgtgtcatctcgatctgttacttcgagcaagaaaacgattggtgggtgtag

SEQ ID NO: 158722 - DNA, 1119 bp, Artificial Sequence
  derived and/or modified sequence
atggcctaccacagcttcctggtggagcccatcagctgccacgcctggaacaaggacaggacccagatcgccatctgccccaacaaccacgaggtgcacatctatgagaagagcggggccaagtggaccaaggtgcatgagctgaaggagcacaacggccaggtgacaggcatcgactgggcccctgagagcaacagaattgtgacctgtggcacagacagaaatgcctacgtgtggaccctgaagggccgcacctggaagcccaccctggtgatcctgcgcatcaacagagctgcccgctgtgtgcgctgggccccaaatgaaaacaagtttgctgtgggcagcggcagcagggtcatcagcatctgctactttgagcaggagaatgactggtgggtgtgcaagcacatcaagaagcccatccgcagcacagtgctgagcctggactggcaccccaacaacgtgctgctggccgccggcagctgtgacttcaagtgccgcatcttcagcgcctacatcaaggaggtggaggagaggcctgcccccaccccctggggcagcaagatgccctttggagagctgatgtttgagagcagcagcagctgtggctgggtgcacggcgtgtgcttcagcgccagcggcagccgggtggcctgggtgtcccatgacagcacagtgtgcctggctgatgctgacaagaagatggctgtggccaccctggccagcgagaccctgcccctgctggccctgaccttcatcacagacaacagcctggtggccgccggccatgactgcttccctgtgctcttcacctatgatgctgctgctggcatgctgagctttggaggccgcctggatgtgcccaagcagagcagccagaggggcctgacagcccgggagcgcttccagaacctggacaagaaggccagcagcgagggcggcacagctgctggagctggcctggacagcctgcacaagaacagcgtgtcccagatctctgtgctgagcggcggcaaggccaagtgcagccagttctgcaccaccggcatggatggcggcatgagcatctgggatgtgaagagcctggagagcgccctgaaggacctgaagatcaagtag

SEQ ID NO: 158723 - DNA, 309 bp, Artificial Sequence
  derived and/or modified sequence
atggcctaccacagcttcctggtggagcccatcagctgccacgcctggaacaaggacaggacccagatcgccatctgccccaacaaccacgaggtgcacatctatgagaagagcggggccaagtggaccaaggtgcatgagctgaaggagcacaacggccaggtgacaggcatcgactgggcccctgagagcaacagaattgtgacctgtggcacagacagaaatgcctacgtgtggaccctgaagggccgcacctggaagcccaccctggtgatcctgcgcatcaacagagctgcccgctgtgtgtag

SEQ ID NO: 158724 - DNA, 393 bp, Artificial Sequence
  derived and/or modified sequence
atggcctaccacagcttcctggtggagcccatcagctgccacgcctggaacaaggacaggacccagatcgccatctgccccaacaaccacgaggtgcacatctatgagaagagcggggccaagtggaccaaggtgcatgagctgaaggagcacaacggccaggtgacaggcatcgactgggcccctgagagcaacagaattgtgacctgtggcacagacagaaatgcctacgtgtggaccctgaagggccgcacctggaagcccaccctggtgatcctgcgcatcaacagagctgcccgctgtgtgcgctgggccccaaatgaaaacaagtttgctgtgggcagcggcagcagggtcatcagcatctgctactttgagcaggagaatgactag

SEQ ID NO: 158725 - DNA, 252 bp, Artificial Sequence
  derived and/or modified sequence
atggcctaccacagcttcctggtggagcccatcagctgccacgcctggaacaaggacaggacccagatcgccatctgccccaacaaccacgaggtgcacatctatgagaagagcggggccaagtggaccaaggtgcatgagctgaaggagcacaacggccaggtgacaggcatcgactgggcccctgagagcaacagaattgtgacctgtggcacagacagaaatgcctacgtgtggaccctgaagggctag

SEQ ID NO: 158726 - DNA, 402 bp, Artificial Sequence
  derived and/or modified sequence
atggcctaccacagcttcctggtggagcccatcagctgccacgcctggaacaaggacaggacccagatcgccatctgccccaacaaccacgaggtgcacatctatgagaagagcggggccaagtggaccaaggtgcatgagctgaaggagcacaacggccaggtgacaggcatcgactgggcccctgagagcaacagaattgtgacctgtggcacagacagaaatgcctacgtgtggaccctgaagggccgcacctggaagcccaccctggtgatcctgcgcatcaacagagctgcccgctgtgtgcgctgggccccaaatgaaaacaagtttgctgtgggcagcggcagcagggtcatcagcatctgctactttgagcaggagaatgactggtgggtgtag

SEQ ID NO: 158727 - DNA, 66 bp, Artificial Sequence
  derived and/or modified sequence
atggcctaccacagcttcctggtggagcccatcagctgccacgcctggaacaaggacagaacatag

SEQ ID NO: 158728 - DNA, 327 bp, Artificial Sequence
  derived and/or modified sequence
atggcctaccacagcttcctggtggagcccatcagctgccacgcctggaacaaggacaggacccagatcgccatctgccccaacaaccacgaggtgcacatctatgagaagagcggggccaagtggaccaaggtgcatgagctgaaggagcacaacggccaggtgacaggcatcgactgggcccctgagagcaacagaattgtgacctgtggcacagacagaaatgcctacgtgtggaccctgaagggccgcacctggaagcccaccctggtgatcctgcgcatcaacagagctgcccgctgtgtgcgctgggccccaaatgaatag

SEQ ID NO: 158729 - DNA, 387 bp, Artificial Sequence
  derived and/or modified sequence
atggcctaccacagcttcctggtggagcccatcagctgccacgcctggaacaaggacaggacccagatcgccatctgccccaacaaccacgaggtgcacatctatgagaagagcggggccaagtggaccaaggtgcatgagctgaaggagcacaacggccaggtgacaggcatcgactgggcccctgagagcaacagaattgtgacctgtggcacagacagaaatgcctacgtgtggaccctgaagggccgcacctggaagcccaccctggtgatcctgcgcatcaacagagctgcccgctgtgtgcgctgggccccaaatgaaaacaagtttgctgtgggcagcggcagcagggtcatcagcatctgctactttgagcaggagtag

SEQ ID NO: 158730 - DNA, 1119 bp, Artificial Sequence
  derived and/or modified sequence
atggcctaccacagcttcctggtggagcccatcagctgccacgcctggaacaaggacaggacacagatcgccatttgccctaacaaccacgaggtccatatctacgaaaaatccggggcgaagtggacaaaagtgcacgagctgaaggaacataatgggcaagtgacgggaattgattgggcacctgagagcaaccgcatcgttacttgtggtacagacagaaatgcttacgtgtggactctgaagggtaggacatggaaacctacactggtcattctgcgcatcaacagggctgctaggtgtgtgcgatgggctccaaacgagaacaagtttgcggtaggtagcggaagtagagtcatttcaatctgttattttgaacaggagaacgactggtgggtatgcaagcacattaagaagcctatacggtctacagtgctgtctctagactggcaccccaataatgtgctcctagcagctggcagctgcgatttcaagtgcaggatcttctcggcctacattaaggaggtggaagagcgcccagcccccaccccctggggatccaagatgccattcggcgagcttatgtttgagtctagctccagttgtggatgggttcacggagtgtgctttagcgcatccggctccagagtggcttgggtctctcacgactcaactgtgtgcctcgccgatgctgataagaagatggcagtggccacgttagcctctgagacactcccactgctagctctgaccttcattacagacaattcgctcgtcgcagcgggacatgactgcttcccagtgttgtttacttacgacgccgccgccggaatgctgagctttggtgggcgtttagatgtgcccaaacagtccagccaaagaggccttaccgcacgggaaagattccagaatctggataagaaagcaagcagtgaagggggcaccgctgctggcgctggtttagactcactgcacaagaactccgtatcacagattagcgttctttctggcggaaaggccaaatgtagccagttctgcacaacggggatggacggcgggatgagcatctgggatgtaaaaagcctcgaaagcgcactgaaggatctgaagatcaagtag

SEQ ID NO: 158731 - DNA, 309 bp, Artificial Sequence
  derived and/or modified sequence
atggcctaccacagcttcctggtggagcccatcagctgccacgcctggaacaaagacagaacccagatagctatctgccccaataaccacgaagtgcacatctacgagaagtctggcgccaaatggacaaaagtgcacgagcttaaggaacataatgggcaggtcaccgggattgactgggccccagaatcaaaccggatcgttacttgtggcacagatcgcaatgcttatgtctggacactgaaaggaaggacatggaagccaaccctggtgattctgcgaattaacagagccgctcggtgcgtttag

SEQ ID NO: 158732 - DNA, 393 bp, Artificial Sequence
  derived and/or modified sequence
atggcctaccacagcttcctggtggagcccatcagctgccacgcctggaacaaagatcgcacccaaattgccatttgccccaacaatcacgaggttcacatctacgaaaaaagcggcgcaaagtggacaaaggtgcatgaattgaaggagcacaacggacaggttacgggaattgattgggcaccagaatctaaccgcattgtaacatgcggcacagacaggaacgcgtacgtgtggactctcaaggggaggacatggaagccaactcttgtgatcctgaggataaatagggccgcacggtgtgtgagatgggcgcctaatgagaacaaattcgccgtcggttcaggatcccgcgtaatttcaatatgctatttcgaacaggaaaacgactag

SEQ ID NO: 158733 - DNA, 252 bp, Artificial Sequence
  derived and/or modified sequence
atggcctaccacagcttcctggtggagcccatcagctgccacgcctggaacaaagaccgcacgcagattgcaatttgtcccaataaccatgaagtccatatttacgagaaaagtggagctaaatggacaaaggtgcatgagttaaaagaacacaacggccaggtcacggggatcgactgggcacccgagagcaaccggatcgtgacatgcgggaccgaccggaatgcttacgtctggaccctaaaggggtag

SEQ ID NO: 158734 - DNA, 402 bp, Artificial Sequence
  derived and/or modified sequence
atggcctaccacagcttcctggtggagcccatcagctgccacgcctggaacaaagataggactcaaatcgctatctgtcccaataaccacgaagtgcacatctatgaaaagtcaggagctaagtggacaaaagtccatgaactgaaagagcacaacgggcaggtcaccggaattgactgggcaccggagagcaaccgcatagtgacttgcggcacggaccggaatgcttatgtctggacactgaagggccggacatggaagcctacactggtcatccttcggataaacagggcagcccgttgcgttagatgggcacctaacgagaacaaatttgccgtgggctccggaagtcgggtcatctctatctgttactttgaacaggagaacgactggtgggtgtag

SEQ ID NO: 158735 - DNA, 66 bp, Artificial Sequence
  derived and/or modified sequence
atggcctaccacagcttcctggtggagcccatcagctgccacgcctggaacaaggacaggacctag

SEQ ID NO: 158736 - DNA, 402 bp, Artificial Sequence
  derived and/or modified sequence
atggcctaccacagcttcctggtggagcccatcagctgccacgcctggaataaggaccgcacgcaaatcgccatttgtcccaacaaccatgaggtccatatctacgagaagagcggggcgaaatggacgaaagtccacgagctgaaggagcacaatgggcaggttaccgggatcgattgggcccccgagtccaatagaattgtgacttgtggtacagatcgcaatgcctacgtttggacactgaaggggcgtacgtggaagcctaccctggtgatactgagaattaatcgggctgctcggtgcgtgagatgggcccctaacgaaaacaagttcgccgtcggtagtggctctagagtcatctccatttgctatttcgagcaggagaacgattggtgggtctag

SEQ ID NO: 158737 - DNA, 327 bp, Artificial Sequence
  derived and/or modified sequence
atggcctaccacagcttcctggtggagcccatcagctgccacgcctggaataaggatcgcacccagatcgcaatttgcccaaataatcatgaagtgcacatctatgaaaagagcggtgccaaatggaccaaagtccacgagttgaaggagcacaacggccaagtcaccggaattgactgggcaccagaaagcaatagaatcgtgacttgtggcactgaccgcaatgcatacgtttggacgctgaaaggcaggacttggaaacctacgttagtcattttgcgaattaatagagcggccagatgcgtcaggtgggcacccaacgagtag

SEQ ID NO: 158738 - DNA, 1119 bp, Artificial Sequence
  derived and/or modified sequence
atggcctaccacagcttcctggtggagcccatcagctgccacgcctggaacaaagatagaacgcagattgccatttgcccaaacaaccacgaggtgcatatctatgagaagagtggggccaaatggacaaaagtgcacgaattgaaggaacacaacggacaggtcacaggaatcgactgggctcccgaatccaataggattgtgacctgtggaactgatcggaatgcttacgtttggacactaaaggggcgcacttggaaacccaccttagtgatactgcggatcaatagggcagcccggtgcgtaagatgggcccctaacgagaataaatttgctgtagggagcggatcccgcgtcatcagcatttgttacttcgagcaggaaaacgattggtgggtatgtaagcatatcaagaagccaattcgatcaactgtgctgtcacttgactggcaccccaacaacgtgttgctggctgcaggatcatgtgatttcaaatgccggattttcagtgcctatatcaaggaggtcgaagagcggcctgcccctaccccgtgggggtccaagatgccttttggcgagctgatgttcgaaagctctagttcatgtgggtgggtccatggcgtgtgcttctccgctagtggttcacgggtagcctgggtgtctcacgacagcaccgtgtgtctggccgacgctgataagaagatggctgttgctactttggcctctgagacgctcccacttcttgccctcactttcattacggataactcgttggtggcagctggccatgactgcttccctgtgctgtttacctatgacgctgctgctggaatgctctcttttggcggccggttggatgtgcctaaacaatcgtcgcaacgaggattgactgcgcgggagaggtttcaaaacctagacaaaaaagcatccagtgaaggcggaacagccgccggtgccggcctcgatagcttacacaagaacagtgtttcacagatttcagtgctgagtggggggaaagcaaaatgctcccagttctgcacaactggcatggacggcgggatgtctatttgggatgtgaagtctctagaatcggccttgaaagaccttaagatcaagtag

SEQ ID NO: 158739 - DNA, 387 bp, Artificial Sequence
  derived and/or modified sequence
atggcctaccacagcttcctggtggagcccatcagctgccacgcctggaacaaagacagaactcagattgcaatctgccccaacaaccacgaagtacatatctacgaaaaatcaggggccaagtggactaaggtgcatgagctgaaagagcacaatggccaggtgacaggcatcgactgggccccagaatcaaacagaatcgtcacttgtgggacagatcgcaatgcgtatgtctggacgctaaagggtagaacctggaaacctaccttagttatcctgaggataaaccgagccgctagatgcgttcgttgggcccccaatgagaacaaatttgccgtaggcagtgggagccgcgtgattagcatctgttatttcgaacaggaatag

SEQ ID NO: 158740 - DNA, 402 bp, Artificial Sequence
  derived and/or modified sequence
atggcctaccacagcttcctggtggagcccatcagctgccacgcctggaacaaggatagaacacagatcgctatatgtccaaataaccatgaggtccatatttacgagaaaagtggcgcgaaatggactaaggtgcatgagttaaaggagcataatggacaggtgacaggcatcgattgggcgcccgaatcgaatcgtatcgttacctgcgggactgataggaacgcctacgtgtggactctgaagggccggacatggaagcccaccctggtgattcttcgcattaaccgggctgcgagatgtgtgcggtgggctcccaatgagaataaattcgctgttggtagtggaagcagagtaatttcaatctgctacttcgaacaagagaacgactggtgggtttag

SEQ ID NO: 158741 - DNA, 1119 bp, Artificial Sequence
  derived and/or modified sequence
atggcataccacagttttttagttgaacctatctcttgtcatgcctggaacaaggaccgtacccagatcgctatttgtccaaataaccacgaggtccacatttacgagaaaagcggagctaaatggactaaggtccacgaactgaaggagcataatggccaggttaccgggatcgactgggctcctgagtctaatcggatcgtaacctgtgggacggacaggaacgcctatgtatggactcttaagggtcgcacctggaagcccaccctggtgattctgaggatcaacagagccgctaggtgtgtgagatgggcacctaacgaaaacaagttcgcggtgggatccggcagccgggtgatctcaatctgttacttcgaacaggaaaatgactggtgggtctgtaagcacataaaaaagcctatccgcagcacggtcctcagtcttgactggcatcctaacaacgtcctgttggctgcaggctcatgcgatttcaaatgtcgcatattcagcgcttacatcaaagaagtggaggaaaggcctgcccctacaccttggggtagcaagatgccttttggggaattaatgtttgaaagcagtagctcttgcggctgggtgcacggagtctgcttcagcgcctcgggctctagagtagcttgggtgtctcatgatagcacggtgtgcctggccgatgctgataaaaaaatggccgtggcaacactggctagtgagaccctacctcttcttgccctcacgttcattaccgacaactctcttgtcgccgctggacacgactgcttccccgtgctgtttacttacgacgccgctgccggtatgctgtcctttgggggaaggctcgatgtgccaaagcagtcaagccagcgaggtctcaccgcgagagagaggtttcagaacctggataaaaaggctagttccgaaggaggtaccgccgctggtgcaggtctggatagcctgcataagaacagcgtctcccaaatctccgtcctgtcaggtggcaaagccaagtgctctcagttctgtacgactggaatggatggcggtatgagtatatgggatgtgaagtccctcgagtcagccctgaaggacctgaaaattaaatag

SEQ ID NO: 158742 - DNA, 309 bp, Artificial Sequence
  derived and/or modified sequence
atggcatatcacagtttcctggtggaaccaatctcatgccatgcatggaacaaggatagaacacaaatcgcaatttgccctaataatcacgaagttcatatttacgaaaagagtggcgctaagtggaccaaggtgcacgagttgaaggaacacaacgggcaagtcaccgggatcgactgggccccagagtcgaatcgaatcgtgacatgcggcactgatagaaatgcatatgtgtggacattaaagggccgtacctggaaacccacgctggtcatacttcggataaaccgtgcggctaggtgcgtgtag

SEQ ID NO: 158743 - DNA, 393 bp, Artificial Sequence
  derived and/or modified sequence
atggcttatcactcctttctagtcgagcccatctcgtgccatgcatggaataaggaccgcactcaaatcgccatttgcccgaataaccatgaggtccacatttatgagaagtccggcgctaaatggaccaaggtgcacgaactcaaggaacacaatggacaggtaacagggattgattgggctcctgaatcgaataggatcgtcacctgtggaactgatcggaacgcctatgtgtggacactcaaaggtagaacctggaagcccacactcgtgattctgcgaattaacagggcggctaggtgtgttcggtgggctcctaacgagaataagtttgcagttggctccggctcccgggtgatatccatttgctactttgagcaagagaacgactag

SEQ ID NO: 158744 - DNA, 252 bp, Artificial Sequence
  derived and/or modified sequence
atggcctatcacagttttctggttgaacctataagttgccatgcctggaacaaagaccggacccagatcgctatctgccctaacaaccatgaagtgcacatttacgaaaaatcaggtgctaagtggaccaaggttcatgagctcaaagagcataatggacaggtgacgggaatcgattgggccccagagtcgaatcgtatcgttacctgtggtacagatagaaacgcatacgtctggactcttaaaggctag

SEQ ID NO: 158745 - DNA, 402 bp, Artificial Sequence
  derived and/or modified sequence
atggcataccattcattccttgtggaacccatctcctgtcatgcctggaataaggatagaactcagattgccatctgtcccaataaccacgaggttcatatctatgaaaaaagtggggctaaatggaccaaagttcatgagctgaaggaacacaatggccaggtgaccggaatcgactgggcccctgagtctaataggattgtgacatgtggcactgatcgtaacgcctacgtctggacccttaaggggagaacatggaagcccacccttgtaattctccgcatcaatcgcgctgccagatgcgtccgatgggccccaaatgaaaacaaattcgctgtgggcagcggctctagggtcatttccatctgctactttgagcaagagaacgactggtgggtatag

SEQ ID NO: 158746 - DNA, 66 bp, Artificial Sequence
  derived and/or modified sequence
atggcataccatagctttctggtcgagccaatcagttgtcacgcctggaataaagacagaacttag

SEQ ID NO: 158747 - DNA, 402 bp, Artificial Sequence
  derived and/or modified sequence
atggcgtaccacagctttctagtggagcccatatcttgccatgcttggaataaggacagaacacaaatcgctatctgtcccaataaccacgaggtccatatttatgagaagtcaggggctaagtggacaaaagtgcatgaacttaaagagcacaatggtcaggttactgggatcgactgggcgcctgaaagcaatcgaatagtgacctgcgggaccgatcggaatgcttatgtatggactcttaaggggagaacatggaagcctactcttgttatcctccgaatcaatagggcggcacggtgcgttcgctgggccccaaacgagaacaaattcgccgtcgggtctggctccagggtgatctcgatctgctactttgagcaggagaacgactggtgggtctag

SEQ ID NO: 158748 - DNA, 327 bp, Artificial Sequence
  derived and/or modified sequence
atggcatatcactcatttctagtcgaacccatttcatgccatgcatggaataaagaccggactcagatcgcaatttgcccgaataatcatgaagtccacatctacgagaagtcaggcgctaaatggaccaaagtgcacgagctaaaggagcataacgggcaggtgacaggcatcgattgggcacctgagagcaaccgaatagtgacttgcggcacagaccgcaacgcttacgtctggactctgaaagggaggacatggaaacccacactggtgatattgcgcataaatagagccgcacgttgcgtccgctgggctcccaatgagtag

SEQ ID NO: 158749 - DNA, 1119 bp, Artificial Sequence
  derived and/or modified sequence
atggcttatcatagcttcctggttgaaccgatctcctgtcacgcgtggaataaagaccggacacagatcgctatttgccctaataaccacgaagtgcatatctacgagaaaagtggtgccaagtggactaaggtgcacgagctgaaggagcacaacggccaggtcactggcatcgattgggcacctgaatctaaccggatagttacatgcggtaccgatagaaacgcttacgtctggacccttaagggtaggacctggaagccaacactggttattctgcgcatcaatagggctgcgcgatgtgtgagatgggcccctaatgagaacaagttcgccgtcgggtcaggcagtcgggtaatcagcatatgctatttcgaacaggaaaacgactggtgggtgtgcaaacacataaagaagcccatcagatctacagtgctctctctcgactggcaccccaataatgttcttctagccgcaggttcatgcgactttaaatgccgcattttctctgcatacatcaaagaagtcgaggaacgacccgcacctacaccttggggcagcaagatgcctttcggggagctgatgttcgagagcagtagcagttgtggatgggtgcacggggtttgctttagtgccagcggcagtagagtggcttgggttagccacgattctaccgtgtgccttgccgacgctgataagaagatggctgttgcaacgctagccagcgagactttaccactgcttgccttgacttttatcaccgacaatagccttgtcgccgcaggtcacgactgtttcccagtgctatttacctacgatgccgctgccggaatgctgagtttcggagggaggctggacgtgccgaagcaaagctcccaaagaggtctcaccgcgcgagagcggtttcagaacctcgacaaaaaggctagcagcgagggcggtaccgctgctggagccggacttgattccctgcataaaaactcagtgagccagatatccgtgctaagcgggggtaaggcaaagtgtagtcaattctgtaccaccggcatggatgggggaatgtccatctgggacgttaaaagtctagagtcagcgcttaaagatctgaaaattaagtag

SEQ ID NO: 158750 - DNA, 387 bp, Artificial Sequence
  derived and/or modified sequence
atggcttatcatagttttttggtggaacctatctcctgccacgcctggaacaaagaccgaacgcaaattgcaatttgcccaaacaaccacgaggtccatatatatgaaaaatctggagcaaagtggaccaaagtgcacgagttaaaagaacataatggtcaagtgactgggatcgactgggccccagaaagtaacaggattgtgacttgcggcaccgatcgcaacgcctacgtctggaccctcaaaggccgaacctggaagcccaccctggttatccttcgcattaaccgcgcagccaggtgtgtgcgctgggctcccaatgaaaacaagttcgccgtgggctctggtagtcgggtcatcagcatctgttacttcgagcaggagtag

SEQ ID NO: 158751 - DNA, 402 bp, Artificial Sequence
  derived and/or modified sequence
atggcataccactcgttcctcgtggaacctattagttgccacgcatggaacaaggaccggactcagatcgcaatctgcccaaataatcatgaggtgcacatttacgaaaagtcaggggctaagtggactaaagtgcacgagctgaaagaacataacgggcaggtgactggtattgactgggcgcctgagtccaatcggattgtgacttgtggtacagatcgtaacgcttacgtctggaccctcaagggcagaacgtggaaacctacgcttgtgatcctgcggattaaccgcgctgcgcgttgcgtgcggtgggcaccgaacgagaataagttcgctgttggatctggctcacgggtgatttcaatctgttacttcgagcaggagaatgactggtgggtgtag

SEQ ID NO: 158752 - DNA, 1551 bp, Artificial Sequence
  derived and/or modified sequence
ggcaggccccgccccccgcccacgaggaagtggctgctgctccggcgcggagcccagagccggttcggcgcgtcgactgcccagagtccgcggccggggcgcgggaggagccaagccgccatggcctaccacagcttcctggtggagcccatcagctgccacgcctggaacaaggaccgcacccagattgccatctgccccaacaaccatgaggtgcatatctatgaaaagagcggtgccaaatggaccaaggtgcacgagctcaaggagcacaacgggcaggtgacaggcatcgactgggcccccgagagtaaccgtattgtgacctgcggcacagaccgcaacgcctacgtgtggacgctgaagggccgcacatggaagcccacgctggtcatcctgcggatcaaccgggctgcccgctgcgtgcgctgggcccccaacgagaacaagtttgctgtgggcagcggctctcgtgtgatctccatctgttatttcgagcaggagaatgactggtgggtttgcaagcacatcaagaagcccatccgctccaccgtcctcagcctggactggcaccccaacaatgtgctgctggctgccggctcctgtgacttcaagtgtcggatcttttcagcctacatcaaggaggtggaggaacggccggcacccaccccgtggggctccaagatgccctttggggaactgatgttcgaatccagcagtagctgcggctgggtacatggcgtctgtttctcagccagcgggagccgcgtggcctgggtaagccacgacagcaccgtctgcctggctgatgccgacaagaagatggccgtcgcgactctggcctctgaaacactaccactgctggcgctgaccttcatcacagacaacagcctggtggcagcgggccacgactgcttcccggtgctgttcacctatgacgccgccgcggggatgctgagcttcggcgggcggctggacgttcctaagcagagctcgcagcgtggcttgacggcccgcgagcgcttccagaacctggacaagaaggcgagctccgagggtggcacggctgcgggcgcgggcctagactcgctgcacaagaacagcgtcagccagatctcggtgctcagcggcggcaaggccaagtgctcgcagttctgcaccactggcatggatggcggcatgagtatctgggatgtgaagagcttggagtcagccttgaaggacctcaagatcaaatgacctgtgaggaatatgttgccttcatcctagctgctggggaagcggggagaggggtcagggaggctaatggttgctttgctgaatgtttctggggtaccaatacgagttcccataggggctgctccctcaaaaagggaggggacagatggggagcttttcttacctattcaaggaatacgtgcctttttcttaaatgctttcatttattgaaaaaaaaaaaaaatgcccccaaagcactatgctggtcatgaactgcttcaaaatgtggaggtaataaaatgcaactgtgtaaaaaaaaaaaaaaaaaaaaaa

SEQ ID NO: 158753 - DNA, 572 bp, Artificial Sequence
  derived and/or modified sequence
acagttggcgcccaccggcatcagcgtgaagggagctcctcgctggctgccgacggggctgcagggctcgctagccgctcacctgcgtgtgagcgcggagcccgcagtacccgccgtccgggctcagaggacgtgactccccgaccctgcgcccggcagtccccgggggccgtgcgcccggcccaggctcggaggtccagcccagcggcggctcaggctgcgcgcctggctcccagcctcagtttccccattggagccaagccgccatggcctaccacagcttcctggtggagcccatcagctgccacgcctggaacaaggaccgcacccagattgccatctgccccaacaaccatgaggtgcatatctatgaaaagagcggtgccaaatggaccaaggtgcacgagctcaaggagcacaacgggcaggtgacaggcatcgactgggcccccgagagtaaccgtattgtgacctgcggcacagaccgcaacgcctacgtgtggacgctgaagggccgcacatggaagcccacgctggtcatcctgcggatcaaccgggctgcccgctgcgtg

SEQ ID NO: 158754 - DNA, 559 bp, Artificial Sequence
  derived and/or modified sequence
agagccggttcggcgcgtcgactgcccagagtccgcggccggggcgcgggagtgtcttgttctgttgcccaggctggagtgtggtgacactaccttgactcactgcagcatctgcctcccgggttccagtgattctcctgcctcagcctctcaggagccaagccgccatggcctaccacagcttcctggtggagcccatcagctgccacgcctggaacaaggaccgcacccagattgccatctgccccaacaaccatgaggtgcatatctatgaaaagagcggtgccaaatggaccaaggtgcacgagctcaaggagcacaacgggcaggtgacaggcatcgactgggcccccgagagtaaccgtattgtgacctgcggcacagaccgcaacgcctacgtgtggacgctgaagggccgcacatggaagcccacgctggtcatcctgcggatcaaccgggctgcccgctgcgtgcgctgggcccccaacgagaacaagtttgctgtgggcagcggctctcgtgtgatctccatctgttatttcgagcaggagaatgactg

SEQ ID NO: 158755 - DNA, 593 bp, Artificial Sequence
  derived and/or modified sequence
cagagccggttcggcgcgtcgactgcccagagtccgcggccggggcgcgggaggtgaacctaacttcctggcctccaagatttggggtcagagtcccaagctgcgtcatttagtagaagccgagtgactttgaacaaatcgttgcttttgtctgagcctgggtttcctcctgtacaaactgaagtgtcttgttctgttgcccaggctggagtgtggtgacactaccttgactcactgcagcatctgcctcccgggttccagtgattctcctgcctcagcctctcaggtagctgggattacaggtacatgccaatatgcccggctaatttttagagccaagccgccatggcctaccacagcttcctggtggagcccatcagctgccacgcctggaacaaggaccgcacccagattgccatctgccccaacaaccatgaggtgcatatctatgaaaagagcggtgccaaatggaccaaggtgcacgagctcaaggagcacaacgggcaggtgacaggcatcgactgggcccccgagagtaaccgtattgtgacctgcggcacagaccgcaacgcctacgtgtggacgctgaaggg

SEQ ID NO: 158756 - DNA, 545 bp, Artificial Sequence
  derived and/or modified sequence
agagccggttcggcgcgtcgactgcccagagtccgcggccggggcgcgggaggctggagtgtggtgacactaccttgactcactgcagcatctgcctcccgggttccagtgattctcctgcctcagcctctcaggagccaagccgccatggcctaccacagcttcctggtggagcccatcagctgccacgcctggaacaaggaccgcacccagattgccatctgccccaacaaccatgaggtgcatatctatgaaaagagcggtgccaaatggaccaaggtgcacgagctcaaggagcacaacgggcaggtgacaggcatcgactgggcccccgagagtaaccgtattgtgacctgcggcacagaccgcaacgcctacgtgtggacgctgaagggccgcacatggaagcccacgctggtcatcctgcggatcaaccgggctgcccgctgcgtgcgctgggcccccaacgagaacaagtttgctgtgggcagcggctctcgtgtgatctccatctgttatttcgagcaggagaatgactggtgggt

SEQ ID NO: 158757 - DNA, 581 bp, Artificial Sequence
  derived and/or modified sequence
agagccggttcggcgcgtcgactgcccagagtccgcggccggggcgcgggagtgtcttgttctgttgcccaggctggagtgtggtgacactaccttgactcactgcagcatctgcctcccgggttccagtgattctcctgcctcagcctctcaggtagctgggattacaggagccaagccgccatggcctaccacagcttcctggtggagcccatcagctgccacgcctggaacaaggaccgcacccagattgccatctgccccaacaaccatgaggtgcatatctatgaaaagagcggtgccaaatggaccaaggtgcacgagctcaaggagcacaacgggcaggtgacaggcatcgactgggcccccgagagtaaccgtattgtgacctgcggcacagaccgcaacgcctacgtgtggacgctgaagggccgcacatggaagcccacgctggtcatcctgcggatcaaccgggctgcccgctgcgtgcgctgggcccccaacgagaacaagtttgctgtgggcagcggctctcgtgtgatctccatctgttatttcgagcaggagaatgactggtgggt

SEQ ID NO: 158758 - DNA, 669 bp, Artificial Sequence
  derived and/or modified sequence
cagggcctgcacagttggcgcccaccggcatcagcgtgaagggagctcctcgctggctgccgacggggctgcagggctcgctagccgctcacctgcgtgtgagcgcggagcccgcagtacccgccgtccgggctcagaggacgtgactccccgaccctgcgcccggcagtccccgggggccgtgcgcccggcccaggctcggaggtccagcccagcggcggctcaggctgcgcgcctggctcccagcctcagtttccccattggtaaagcattgacggtggttgcggacggcttctgcggacagagccttgggctccgacgtctgcgcgggagccaagccgccatggcctaccacagcttcctggtggagcccatcagctgccacgcctggaacaaggaccgcacccagattgccatctgccccaacaaccatgaggtgcatatctatgaaaagagcggtgccaaatggaccaaggtgcacgagctcaaggagcacaacgggcaggtgacaggcatcgactgggcccccgagagtaaccgtattgtgacctgcggcacagaccgcaacgcctacgtgtggacgctgaagggccgcacatggaagcccacgctggtcatcctgcggatcaaccgggctgcccgctgcgtgcgctgggcccccaacgagaa

SEQ ID NO: 158759 - DNA, 1715 bp, Artificial Sequence
  derived and/or modified sequence
agagccggttcggcgcgtcgactgcccagagtccgcggccggggcgcgggagtgttcccccaggtgaacctaacttcctggcctccaagatttggggtcagagtcccaagctgcgtcatttagtagaagccgagtgactttgaacaaatcgttgcttttgtctgagcctgggtttcctcctgtacaaactgaagtgtcttgttctgttgcccaggctggagtgtggtgacactaccttgactcactgcagcatctgcctcccgggttccagtgattctcctgcctcagcctctcaggagccaagccgccatggcctaccacagcttcctggtggagcccatcagctgccacgcctggaacaaggaccgcacccagattgccatctgccccaacaaccatgaggtgcatatctatgaaaagagcggtgccaaatggaccaaggtgcacgagctcaaggagcacaacgggcaggtgacaggcatcgactgggcccccgagagtaaccgtattgtgacctgcggcacagaccgcaacgcctacgtgtggacgctgaagggccgcacatggaagcccacgctggtcatcctgcggatcaaccgggctgcccgctgcgtgcgctgggcccccaacgagaacaagtttgctgtgggcagcggctctcgtgtgatctccatctgttatttcgagcaggagaatgactggtgggtttgcaagcacatcaagaagcccatccgctccaccgtcctcagcctggactggcaccccaacaatgtgctgctggctgccggctcctgtgacttcaagtgtcggatcttttcagcctacatcaaggaggtggaggaacggccggcacccaccccgtggggctccaagatgccctttggggaactgatgttcgaatccagcagtagctgcggctgggtacatggcgtctgtttctcagccagcgggagccgcgtggcctgggtaagccacgacagcaccgtctgcctggctgatgccgacaagaagatggccgtcgcgactctggcctctgaaacactaccactgctggcgctgaccttcatcacagacaacagcctggtggcagcgggccacgactgcttcccggtgctgttcacctatgacgccgccgcggggatgctgagcttcggcgggcggctggacgttcctaagcagagctcgcagcgtggcttgacggcccgcgagcgcttccagaacctggacaagaaggcgagctccgagggtggcacggctgcgggcgcgggcctagactcgctgcacaagaacagcgtcagccagatctcggtgctcagcggcggcaaggccaagtgctcgcagttctgcaccactggcatggatggcggcatgagtatctgggatgtgaagagcttggagtcagccttgaaggacctcaagatcaaatgacctgtgaggaatatgttgccttcatcctagctgctggggaagcggggagaggggtcagggaggctaatggttgctttgctgaatgtttctggggtaccaatacgagttcccataggggctgctccctcaaaaagggaggggacagatggggagcttttcttacctattcaaggaatacgtgcctttttcttaaatgctttcatttattgaaaaaaaaaaaaaatgcccccaaagcactatgctggtcatgaactgcttcaaaatgtggaggtaataaaatgcaactg

SEQ ID NO: 158760 - DNA, 580 bp, Artificial Sequence
  derived and/or modified sequence
gctgctgctccggcgcggagcccagagccggttcggcgcgtcgactgcccagagtccgcggccggggcgcgggagacagtgtcttgttctgttgcccaggctggagtgtggtgacactaccttgactcactgcagcatctgcctcccgggttccagtgattctcctgcctcagcctctcaggagccaagccgccatggcctaccacagcttcctggtggagcccatcagctgccacgcctggaacaaggaccgcacccagattgccatctgccccaacaaccatgaggtgcatatctatgaaaagagcggtgccaaatggaccaaggtgcacgagctcaaggagcacaacgggcaggtgacaggcatcgactgggcccccgagagtaaccgtattgtgacctgcggcacagaccgcaacgcctacgtgtggacgctgaagggccgcacatggaagcccacgctggtcatcctgcggatcaaccgggctgcccgctgcgtgcgctgggcccccaacgagaacaagtttgctgtgggcagcggctctcgtgtgatctccatctgttatttcgagcaggagaa

SEQ ID NO: 158761 - DNA, 561 bp, Artificial Sequence
  derived and/or modified sequence
agagccggttcggcgcgtcgactgcccagagtccgcggccggggcgcgggaggctggagtgtggtgacactaccttgactcactgcagcatctgcctcccgggttccagtgattctcctgcctcagcctctcaggtagctgggattacaggagccaagccgccatggcctaccacagcttcctggtggagcccatcagctgccacgcctggaacaaggaccgcacccagattgccatctgccccaacaaccatgaggtgcatatctatgaaaagagcggtgccaaatggaccaaggtgcacgagctcaaggagcacaacgggcaggtgacaggcatcgactgggcccccgagagtaaccgtattgtgacctgcggcacagaccgcaacgcctacgtgtggacgctgaagggccgcacatggaagcccacgctggtcatcctgcggatcaaccgggctgcccgctgcgtgcgctgggcccccaacgagaacaagtttgctgtgggcagcggctctcgtgtgatctccatctgttatttcgagcaggagaatgactggtgggt

SEQ ID NO: 158762 - DNA, 1119 bp, Artificial Sequence
  derived and/or modified sequence
atggcctaccacagcttcctggtggagcccatcagctgccacgcctggaacaaggacagaacccagatcgccatctgccccaacaaccacgaggtgcacatctacgagaagagcggcgccaagtggaccaaggtgcacgagctgaaggagcacaacggccaggtgaccggcatcgactgggcccccgagagcaacagaatcgtgacctgcggcaccgacagaaacgcctacgtgtggaccctgaagggcagaacctggaagcccaccctggtgatcctgagaatcaacagagccgccagatgcgtgagatgggcccccaacgagaacaagttcgccgtgggcagcggcagcagagtgatcagcatctgctacttcgagcaggagaacgactggtgggtgtgcaagcacatcaagaagcccatcagaagcaccgtgctgagcctggactggcaccccaacaacgtgctgctggccgccggcagctgcgacttcaagtgcagaatcttcagcgcctacatcaaggaggtggaggagagacccgcccccaccccctggggcagcaagatgcccttcggcgagctgatgttcgagagcagcagcagctgcggctgggtgcacggcgtgtgcttcagcgccagcggcagcagagtggcctgggtgagccacgacagcaccgtgtgcctggccgacgccgacaagaagatggccgtggccaccctggccagcgagaccctgcccctgctggccctgaccttcatcaccgacaacagcctggtggccgccggccacgactgcttccccgtgctgttcacctacgacgccgccgccggcatgctgagcttcggcggcagactggacgtgcccaagcagagcagccagagaggcctgaccgccagagagagattccagaacctggacaagaaggccagcagcgagggcggcaccgccgccggcgccggcctggacagcctgcacaagaacagcgtgagccagatcagcgtgctgagcggcggcaaggccaagtgcagccagttctgcaccaccggcatggacggcggcatgagcatctgggacgtgaagagcctggagagcgccctgaaggacctgaagatcaagtag

SEQ ID NO: 158763 - DNA, 309 bp, Artificial Sequence
  derived and/or modified sequence
atggcctaccacagcttcctggtggagcccatcagctgccacgcctggaacaaggacagaacccagatcgccatctgccccaacaaccacgaggtgcacatctacgagaagagcggcgccaagtggaccaaggtgcacgagctgaaggagcacaacggccaggtgaccggcatcgactgggcccccgagagcaacagaatcgtgacctgcggcaccgacagaaacgcctacgtgtggaccctgaagggcagaacctggaagcccaccctggtgatcctgagaatcaacagagccgccagatgcgtgtag

SEQ ID NO: 158764 - DNA, 393 bp, Artificial Sequence
  derived and/or modified sequence
atggcctaccacagcttcctggtggagcccatcagctgccacgcctggaacaaggacagaacccagatcgccatctgccccaacaaccacgaggtgcacatctacgagaagagcggcgccaagtggaccaaggtgcacgagctgaaggagcacaacggccaggtgaccggcatcgactgggcccccgagagcaacagaatcgtgacctgcggcaccgacagaaacgcctacgtgtggaccctgaagggcagaacctggaagcccaccctggtgatcctgagaatcaacagagccgccagatgcgtgagatgggcccccaacgagaacaagttcgccgtgggcagcggcagcagagtgatcagcatctgctacttcgagcaggagaacgactag

SEQ ID NO: 158765 - DNA, 252 bp, Artificial Sequence
  derived and/or modified sequence
atggcctaccacagcttcctggtggagcccatcagctgccacgcctggaacaaggacagaacccagatcgccatctgccccaacaaccacgaggtgcacatctacgagaagagcggcgccaagtggaccaaggtgcacgagctgaaggagcacaacggccaggtgaccggcatcgactgggcccccgagagcaacagaatcgtgacctgcggcaccgacagaaacgcctacgtgtggaccctgaagggctag

SEQ ID NO: 158766 - DNA, 402 bp, Artificial Sequence
  derived and/or modified sequence
atggcctaccacagcttcctggtggagcccatcagctgccacgcctggaacaaggacagaacccagatcgccatctgccccaacaaccacgaggtgcacatctacgagaagagcggcgccaagtggaccaaggtgcacgagctgaaggagcacaacggccaggtgaccggcatcgactgggcccccgagagcaacagaatcgtgacctgcggcaccgacagaaacgcctacgtgtggaccctgaagggcagaacctggaagcccaccctggtgatcctgagaatcaacagagccgccagatgcgtgagatgggcccccaacgagaacaagttcgccgtgggcagcggcagcagagtgatcagcatctgctacttcgagcaggagaacgactggtgggtgtag

SEQ ID NO: 158767 - DNA, 66 bp, Artificial Sequence
  derived and/or modified sequence
atggcctaccacagcttcctggtggagcccatcagctgccacgcctggaacaaggacagaacctag

SEQ ID NO: 158768 - DNA, 327 bp, Artificial Sequence
  derived and/or modified sequence
atggcctaccacagcttcctggtggagcccatcagctgccacgcctggaacaaggacagaacccagatcgccatctgccccaacaaccacgaggtgcacatctacgagaagagcggcgccaagtggaccaaggtgcacgagctgaaggagcacaacggccaggtgaccggcatcgactgggcccccgagagcaacagaatcgtgacctgcggcaccgacagaaacgcctacgtgtggaccctgaagggcagaacctggaagcccaccctggtgatcctgagaatcaacagagccgccagatgcgtgagatgggcccccaacgagtag

SEQ ID NO: 158769 - DNA, 387 bp, Artificial Sequence
  derived and/or modified sequence
atggcctaccacagcttcctggtggagcccatcagctgccacgcctggaacaaggacagaacccagatcgccatctgccccaacaaccacgaggtgcacatctacgagaagagcggcgccaagtggaccaaggtgcacgagctgaaggagcacaacggccaggtgaccggcatcgactgggcccccgagagcaacagaatcgtgacctgcggcaccgacagaaacgcctacgtgtggaccctgaagggcagaacctggaagcccaccctggtgatcctgagaatcaacagagccgccagatgcgtgagatgggcccccaacgagaacaagttcgccgtgggcagcggcagcagagtgatcagcatctgctacttcgagcaggagtag

SEQ ID NO: 158770 - protein, 418 aa, Artificial Sequence
  derived and/or modified sequence
MAGRLPACVVDCGTGYTKLGYAGNTEPQFIIPSCIAIKESAKVGDQAQRRVMKGVDDLDFFIGDEAIEKPTYATKWPIRHGIVEDWDLMERFMEQVIFKYLRAEPEDHYFLLTEPPLNTPENREYTAEIMFESFNVPGLYIAVQAVLALAASWTSRQVGERTLTGTVIDSGDGVTHVIPVAEGYVIGSCIKHIPIAGRDITYFIQQLLRDREVGIPPEQSLETAKAVKERYSYVCPDLVKEFNKYDTDGSKWIKQYTGINAISKKEFSIDVGYERFLGPEIFFHPEFANPDFTQPISEVVDEVIQNCPIDVRRPLYKNIVLSGGSTMFRDFGRRLQRDLKRTVDARLKLSEELSGGRLKPKPIDVQVITHHMQRYAVWFGGSMLASTPEFYQVCHTKKDYEEIGPSICRHNPVFGVMS

SEQ ID NO: 158771 - protein, 367 aa, Artificial Sequence
  derived and/or modified sequence
MKGVDDLDFFIGDEAIEKPTYATKWPIRHGIVEDWDLMERFMEQVIFKYLRAEPEDHYFLLTEPPLNTPENREYTAEIMFESFNVPGLYIAVQAVLALAASWTSRQVGERTLTGTVIDSGDGVTHVIPVAEGYVIGSCIKHIPIAGRDITYFIQQLLRDREVGIPPEQSLETAKAVKERYSYVCPDLVKEFNKYDTDGSKWIKQYTGINAISKKEFSIDVGYERFLGPEIFFHPEFANPDFTQPISEVVDEVIQNCPIDVRRPLYKNIVLSGGSTMFRDFGRRLQRDLKRTVDARLKLSEELSGGRLKPKPIDVQVITHHMQRYAVWFGGSMLASTPEFYQVCHTKKDYEEIGPSICRHNPVFGVMS

SEQ ID NO: 158772 - protein, 356 aa, Artificial Sequence
  derived and/or modified sequence
MLEIQNHSLSSLPWPIRHGIVEDWDLMERFMEQVIFKYLRAEPEDHYFLLTEPPLNTPENREYTAEIMFESFNVPGLYIAVQAVLALAASWTSRQVGERTLTGTVIDSGDGVTHVIPVAEGYVIGSCIKHIPIAGRDITYFIQQLLRDREVGIPPEQSLETAKAVKERYSYVCPDLVKEFNKYDTDGSKWIKQYTGINAISKKEFSIDVGYERFLGPEIFFHPEFANPDFTQPISEVVDEVIQNCPIDVRRPLYKNIVLSGGSTMFRDFGRRLQRDLKRTVDARLKLSEELSGGRLKPKPIDVQVITHHMQRYAVWFGGSMLASTPEFYQVCHTKKDYEEIGPSICRHNPVFGVMS

SEQ ID NO: 158773 - DNA, 1257 bp, Artificial Sequence
  derived and/or modified sequence
atggctggtcggttgccggcctgtgtggtggactgcgggacaggctacaccaagttaggctacgctggaaacactgagccccagttcatcatcccatcgtgcattgccattaaggagagcgccaaggtgggtgaccaagcacaacggagggtgatgaaaggcgtggatgacctggatttctttataggcgatgaggccatagaaaaaccaacgtacgccaccaagtggccgatacgacacggtattgtagaggactgggatttaatggagaggtttatggaacaagtcatctttaaatatctgcgggctgaacccgaagatcattactttctgcttactgaacctccactgaatacacctgaaaaccgggaatacaccgcggaaatcatgttcgaatcctttaacgtgcccggtttatacattgcggttcaagctgttctcgctctggccgcgtcatggacctcacgacaggttggagagcgtaccctcaccggaactgtaatagatagtggagatggcgtcacacatgtgattcccgtagctgagggatacgtgatcgggagctgcatcaaacacatccctattgcaggccgggatattacgtacttcatacagcagctgctccgtgatcgcgaggtggggatcccccctgagcagtcactggagaccgccaaggccgtaaaggagcggtatagttatgtctgtcccgacctcgtgaaggaatttaacaagtacgataccgacggatcgaaatggataaaacagtataccggaattaacgccatcagtaagaaggaattctccatcgatgtggggtacgaacgttttcttgggccggagattttcttccacccagaattcgcgaatccagacttcacccaacccatcagcgaagtggtagatgaagtgatccagaactgtcccattgacgttcgccgacccctgtataagaatatagtgttgtccggggggagcactatgtttagagatttcgggcgacgtctgcagcgtgacctgaagagaaccgtcgacgcacggctgaagctatctgaggaactgagcggcggtaggctgaaacccaagccaattgacgttcaggttatcacgcatcatatgcaacgatatgccgtgtggttcggcgggagtatgctggcctcgacccctgaattctaccaggtttgccacactaagaaggattacgaagaaatcgggccctccatatgtaggcataatcccgtgttcggtgtgatgtcatag

SEQ ID NO: 158774 - DNA, 1257 bp, Artificial Sequence
  derived and/or modified sequence
atggccggccgcctgcctgcctgtgtggtggactgtggcaccggctacaccaagctgggctacgccggcaacacagagccccagttcatcatccccagctgcatcgccatcaaggagagcgccaaggtgggggaccaggcccagaggagagtgatgaagggcgtggatgacctggacttcttcatcggagatgaggccatcgagaagcccacctacgccaccaagtggcccatccgccacggcatcgtggaggactgggacctgatggagcgcttcatggagcaggtgatcttcaagtacctgcgggcagagcctgaggaccactacttcctgctgacagagccccccctgaacaccccagaaaatcgggagtacacagctgagatcatgtttgagagcttcaacgtgcccggcctgtacatcgctgtgcaggccgtgctggccctggccgcctcctggaccagccggcaggtgggggagaggaccctgaccggcaccgtcatcgacagcggagatggagtgacccacgtgattcctgtggccgagggctacgtgattggcagctgcatcaagcacatccccatcgccggccgggacatcacctacttcatccagcagctgctgcgggaccgggaggtgggcatccccccagagcagagcctggagacagccaaggctgtgaaggagcgctacagctatgtgtgcccagacctggtgaaggagttcaacaagtatgacacagatggcagcaagtggatcaagcagtacacaggcatcaatgccatcagcaagaaggagttcagcattgatgtgggctatgagcgcttcctgggccctgagatcttcttccaccctgagtttgccaacccagacttcacccagcccatcagcgaggtggtggatgaagtcatccagaactgccccattgatgtgcggcggcccctgtacaagaacatcgtgctgagcggcggcagcaccatgttccgggactttggaagaaggctgcagagggacctgaagaggacagtggatgcccggctgaagctgtctgaggagctgagcggcggccgcctgaagcccaagcccattgatgtgcaggtgatcacccaccacatgcagagatatgctgtgtggtttggaggctccatgctggccagcaccccagagttctaccaggtgtgccacaccaagaaggactatgaggagatcggccccagcatctgccgccacaaccctgtgtttggagtgatgtcctag

SEQ ID NO: 158775 - DNA, 1257 bp, Artificial Sequence
  derived and/or modified sequence
atggccggccggctgcccgcctgcgtggtggactgcggcaccggctacactaagctaggatatgcaggcaataccgaaccccagttcataatcccatcatgtattgccatcaaggagagcgctaaggtgggagatcaggcccagcgtcgagtaatgaaaggtgttgatgatttggacttctttatcggggacgaagccatagagaaacctacctatgctactaaatggcctattcgccacggcattgttgaggattgggacttgatggaaagatttatggagcaggttatctttaaatacctgcgcgccgagccagaggaccactattttttacttactgagcctcccctgaacactcccgagaacagggaatacactgccgagattatgtttgaatctttcaacgtgcccggcctgtacattgcagtccaggcggtgcttgccctagctgcaagttggacctcccgccaggtgggcgagaggacattgacgggcaccgtgatcgatagcggggatggcgtcacgcacgttatacctgtggcagaaggctacgtgatcggaagctgcatcaaacacattcccattgccgggagagacattacctattttatccagcaattgctccgggatagagaggtgggtatacctccagagcagagtctggagactgccaaagctgtaaaggagagatactcatacgtttgtccagacttagttaaggaattcaacaagtacgataccgatgggtccaaatggataaagcaatacacagggatcaacgccatctctaaaaaggaattttctatagatgtcggatacgaacggttcctagggcccgaaatatttttccacccggagtttgcaaatcctgactttacccagccaatttctgaggtggtggacgaagtgattcagaactgccccatcgacgtccggagaccgctatacaagaacattgttctttccggcggctctaccatgtttcgggactttggtaggcgcctacaaagagatctgaagcgtactgtggatgcccggctgaaactctcagaggaactttccgggggtaggctgaagccaaagcccattgatgttcaggtgatcacccaccacatgcagaggtatgcagtatggttcggaggcagcatgctagcctctacccctgaattttaccaggtgtgtcacaccaagaaagactacgaagaaatcgggccaagtatttgcagacacaacccagtcttcggagtgatgtcctag

SEQ ID NO: 158776 - DNA, 1257 bp, Artificial Sequence
  derived and/or modified sequence
atggcagggcgattgcccgcatgtgtggtagattgcggaaccgggtacacaaaactgggatatgctggaaatacagagccccaattcatcatcccatcatgcatagccattaaggagagcgctaaggtgggagaccaagcccagagaagagtgatgaagggcgtggatgacttggacttctttattggggatgaagcaatcgagaagcctacctacgcaaccaagtggccaataagacacggcatagtggaagactgggacctcatggagcgatttatggagcaagtcattttcaaatatctcagagccgaacctgaagaccattactttctgcttaccgagccgccactgaacacccccgagaaccgcgagtatactgctgaaatcatgtttgagagcttcaatgtgccaggactgtacatcgccgtgcaagccgtacttgccctggctgcatcttggacctctagacaggtgggagagagaactttaaccggtactgttatagactcaggggatggggttacccacgttatacccgtcgctgaaggatatgtgattggcagctgcattaagcacatccccatagctggaagagatataacctacttcatccaacagttgctgagggatcgcgaagtgggcatcccaccagaacaatctctggaaacggcgaaggccgttaaagagagatactcttatgtctgccccgacctggtcaaagaatttaacaaatacgataccgacgggagcaagtggattaagcaatacaccggaatcaacgccatatcaaagaaggagtttagcatagatgtggggtacgagcggttcctgggccctgaaattttcttccatccagaattcgcaaatcccgattttacgcagccaattagtgaggtagttgacgaggtgatccaaaactgccccatagacgttagacggcctctctacaagaatattgtcctgagcggcggatctactatgtttagggatttcgggcgacggttgcagagagatttgaaacgcaccgttgatgcgaggctgaaactcagtgaggaattatcaggaggcagactgaagccaaaaccgattgatgtgcaggtcatcacccaccatatgcagcgttacgcggtttggtttggcggaagtatgctggccagtacacccgagttttatcaggtgtgccatacgaagaaggattatgaggagatcggtcctagcatttgtcgacataatcctgtgttcggagtaatgtcctag

SEQ ID NO: 158777 - DNA, 6718 bp, Artificial Sequence
  derived and/or modified sequence
atcttggcttcccggggaaaggcggcgtgaggggaagaagttgtagggtgggggcaggagtgaggaggagggaagagagagggggaggaggccgcggcggggcagggcggggactgcctgcctgcctgggttgcggaagtgatagccgccgaccgagcctgctgctttcttgctactgcttcggcttcccggctaccccccggacggtgaaggcggcccagctgtggatggtcagatagcccttgtctcccgccgccaatctctggcccctagcagcacggagcagacggcggcagcagcagcagcaggcgaggaggaagatggcgggacggctgccggcctgtgtggtggactgtggcacggggtatacaaaactaggatatgctggaaatacagaaccacagtttatcatcccttcctgtattgctattaaggagtcagcaaaagtgggtgatcaagctcaaaggagggtgatgaaaggtgttgatgacctagacttcttcattggtgatgaagcaatagaaaaacctacatatgcaacaaagtggccaatccgccatggtatagttgaagattgggacttaatggaaaggtttatggagcaagtgatctttaaatatttaagggcagaacctgaagaccattattttcttttgactgaacctccattgaatactccagaaaacagggaatatactgctgaaataatgtttgagtccttcaatgttccaggcttgtacattgctgtgcaggctgttcttgccttagctgcatcttggacctcaagacaagtaggagaacggacgttgaccggtacggtaatagacagtggagatggtgtcactcatgtcattcctgtggctgaagggtatgtgattggcagctgtattaaacacattccaatcgcaggacgagatataacatattttattcagcaactgctgagagaccgagaagtaggaatccctccagaacaatccttggaaactgctaaggcagtaaaggagcgctatagttatgtctgcccagatttagtaaaagaatttaacaagtatgatacagatgggtcaaaatggattaaacagtatactggaatcaatgctatctcaaagaaagagttttctatcgatgttggttatgagagatttttgggacctgaaatcttttttcatccagagtttgctaatccagactttacacaacctatctcagaagttgtagatgaagtaattcagaattgtcctattgatgtcagacgtcctctctacaagaatattgtcctctctggaggttcaaccatgttcagggactttggacgtcgcttgcaaagagatttgaaaagaactgtagatgcccggctgaaattaagtgaggaattgagtggtggtagattgaagccaaaacctattgatgtacaagtcattacacaccacatgcagcgatatgcagtttggtttggaggatcaatgctggcttccacgcctgagttctaccaagtatgccacaccaaaaaggattatgaagaaattggacctagcatttgtcgtcacaatccagtgtttggagtcatgtcgtaaaattggcttcatagttattggggttagggaggtggggaagagataatctttctgattacctgttttgtctggatggctggttttgaggttttaaacctgacttgaaatagtaacaccaaacatgattatacaggaatattttaataagtgtatcaccatgcagatgtagaagagagcgaaagtgattgtgtttttctttagattgaatatttgaatcttatgtgtaacaaaaagaagtgggttttagttctttctgtgccctgatattttgtatattaatgaattatccaagattcgatgggatttatcagtgtgtagatagctctataatgcttgaattgtacacttctaagtgtgcagtgcaagagcttgtttatatttcatactttttatactttgaggaaaaaaagtcaaagaaaaattgtatttgagggaaaaaaccatgaccaagtaaaggataaattcaaaaaatagcctcatgagacttggcatacacactcgtgggattccagttattatggagtgcttccatccctctccaccccttccccccaaaaggttttctttgcaagtgcttttggaactaagagctagtatcttggattaactgatgcctgctagtgctttctgattactcgcattctgtttcttgctttaaaagaagagtaaagacaagagtgttggaccagtattgcagttctgtagtgtcatttcttataaaaaacaaaacaacaacaataatttatcaaaattggcatatttaaagcctaacattctaataaaggcacaaatttctttttaatacttgtttcagcctctttaatctctttataagttaactaataaatctattttcttcagacttctgcaatagttctttaaaatcacaacagttagcaagctgacttttgtaatgtgctcaatacaaatacttgtgaacttttaatatgttgagtgctttcattttgataactggatctccatttgatattttcatttgtataactcatttgcagtctgaaaattttttttagtgccagtccctgaacatatcattgaaagttaattttctttgcattttaaaatatctggattatgaagaaaaagtgatgaaaataaattaaaactgaattaccttttctaatgttttttttttttaagtaatgtaattctattttgtttttatgtatgtgatatctgtttctgttgagatttgggagttattgaaatctctgtaatgtgtatggtagaaaatttcttgtgaccttaaaattttaccagttatttatagaaagagaaaatgggaaatgttttataggctttttactagcagtatcagtgaacacttgaactccattattcatgaaaataacacgttaggattggaatacgtctattcaaaagtgaaagaatataaagtgtttagttttttgtttttactctaaagatagaattggggagtaaacttcagtttttgtttagagtggatctgaatatttaaaatcctataataatttttgtgaatcttcattctttgagtatgggattgtaaaagacaaactatatcctacagtagtatcatcatcagtatcaaaggtctcctttttttacttggaaaagtaattcacaaacattataaaaatactattcaaacagtaccaaagagtagattagcaaaagtaagtttttttccctagcctgtctcatttttccatcattacacagactacttggaatgtcttagatgtccttgtattgtaattttctgtgtaggtagaaataaatgtagctttcttattttacacaaataggaacttactgtatatactgttctgcactttgcttttattaaagatcttttgataaagaactatattgataagcagtaaagatgtcatgctcctggcccaataaaatattgttagcattgtcataaatatgtcttttccaccggcgatggttgggtagttaagtgaataagctagaaagacatgtttataaagctatttgatgacaatctcaggcatatttatacagagatgttcttaactgtttgctacaaaaacatgaagatcaaaaactttcttgaagcttacgcttaacttatttggggaaacaaaactccagcccttcttgtgtatgttctgatatccctttgctctacttttagaggagtgaaccctaataggatggtagcagcattcttgtttctttatatctctcctctgtgattgtataccgttttttcaacttaaagcaacttcagctggaaatatgtagaggttggccaaggtgaactaaatagtctgtaacattgattagatatcaagcaacgtgagcatggtagcaaaagcactaactgaagccagtgatttaatttttaattctgattctgataattgatgatatagctcctcgaactttgttttttgttaaaacttggaaaatatatttgtattattttggacaaattatttgaactctctggaccttgattcaatttatatataaggtaaaggcattatactggattatcctgcaatttctttgagttgttagaatataatgtagcttattaatagcaatattagcagtgtagtagattctgactgcaaaacctagccttttctattgattcattagtggtagtaaaggtattatctgatttatcctttttaataggcagtgctttgatcaagtgggaaatagtaatggacaaataaaatcaatgatcattatctaacttgatgcctgcttttcaaaaagtgagcaaatttcacatcttcacccttagacattaattcatggcacctactataagtactcatcctcttcttacctatcttcttttctataggagataaagtggttattcagaccccccaatacaattttttggtttgttttcacagctacttaaaagattaaaataactattcttgcagatatttctaggaatatttttagaaataatatgaaatacagggataataggccaattatgatctttatttttaatttctacagaaaagtactagagaatatatctatagaaacttctttcagataaccctaaagatgatactagaatgtttataaaattattgagaagattatttgtgttataaagcttatttgtaccatagtaaaggatgtttttgttcctcttcattctgggctaatctgtcaatactgaagtccagtcttttcccccttttcttaccagctcaaccttgattcctgtgacccattctttctgatctttcgtagttcatagtcaccaggcatgagtaccttggatagccctctgaagtctgttaccacccagatttccaactcgggttaattggtactaattctattagctggtataaataatccaaaatctgtgcagactctgggagcaaaatgttctactcagtttggaatactgtgccttaaaatatatttcattgtaacagcaccttgtatatatagttggccaaggacagagttgttacaagttacgtggaactttcatagcaaatcttgacagtaaataccttgttcttgtattaggtctatatcctgaattgacctttagcaagaatctttagatctgctggagggctgggatggcttttggacttcagtgaaaaagaatttctgctactcattgttgataacgcttcagtactgtataaatgtttatccttttccacgtaatttgttttctatgatatgagaacttttattataatttgcctcagtcttgatagaatcttaacaaaaataaaatctgtggtcgtctgaggtattctccatgctataacccagtttagctgatgcatttggagcttgggtgctgaaattaaatataacctatttgagttaaggatttattactagtgctccagtggtcacaggaacaataaaaaaggaacaacgatagaaatacgtgatctaggaaagaaggcaactgaaaaacctgaaagaaaaaaaatgaaagattaaaagtatacgatattctattttgatttagcaattacttgttttctagtgttctgtcaatttttggtgacttttataattacattaaaactaagatgctgaattaaaataaagtttctcttttattcaagcaccaacattcacttatattacctatatattgcatcaagttttgagccttcaatcccagaagcattgattgactgtctactgtggttcaagtactgtgcataaagatgaataaatattctgtccttggcttagtctaatagtaaaggcactcttagaggagggacaaatattttgcctagataagatttgagagatagtaagtgcggaatttctcttcataaaaatggtagtgttagttgtttagagggagaagtccagctatgtaaggtgaaagtggggcttataaaagtggatctattgtttaaaaattagtactttgctcctaaaatttttacctaagtgttacatccaacaacagatgaaagtaattcgacagtagcatctgctttattcatttcatatttccagtgcctgacatattgcttggcatatagtagtttagtggatgtgtttgatgaatgaatgagtaaaaattatttttcatgttaaaataaaactttgaattacatgagtatacaacttttgttccttcaaaatacccatatttgtcaaatatgaccgaattacgactttttttctgttccactagtttctaccttagaagtgacattctgcgtaaggtagtgggggattactaagtgatcatgacttttctgaagcaggtcttaaataattatctaagccttcagtcatttcaaaatctctgtagtgtaaatgatcacaggctctaaatcagattgttgtacaaggtaattgacatgtcctgaaatgtaacattcaacattaacagtagaaacaggcctcatttctccctctggcttttattgatcaattttgatattgtccagatcccatgttaaaccacttgatttagagatgacttaattctaaacttcctccatttttaattaataagattcaaggttgcagtaaattgttaatcttatttggaattatattagaaagtcgatatcggaattggaaccacacatctttttcttattgtgggtacatgggat

SEQ ID NO: 158778 - DNA, 1381 bp, Artificial Sequence
  derived and/or modified sequence
gggggtggtccccgggcccgacccatccggctttcctttccctccgcgcccgtttttgccagtcggtttggggacccaggggccgagctcggggactggcctggcaggggagctagaaaagagaagcgctcctggtatacaaaactaggatatgctggaaatacagaaccacagtttatcatcccttcctgtattgctattaaggagtcagcaaaagtgggtgatcaagctcaaaggagggtgatgaaaggtgttgatgacctagacttcttcattggtgatgaagcaatagaaaaacctacatatgcaacaaagtggccaatccgccatggtatagttgaagattgggacttaatggaaaggtttatggagcaagtgatctttaaatatttaagggcagaacctgaagaccattattttcttttgactgaacctccattgaatactccagaaaacagggaatatactgctgaaataatgtttgagtccttcaatgttccaggcttgtacattgctgtgcaggctgttcttgccttagctgcatcttggacctcaagacaagtaggagaacggacgttgaccggtacggtaatagacagtggagatggtgtcactcatgtcattcctgtggctgaagggtatgtgattggcagctgtattaaacacattccaatcgcaggacgagatataacatattttattcagcaactgctgagagaccgagaagtaggaatccctccagaacaatccttggaaactgctaaggcagtaaaggagcgctatagttatgtctgcccagatttagtaaaagaatttaacaagtatgatacagatgggtcaaaatggattaaacagtatactggaatcaatgctatctcaaagaaagagttttctatcgatgttggttatgagagatttttgggacctgaaatcttttttcatccagagtttgctaatccagactttacacaacctatctcagaagttgtagatgaagtaattcagaattgtcctattgatgtcagacgtcctctctacaagaatattgtcctctctggaggttcaaccatgttcagggactttggacgtcgcttgcaaagagatttgaaaagaactgtagatgcccggctgaaattaagtgaggaattgagtggtggtagattgaagccaaaacctattgatgtacaagtcattacacaccacatgcagcgatatgcagtttggtttggaggatcaatgctggcttccacgcctgagttctaccaagtatgccacaccaaaaaggattatgaagaaattggacctagcatttgtcgtcacaatccagtgtttggagtcatgtcgtaaaattggcttcatagttattggggttagggaggtg

SEQ ID NO: 158779 - DNA, 1257 bp, Artificial Sequence
  derived and/or modified sequence
atggccggcagactgcccgcctgcgtggtggactgcggcaccggctacaccaagctgggctacgccggcaacaccgagccccagttcatcatccccagctgcatcgccatcaaggagagcgccaaggtgggcgaccaggcccagagaagagtgatgaagggcgtggacgacctggacttcttcatcggcgacgaggccatcgagaagcccacctacgccaccaagtggcccatcagacacggcatcgtggaggactgggacctgatggagagattcatggagcaggtgatcttcaagtacctgagagccgagcccgaggaccactacttcctgctgaccgagccccccctgaacacccccgagaacagagagtacaccgccgagatcatgttcgagagcttcaacgtgcccggcctgtacatcgccgtgcaggccgtgctggccctggccgccagctggaccagcagacaggtgggcgagagaaccctgaccggcaccgtgatcgacagcggcgacggcgtgacccacgtgatccccgtggccgagggctacgtgatcggcagctgcatcaagcacatccccatcgccggcagagacatcacctacttcatccagcagctgctgagagacagagaggtgggcatcccccccgagcagagcctggagaccgccaaggccgtgaaggagagatacagctacgtgtgccccgacctggtgaaggagttcaacaagtacgacaccgacggcagcaagtggatcaagcagtacaccggcatcaacgccatcagcaagaaggagttcagcatcgacgtgggctacgagagattcctgggccccgagatcttcttccaccccgagttcgccaaccccgacttcacccagcccatcagcgaggtggtggacgaggtgatccagaactgccccatcgacgtgagaagacccctgtacaagaacatcgtgctgagcggcggcagcaccatgttcagagacttcggcagaagactgcagagagacctgaagagaaccgtggacgccagactgaagctgagcgaggagctgagcggcggcagactgaagcccaagcccatcgacgtgcaggtgatcacccaccacatgcagagatacgccgtgtggttcggcggcagcatgctggccagcacccccgagttctaccaggtgtgccacaccaagaaggactacgaggagatcggccccagcatctgcagacacaaccccgtgttcggcgtgatgagctag

SEQ ID NO: 158780 - protein, 394 aa, Artificial Sequence
  derived and/or modified sequence
MDSQGRKVVVCDNGTGFVKCGYAGSNFPEHIFPALVGRPIIRSTTKVGNIEIKDLMVGDEASELRSMLEVNYPMENGIVRNWDDMKHLWDYTFGPEKLNIDTRNCKILLTEPPMNPTKNREKIVEVMFETYQFSGVYVAIQAVLTLYAQGLLTGVVVDSGDGVTHICPVYEGFSLPHLTRRLDIAGRDITRYLIKLLLLRGYAFNHSADFETVRMIKEKLCYVGYNIEQEQKLALETTVLVESYTLPDGRIIKVGGERFEAPEALFQPHLINVEGVGVAELLFNTIQAADIDTRSEFYKHIVLSGGSTMYPGLPSRLERELKQLYLERVLKGDVEKLSKFKIRIEDPPRRKHMVFLGGAVLADIMKDKDNFWMTRQEYQEKGVRVLEKLGVTVR

SEQ ID NO: 158781 - DNA, 1185 bp, Artificial Sequence
  derived and/or modified sequence
atggactcccagggccgaaaggttgtggtttgtgataacggtacaggattcgtgaaatgcggatatgccggaagtaatttcccggagcatatcttccccgctcttgtcggacgccccatcatcaggagtaccaccaaagtcggtaacatcgagataaaagacttaatggtgggcgatgaggccagcgaactgaggagcatgctcgaggtgaattatcctatggagaacggcattgtacgaaattgggacgatatgaaacacctttgggattacacctttgggccagaaaagctgaatatcgatacacggaactgtaaaattctccttacagagcctccaatgaaccccactaaaaatcgagaaaagatcgtagaggtcatgttcgagacttaccagtttagcggggtgtatgtggccattcaggccgtgttaactttgtatgcgcaggggcttctcaccggagtggtggtggattctggtgacggcgtgactcacatttgcccggtttatgaagggttctctctcccccatctcactcgtcgcttggatatcgcggggcgggacattacacggtacctgatcaagcttttgttgcttaggggttacgctttcaatcactccgctgactttgagaccgtcaggatgatcaaggaaaagttatgttacgtcggatacaatatcgagcaggagcagaaactggcacttgagaccaccgtcctggtcgagagctatacactccctgacggacgtattatcaaggtgggaggcgaacgctttgaggccccggaggcactctttcagccgcatctgattaacgtggaaggggtgggcgtcgctgagctcctgttcaatactattcaggcagctgatattgatacaaggagcgaattctataagcatatcgtactgtcaggtggatccacaatgtatcccggacttccctcccgcctcgagcgagagctgaagcaactctacctcgaacgcgttttgaaaggggatgtggagaagctttcaaaattcaagatccggatcgaggatcccccacggcggaagcacatggtcttcctggggggggccgttcttgcagatatcatgaaggataaggataatttttggatgactagacaagaataccaggaaaaaggagtgcgggttctggagaaacttggggttacggtgaggtag

SEQ ID NO: 158782 - DNA, 1020 bp, Artificial Sequence
  derived and/or modified sequence
atggttggcgacgaggcatcggagctgcgttcaatgctggaagtaaactatccgatggagaatggcattgtgagaaactgggatgacatgaaacacttgtgggactacaccttcggtcctgagaagctgaacatagatacacgaaactgtaagatactccttacagagcctcccatgaaccccacgaaaaaccgagaaaaaatagtggaagtcatgtttgagacctaccagttcagcggcgtgtacgtggccattcaggccgttctgaccttgtacgcccaggggctgttaactggcgtggttgtagactcaggtgatggggtgacccatatttgtcccgtatatgagggcttcagtttaccccacctgacccgccgcctggacatcgccgggagggacatcaccaggtacttgataaaattgttgctgctccggggctatgccttcaaccattctgcagactttgaaacagtcagaatgatcaaagagaagctgtgctatgtgggctataacatagaacaggagcagaaattagctttggagacaacggtcctcgtggagtcctataccttacccgatggaaggattataaaggtgggtggagagcgtttcgaggcccccgaagcactgttccaaccccatctgattaatgtggagggagtcggcgtggcggagcttctctttaatacgattcaagccgcagacatcgatactaggtcagagttttacaaacacattgtgctcagcggagggagcacaatgtaccccggcctgccctctaggctagagcgggagctaaagcagctttacctggagagagttctcaaaggcgatgttgagaagctctcaaagtttaagatcagaatcgaggacccacccaggaggaagcatatggtcttcctcggaggcgccgtgctggcggacatcatgaaggataaggacaacttttggatgacacggcaagaataccaggaaaagggcgtgcgcgtacttgaaaaattaggcgttactgttaggtag

SEQ ID NO: 158783 - DNA, 918 bp, Artificial Sequence
  derived and/or modified sequence
atggtgggggacgaagcttccgaactccggagtatgcttgaggtgaattaccccatggagaacgggatcgttcgcaattgggacgacatgaaacatctatgggactacaccttcgggcctgaaaaattgaatatcgacacgcgcaactgtaaaatccttctcaccgagcctcccatgaatcccaccaagaaccgagaaaagatcgtggaggtaatgttcgagacataccagttcagtggagtctacgtagctattcaggccgtgctgactctttacgcccagggcctcctgacgggggtggtggtggattctggggacggcgtgacccacatctgtcctgtctatgagggattcagtctcccgcacctcacaagacgacttgatatcgctggtcgcgatatcactcggtacctgatcaaactgctgctcctcaggggttatgccttcaaccactcggcggacttcgagacggtccgcatgatcaaggaaaagctctgctatgtcggatacaatatagaacaagagcagaagttagccttggagacaacggtgttggttgagagttacacgttgccagacgggcgtatcatcaaggtgggcggggagaggtttgaagcacctgaggccctcttccagccacatctcatcaacgttgaaggagtgggagtggctgaactcctcttcaacaccattcaggcggctgatattgacactcgatccgagttctacaagcacatcgtgttgtccggtggatctaccatgtacccaggcctcccctctaggctggagagggagttaaaacagctgtatctggagagggtactcaagggggatgtggagaagctttctgtgagcatctcaaagtccacgattaccaatatcctcctgaaaggctacacagtggtatgcgagtcctag

SEQ ID NO: 158784 - DNA, 1185 bp, Artificial Sequence
  derived and/or modified sequence
atggacagccagggcaggaaggtggtggtgtgtgacaatggaactggatttgtgaagtgtggctacgccggcagcaacttccctgagcacatcttccctgccctggtgggccggcccatcatccgcagcaccaccaaggtgggcaacatcgagatcaaggacctgatggtgggagatgaggccagcgagctgcgctccatgctggaggtgaactaccccatggagaatggcatcgtgaggaactgggatgacatgaagcacctgtgggactacacctttggacctgagaagctgaacatcgacaccaggaactgcaagatcctgctgacagagccccccatgaaccccaccaagaaccgggagaagatcgtggaggtgatgtttgagacctaccagttcagcggcgtgtatgtggccatccaggccgtgctgaccctgtatgcccagggcctgctgactggagtggtggtggacagcggagatggagtgacccacatctgccctgtgtatgagggcttcagcctgccccacctgacccggcggctggacattgctggccgggacatcacccgctacctgatcaagctgctgctgctgcggggctacgccttcaaccacagcgctgactttgagaccgtgaggatgatcaaggagaagctgtgctacgtgggctacaacatcgagcaggagcagaagctggccctggagaccaccgtgctggtggagagctacaccctgcctgatggccgcatcatcaaggtgggcggggagagatttgaggcccctgaggccctcttccagccccacctgatcaacgtggagggcgtgggcgtggccgagctgctcttcaacaccatccaggccgctgacatcgacaccaggtctgagttctacaagcacatcgtgctgagcggcggcagcaccatgtacccaggcctgcccagccggctggagcgggagctgaagcagctgtacctggagcgggtgctgaagggagatgtggagaagctgagcaagttcaagatcagaattgaagatcctcccaggaggaagcacatggtgttcctgggcggcgctgtgctggccgacatcatgaaggacaaggacaacttctggatgacccggcaggagtaccaggagaagggcgtgcgggtgctggagaagctgggcgtgacagtgaggtag

SEQ ID NO: 158785 - DNA, 1020 bp, Artificial Sequence
  derived and/or modified sequence
atggtgggagatgaggccagcgagctgcgctccatgctggaggtgaactaccccatggagaatggaattgtgaggaactgggatgacatgaagcacctgtgggactacaccttcggccctgagaagctgaacatcgacaccaggaactgcaagatcctgctgacagagccccccatgaaccccaccaagaaccgggagaagatcgtggaggtgatgtttgagacctaccagttctctggagtgtatgtggccatccaggccgtgctgaccctgtatgcccagggcctgctgactggagtggtggtggacagcggagatggagtgacccacatctgccctgtgtatgagggcttcagcctgccccacctgacccggcggctggacattgctggccgggacatcacccgctacctgatcaagctgctgctgctgcggggctacgccttcaaccacagcgctgactttgaaacagtgaggatgatcaaggagaagctgtgctacgtgggctacaacatcgagcaggagcagaagctggccctggagaccaccgtgctggtggagagctacaccctgcctgatggccgcatcatcaaggtgggcggggagagatttgaggcccctgaggccctcttccagccccacctgatcaacgtggagggcgtgggcgtggccgagctgctcttcaacaccatccaggccgctgacatcgacaccaggtctgagttctacaagcacatcgtgctgagcggcggcagcaccatgtacccaggcctgcccagccggctggagcgggagctgaagcagctgtacctggagcgggtgctgaagggagatgtggagaagctgagcaagttcaagatcagaattgaggacccccccaggaggaagcacatggtgttcctgggcggcgctgtgctggccgacatcatgaaggacaaggacaacttctggatgacccggcaggagtaccaggagaagggcgtgcgggtgctggagaagctgggcgtgacagtgaggtag

SEQ ID NO: 158786 - DNA, 918 bp, Artificial Sequence
  derived and/or modified sequence
atggtgggagatgaggccagcgagctgcgctccatgctggaggtgaactaccccatggagaatggaattgtgaggaactgggatgacatgaagcacctgtgggactacaccttcggccctgagaagctgaacatcgacaccaggaactgcaagatcctgctgacagagccccccatgaaccccaccaagaaccgggagaagatcgtggaggtgatgtttgagacctaccagttctctggagtgtatgtggccatccaggccgtgctgaccctgtatgcccagggcctgctgactggagtggtggtggacagcggagatggagtgacccacatctgccctgtgtatgagggcttcagcctgccccacctgacccggcggctggacattgctggccgggacatcacccgctacctgatcaagctgctgctgctgcggggctacgccttcaaccacagcgctgactttgaaacagtgaggatgatcaaggagaagctgtgctacgtgggctacaacatcgagcaggagcagaagctggccctggagaccaccgtgctggtggagagctacaccctgcctgatggccgcatcatcaaggtgggcggggagagatttgaggcccctgaggccctcttccagccccacctgatcaacgtggagggcgtgggcgtggccgagctgctcttcaacaccatccaggccgctgacatcgacaccaggtctgagttctacaagcacatcgtgctgagcggcggcagcaccatgtacccaggcctgcccagccggctggagcgggagctgaagcagctgtacctggagcgggtgctgaagggagatgtggagaagctgtctgtgtccatcagcaagagcaccatcaccaacatcctgctgaagggctacacagtggtgtgtgagagctag

SEQ ID NO: 158787 - DNA, 1185 bp, Artificial Sequence
  derived and/or modified sequence
atggacagccagggccggaaggtggtggtgtgcgacaacggcaccggtttcgttaaatgtgggtacgcagggtctaatttccctgaacacatcttccccgctctggtcgggagaccaatcataagatccaccacaaaagtgggcaatatagaaattaaagacttgatggtgggcgacgaggctagcgaactgagatccatgttggaggtgaactaccctatggaaaatggaatcgtaaggaactgggacgatatgaaacacctgtgggactacacattcggacctgagaaacttaacatcgacacccgtaactgcaaaatactgctcaccgagccgcccatgaatcccaccaagaatagggagaagatcgtggaggtcatgtttgaaacataccagttcagtggagtctatgttgccattcaggccgttctgactttatacgctcagggactcctcaccggtgtcgtggtggacagcggggacggcgtgacgcacatctgccccgtgtacgaggggttttccctcccacatctgacccgaagactggacattgcgggaagggatatcaccagataccttatcaaactgctgctgctacgaggatacgctttcaatcactctgccgactttgaaacagttcgtatgattaaggagaagctgtgttatgtcggctacaacatcgaacaggagcagaagctggctctggagacaactgtgttagtggagagctacactctgcctgacggccgtatcatcaaggtaggcggtgaacggttcgaagcaccagaagcactcttccagccacatcttatcaacgtggaaggagtgggtgttgcggagcttctgttcaataccatccaggctgcagatatcgacacccggtccgaattctataagcacatcgttctctcaggcggcagtacaatgtatccagggctcccctcccgactcgaacgcgaactgaaacagctgtatctggagagagttctgaagggagatgttgaaaaattaagcaagtttaagattagaattgaagatccaccccgccggaaacacatggtttttctcgggggagccgtgctagcagacattatgaaggacaaggacaacttttggatgaccaggcaggagtatcaggagaagggcgttcgagtcttagaaaaactgggggtgaccgtcagatag

SEQ ID NO: 158788 - DNA, 1020 bp, Artificial Sequence
  derived and/or modified sequence
atggtgggcgacgaggccagcgagctgcggagcatgctggaggtgaactatccaatggagaacggcatagtgcggaactgggatgacatgaaacatttgtgggattatactttcgggcctgaaaaactgaacatcgatactaggaattgcaaaattctactgacggagccacccatgaatcccaccaagaatagggagaaaatcgtggaggtgatgtttgagacctaccaatttagcggcgtgtatgtggcaattcaggctgtgctgactctctatgcccaggggcttttgaccggtgtggtggttgacagcggcgacggagtgacacatatttgccccgtgtatgagggttttagtctgcctcatcttacccggcgcttagacatcgccgggagagatatcacgaggtatctcatcaaactgctgctcctaagaggatatgcatttaaccactctgcagactttgagacagtgcggatgatcaaggaaaaactgtgttacgtgggttacaatatcgagcaggagcagaaactcgccctggaaaccactgttttggttgagtcatatactttgcctgacggccggatcataaaggtaggcggcgaacggtttgaagcccccgaggctctcttccaaccccacttaatcaacgtggagggagtgggcgtagccgagctgctctttaatactatccaggcagccgacatcgacaccaggagcgagttttacaagcatatcgtgctctcgggtggcagcacgatgtaccccggcctgccttctcgactggaacgcgagctcaaacagttatacctggagagagtgctgaaaggagatgtcgagaagttatcaaaattcaaaatcaggatcgaggatcctccccgcaggaaacatatggtgtttctaggaggtgcggtcttggctgacattatgaaagataaggataacttttggatgactcgacaggaataccaggagaagggtgtgcgggtccttgaaaaactgggcgtgactgtcaggtag

SEQ ID NO: 158789 - DNA, 918 bp, Artificial Sequence
  derived and/or modified sequence
atggtgggcgacgaggccagcgagctgcggagcatgctggaggtgaactaccccatggagaacggcattgtgcgtaattgggacgatatgaaacacctgtgggactacacctttggcccggaaaaactgaatattgatacccgaaattgtaagattttattgacagagcctccgatgaaccctaccaaaaatcgggaaaagatagtagaggtgatgttcgagacctaccaattctctggagtgtatgtggctatccaggccgtcctgactttgtatgcacagggattgttgacaggcgtagtagtcgactccggggacggagtgactcacatttgcccagtttacgaaggattctcacttcctcatttgacaaggcgtctagatatcgccggtagggatatcacgaggtatctcatcaaactactcttactgcgcgggtacgcatttaatcactcagccgatttcgagacagtacggatgataaaggaaaaactgtgctatgtgggctataacatcgaacaggaacagaaacttgcactggaaacaaccgtgcttgtggagtcctacactcttccggatggcagaatcattaaggtcggaggggaacgcttcgaagctcctgaagccctgttccagcctcacttgatcaatgttgagggcgtgggcgtcgccgagctgttgttcaacactatacaggccgccgacatcgatacaaggagcgagttttacaagcacatcgtcctgagcggggggtccacaatgtacccagggcttccctctaggctggaacgtgaactcaagcaactgtatttggagagagtgcttaagggcgacgtggagaaactttccgtcagcatctctaagagcacgatcactaacattttactcaaaggttacaccgtcgtatgtgaaagttag

SEQ ID NO: 158790 - DNA, 1185 bp, Artificial Sequence
  derived and/or modified sequence
atggatagtcagggacgcaaagttgtggtgtgtgataacggaaccggctttgtgaagtgtggatacgcaggatccaattttcccgagcacatcttccctgcactcgtagggagacccatcatccgatcaacaaccaaggttggaaacattgaaataaaagacctgatggtgggagatgaagcctccgagctgcggagcatgctggaggtgaactacccaatggagaatggcatcgtgagaaactgggatgatatgaagcacctgtgggactacacctttggccctgaaaagttgaacatcgatacaagaaattgcaagattctgctgacagagccccctatgaaccccacaaaaaacagggagaagatcgttgaggtgatgtttgagacatatcaattctctggcgtctatgtggccattcaggcagtgctgacactctatgcccagggactgctgacgggcgtggtagtggactccggcgacggcgtgacacacatctgtcccgtgtacgaaggcttttctctgcctcacttaactcgtagactcgacatcgcgggacgcgacatcacaagatacctgatcaaactgctgctgctccgaggatacgcctttaaccatagcgcagatttcgagacagtacgcatgatcaaggaaaagctgtgctacgtgggctacaacatcgagcaggagcagaaactcgcactcgagacaactgtgctggtcgaatcctacaccctgcctgacggcaggattatcaaagtaggaggtgagcggtttgaggctcccgaggcgctgttccagccacacctgatcaacgtggaaggcgtgggggtcgccgagttactgttcaacacaatccaggcagctgatatcgacacaagatctgagttctacaaacatattgtgctctccggaggaagcacgatgtacccaggactcccaagtaggcttgagagagaacttaaacagctttacctcgagcgagtcctgaagggcgacgttgaaaagctctccaaatttaaaattaggattgaagatcccccacggcgaaagcacatggtttttttaggcggagcagtgctggcagatatcatgaaggataaggataatttttggatgacaagacaggagtatcaggaaaagggagtgcgcgtgcttgaaaagctgggcgtgacggtgaggtag

SEQ ID NO: 158791 - DNA, 1020 bp, Artificial Sequence
  derived and/or modified sequence
atggtgggagacgaggctagcgagcttcgctcgatgcttgaagtcaactacccgatggagaatggcattgtgagaaactgggatgatatgaaacacctgtgggactataccttcggccctgagaagttgaatatcgacactcggaattgcaagattttactcacagagcctccaatgaacccaaccaaaaatcgcgagaaaatcgtggaagtgatgttcgagacttaccagttctccggggtgtacgttgctatccaggctgtgttaaccctgtatgctcaggggctactgaccggggtcgtggtcgactctggcgatggggtcacacacatatgccctgtttatgaagggttctctctgccccacttgacccggaggttggacattgcaggccgagatatcaccaggtatctaattaagctacttctcctgaggggatatgcttttaatcattccgcagattttgagactgtgaggatgattaaagagaaactttgttatgtcggctacaacattgagcaagaacagaaactggctttggaaactactgtcctggtagagagctataccctgccagacgggcgtattattaaagttgggggagaacgattcgaagcacctgaggcactgtttcagccccatctaattaatgtcgagggtgtcggagttgccgagcttctgttcaatactatacaggccgcagatattgatacccggagcgaattctataagcacatagtcttgtcaggaggctccacgatgtaccccggactgcccagtaggctggaaagagagcttaagcagctgtatctggaaagagtgctcaagggtgacgttgagaagctctccaagtttaaaatcagaattgaggatccaccccgacgcaagcacatggtattcctgggaggggcagttctagctgatattatgaaagataaggacaacttctggatgaccagacaagagtaccaagagaagggggtccgggtgctggaaaagcttggggtaactgtgcggtag

SEQ ID NO: 158792 - DNA, 918 bp, Artificial Sequence
  derived and/or modified sequence
atggtcggcgatgaggctagtgagcttaggagcatgctcgaagtgaactacccaatggaaaatggcattgtgaggaattgggacgatatgaaacacctgtgggattatacattcggtccagaaaaactcaacattgataccagaaattgtaaaatcctgcttactgagcccccaatgaatcctactaaaaatagagaaaaaatcgtggaagtgatgttcgaaacttaccagttcagcggtgtgtatgtggccatccaggccgtgctcactctgtatgcacaaggactattgacaggcgttgtcgtcgattcaggggatggggtgacacatatctgtcctgtgtatgaaggttttagcctacctcatctgacgaggaggctggacatagccggaagggatatcacacgttacttaataaaactgcttttactgcgaggatacgcattcaatcattcagctgacttcgaaactgtgagaatgatcaaagagaaactttgctacgttggatataacattgagcaggagcaaaagctggcacttgagactacggtgctcgtggagtcctacaccctgcctgacggcaggatcatcaaggtgggcggtgagcggtttgaagctcctgaggctttgttccaacctcatcttatcaacgtggagggcgtcggggtagctgagttactttttaacaccattcaggccgcagatatcgacaccagaagtgagttctataaacacattgtcttgtcaggtgggtccactatgtacccgggtctgccctcgaggctggagcgcgagctgaagcagctatatcttgaaagagtgttgaaaggtgatgtggaaaagctatcagtttcaatcagtaagtcaacaatcaccaatatcctcttaaagggctacacagtggtgtgcgagtcatag

SEQ ID NO: 158793 - DNA, 3861 bp, Artificial Sequence
  derived and/or modified sequence
agctaaatgacgggcggagcccggcggcggcttccggtcgggggaaaaaagttgggccgaaggaggggccgggaagacgcaagaggaagaagagaaaacggccgggcggcggtggctgtaggttgtgcggctgcagcggctcttccctgggcggacgatggacagccagggcaggaaggtggtggtgtgcgacaacggcaccgggtttgtgaagtgtggatatgcaggctctaactttccagaacacatcttcccagctttggttggaagacctattatcagatcaaccaccaaagtgggaaacattgaaatcaaggatcttatggttggtgatgaggcaagtgaattacgatcaatgttagaagttaactaccctatggaaaatggcatagtacgaaattgggatgacatgaaacacctgtgggactacacatttggaccagagaaacttaatatagataccagaaattgtaaaatcttactcacagaacctcctatgaacccaaccaaaaacagagagaagattgtagaggtaatgtttgaaacttaccagttttccggtgtatatgtagccatccaggcagttctgactttgtacgctcaaggtttattgactggtgtagtggtagactctggagatggtgtgactcacatttgcccagtatatgaaggcttttctctccctcatcttaccaggagactggatattgctgggagggatataactagatatcttatcaagctacttctgttgcgaggatacgccttcaaccactctgctgattttgaaacggttcgcatgattaaagaaaaactgtgttacgtgggatataatattgagcaagagcagaaactggccttagaaaccacagtattagttgaatcttatacactcccagatggacgtatcatcaaagttgggggagagagatttgaagcaccagaagctttatttcagcctcacttgatcaatgttgaaggagttggtgttgctgaattgctttttaacacaattcaggcagctgacattgataccagatctgaattctacaaacacattgtgctttctggagggtctactatgtatcctggcctgccatcacggttggaacgagaacttaaacagctttacttagaacgagttttgaagggtgatgtggaaaaactttctaaatttaagatccgcattgaagacccaccccgcagaaagcacatggtattcctgggtggtgcagttctagcggatatcatgaaagacaaagacaacttttggatgacccgacaagagtaccaagaaaagggtgtccgtgtgctagagaaacttggtgtgactgttcgataaactccaaagcttgttcccgtcatacccgtaatgctttcttttttcctttattgccaatctttgaactcattcaactccaggacatggaagaggcctctctctgccctttgactggaaaggtcaagttttattctggtgtcttggggaagctttgttaaatttttgttaatgtgggtaaatctgagtttaattcaactgcttccctacatagactagagggctaaggattctgtctgctgctttgtttcttctaagtaggcatttagatcattcctataggcttcctattttcactttactgctctaatgctgctagtcgtagtctttagcacactaggtggtatgcctttattagcataaaacaaaaaaaactttaacaggagcttttacatattactgggatggggggtggttcgggatgggtgggcagctgctgaaccctttagggcatttcctctgtaatgtggcgctttcaactgtactgctgcagctttaagtaccttaaagcttctcctgtgaacttcttagggaaatgttaggttcagaactaaagtgttttgggtgggttttgttgcgggggggagggtaacaatgggtggtcttctgatttttatttttgaggttttgtcaactggagtacgtagaggaactttatttacagtactttgatttggcaggttttcttctacttgtgctctgcctggagctgtttccatatgatataaaaagcaagtgtagtattccattactatgtggcttagggatttatttgttttttaaaatcaaccatgttagctgggattagactccctacagtccttcaatggaaaagtaacatttaaaaatcctttgggtaattcgaattacagatttaaaagagcttaagatctggtgttttgttaatgcttctgtttattccagaagcattaaggtaacccattgccaagtatcattcttgcaaattattcttttatataactgaccagtgcttaataaaacaagcaggtacttacaaataattactggcagtaggttataattggtggtttaaaaataacattggaatacaggacttgttgccaattgggtaattttcattagttgttttgtttgttttgatttgaaacctggaaatacagtaaaatttgactgtttaaaatgttggccaaaaaaatcaagatttaatttttttatttgtactgaaaaactaatcataactgttaattctcagccatctttgaagcttgaaagaagagtctttggtattttgtaaacgttagcagactttcctgccagtgtcagaaaatcctatttatgaatcctgtcggtattccttggtatctgaaaaaaataccaaatagtaccatacatgagttatttctaagtttgaaaaataaaaagaaattgcatcacactaattacaaaatacaagttctggaaaaaatatttttcttcattttaaaacttttttttaactaataatagctttgaaagaagaggcttaatttgggggtggtaactaaaatcaaaagaaatgattgacttgagggtctctgtttggtaagaatacatcattagcttaaataagcagcagaaggttagttttaattatgtagcttctgttaatattaagtgttttttgtctgttttacctcaatttgaacagataagtttgcctgcatgctggacatgcctcagaaccctgaatagcccgtactagatcttgggaacatggatcttagagtcactttggaataagttcttatataaatacccccagccttttgagaacggggcttgttaaaggacgcgtatgtagggcccgtacctactggcagttgggttcagggaaatgggattgacttggccttcaggctcctttggtcataattttaaaatatgggagtagaaaacaacaaagaatggaatggactcttaaaacaatgaaagagcatttatcgtttgtcccttgaatgtagaatttgtttttgatttcataattctgctggtaaatgtgacagttaaaatggtgcattatgtatatatattataatttagaaataccattttataattttactattccagggtgacataatgcatttaaatttgggatttgggtggagtattatgtttaactggagttgtcaagtatgagtccctcaggaaaaaaaaaaaattctgttttaaaaagcaatctgattcttagctcttgaaactattgctacttaaatttccaataattaaaaatttaaaatttttaaattagaattgccaatacttctacatttgagaagggtttttttagaaatacatttagtaaagtccccaagacattagtcttacatttaaacttttttctttaaaacatggttttggtggttaacttttacacagttctgagtactgttaatatctggaaagtatcttgagatatcagtggaaagctaaacagtctaaattaacatgaaatacttcattttgattgagaaaataaaatcagattttttcaaagtcaa

SEQ ID NO: 158794 - DNA, 1429 bp, Artificial Sequence
  derived and/or modified sequence
gggtgggggcggcgggcgagaccggcactggacatggagcctactgaccgcccggcagggacctgctccgcgctaatgcgggggcaattgggctaaagcggacggaagcgtaaaaggctcggtttgtgtgttccgagaagggctcttttccccagggccaccggtttgtaaaaaggagaaagacctagaggccttcctcttcctgtatagttgaagatacaccaaacgagaagcaggaagcgggtttacttaaaaaaaaaaaaaaaaaaagtttgtgaagtgtggatatgcaggctctaactttccagaacacatcttcccagctttggttggaagacctattatcagatcaaccaccaaagtgggaaacattgaaatcaaggatcttatggttggtgatgaggcaagtgaattacgatcaatgttagaagttaactaccctatggaaaatggcatagtacgaaattgggatgacatgaaacacctgtgggactacacatttggaccagagaaacttaatatagataccagaaattgtaaaatcttactcacagaacctcctatgaacccaaccaaaaacagagagaagattgtagaggtaatgtttgaaacttaccagttttccggtgtatatgtagccatccaggcagttctgactttgtacgctcaaggtttattgactggtgtagtggtagactctggagatggtgtgactcacatttgcccagtatatgaaggcttttctctccctcatcttaccaggagactggatattgctgggagggatataactagatatcttatcaagctacttctgttgcgaggatacgccttcaaccactctgctgattttgaaacggttcgcatgattaaagaaaaactgtgttacgtgggatataatattgagcaagagcagaaactggccttagaaaccacagtattagttgaatcttatacactcccagatggacgtatcatcaaagttgggggagagagatttgaagcaccagaagctttatttcagcctcacttgatcaatgttgaaggagttggtgttgctgaattgctttttaacacaattcaggcagctgacattgataccagatctgaattctacaaacacattgtgctttctggagggtctactatgtatcctggcctgccatcacggttggaacgagaacttaaacagctttacttagaacgagttttgaagggtgatgtggaaaaactttctaaatttaagatccgcattgaagacccaccccgcagaaagcacatggtattcctgggtggtgcagttctagcggatatcatgaaagacaaagacaacttttggatgacccgacaagagtaccaagaaaagggtgtccgtgtgctagagaaacttggtgtgactgttcgataaactccaaagcttgttcccgtc

SEQ ID NO: 158795 - DNA, 1185 bp, Artificial Sequence
  derived and/or modified sequence
atggacagccagggcagaaaggtggtggtgtgcgacaacggcaccggcttcgtgaagtgcggctacgccggcagcaacttccccgagcacatcttccccgccctggtgggcagacccatcatcagaagcaccaccaaggtgggcaacatcgagatcaaggacctgatggtgggcgacgaggccagcgagctgagaagcatgctggaggtgaactaccccatggagaacggcatcgtgagaaactgggacgacatgaagcacctgtgggactacaccttcggccccgagaagctgaacatcgacaccagaaactgcaagatcctgctgaccgagccccccatgaaccccaccaagaacagagagaagatcgtggaggtgatgttcgagacctaccagttcagcggcgtgtacgtggccatccaggccgtgctgaccctgtacgcccagggcctgctgaccggcgtggtggtggacagcggcgacggcgtgacccacatctgccccgtgtacgagggcttcagcctgccccacctgaccagaagactggacatcgccggcagagacatcaccagatacctgatcaagctgctgctgctgagaggctacgccttcaaccacagcgccgacttcgagaccgtgagaatgatcaaggagaagctgtgctacgtgggctacaacatcgagcaggagcagaagctggccctggagaccaccgtgctggtggagagctacaccctgcccgacggcagaatcatcaaggtgggcggcgagagattcgaggcccccgaggccctgttccagccccacctgatcaacgtggagggcgtgggcgtggccgagctgctgttcaacaccatccaggccgccgacatcgacaccagaagcgagttctacaagcacatcgtgctgagcggcggcagcaccatgtaccccggcctgcccagcagactggagagagagctgaagcagctgtacctggagagagtgctgaagggcgacgtggagaagctgagcaagttcaagatcagaatcgaggacccccccagaagaaagcacatggtgttcctgggcggcgccgtgctggccgacatcatgaaggacaaggacaacttctggatgaccagacaggagtaccaggagaagggcgtgagagtgctggagaagctgggcgtgaccgtgagatag

SEQ ID NO: 158796 - DNA, 1020 bp, Artificial Sequence
  derived and/or modified sequence
atggtgggcgacgaggccagcgagctgagaagcatgctggaggtgaactaccccatggagaacggcatcgtgagaaactgggacgacatgaagcacctgtgggactacaccttcggccccgagaagctgaacatcgacaccagaaactgcaagatcctgctgaccgagccccccatgaaccccaccaagaacagagagaagatcgtggaggtgatgttcgagacctaccagttcagcggcgtgtacgtggccatccaggccgtgctgaccctgtacgcccagggcctgctgaccggcgtggtggtggacagcggcgacggcgtgacccacatctgccccgtgtacgagggcttcagcctgccccacctgaccagaagactggacatcgccggcagagacatcaccagatacctgatcaagctgctgctgctgagaggctacgccttcaaccacagcgccgacttcgagaccgtgagaatgatcaaggagaagctgtgctacgtgggctacaacatcgagcaggagcagaagctggccctggagaccaccgtgctggtggagagctacaccctgcccgacggcagaatcatcaaggtgggcggcgagagattcgaggcccccgaggccctgttccagccccacctgatcaacgtggagggcgtgggcgtggccgagctgctgttcaacaccatccaggccgccgacatcgacaccagaagcgagttctacaagcacatcgtgctgagcggcggcagcaccatgtaccccggcctgcccagcagactggagagagagctgaagcagctgtacctggagagagtgctgaagggcgacgtggagaagctgagcaagttcaagatcagaatcgaggacccccccagaagaaagcacatggtgttcctgggcggcgccgtgctggccgacatcatgaaggacaaggacaacttctggatgaccagacaggagtaccaggagaagggcgtgagagtgctggagaagctgggcgtgaccgtgagatag

SEQ ID NO: 158797 - DNA, 918 bp, Artificial Sequence
  derived and/or modified sequence
atggtgggcgacgaggccagcgagctgagaagcatgctggaggtgaactaccccatggagaacggcatcgtgagaaactgggacgacatgaagcacctgtgggactacaccttcggccccgagaagctgaacatcgacaccagaaactgcaagatcctgctgaccgagccccccatgaaccccaccaagaacagagagaagatcgtggaggtgatgttcgagacctaccagttcagcggcgtgtacgtggccatccaggccgtgctgaccctgtacgcccagggcctgctgaccggcgtggtggtggacagcggcgacggcgtgacccacatctgccccgtgtacgagggcttcagcctgccccacctgaccagaagactggacatcgccggcagagacatcaccagatacctgatcaagctgctgctgctgagaggctacgccttcaaccacagcgccgacttcgagaccgtgagaatgatcaaggagaagctgtgctacgtgggctacaacatcgagcaggagcagaagctggccctggagaccaccgtgctggtggagagctacaccctgcccgacggcagaatcatcaaggtgggcggcgagagattcgaggcccccgaggccctgttccagccccacctgatcaacgtggagggcgtgggcgtggccgagctgctgttcaacaccatccaggccgccgacatcgacaccagaagcgagttctacaagcacatcgtgctgagcggcggcagcaccatgtaccccggcctgcccagcagactggagagagagctgaagcagctgtacctggagagagtgctgaagggcgacgtggagaagctgagcgtgagcatcagcaagagcaccatcaccaacatcctgctgaagggctacaccgtggtgtgcgagagctag

SEQ ID NO: 158798 - protein, 285 aa, Artificial Sequence
  derived and/or modified sequence
MVYCTTTWAIWNCQLLLGYKPLQNVTGLNTVGSCNTVAEIWLHKEAQKEGWSKAAKLQGRKTKEGLIGLLQEGNTTVLVEVNCETDFVSRNLKFQLLVQQVALGTMMHCQTLKDQPSAYSKGFLNSSELSGLPAGPDREGSLKDQLALAIGKLGENMILKRAAWVKVPSGFYVGSYVHGAMQSPSLHKLVLGKYGALVICETSEQKTNLEDVGRRLGQHVVGMAPLSVGSLDDEPGGEAETKMLSQPYLLDPSITLGQYVQPQGVSVVDFVRFECGEGEEAAETE

SEQ ID NO: 158799 - protein, 325 aa, Artificial Sequence
  derived and/or modified sequence
MSLLRSLRVFLVARTGSYPAGSLLRQSPQPRHTFYAGPRLSASASSKELLMKLRRKTGYSFVNCKKALETCGGDLKQAEIWLHKEAQKEGWSKAAKLQGRKTKEGLIGLLQEGNTTVLVEVNCETDFVSRNLKFQLLVQQVALGTMMHCQTLKDQPSAYSKGFLNSSELSGLPAGPDREGSLKDQLALAIGKLGENMILKRAAWVKVPSGFYVGSYVHGAMQSPSLHKLVLGKYGALVICETSEQKTNLEDVGRRLGQHVVGMAPLSVGSLDDEPGGEAETKMLSQPYLLDPSITLGQYVQPQGVSVVDFVRFECGEGEEAAETE

SEQ ID NO: 158800 - DNA, 858 bp, Artificial Sequence
  derived and/or modified sequence
atggtgtactgcaccaccacctgggccatctggaactgccagctgctgctgggctacaagcccctgcagaacgtgaccggcctgaacaccgtgggcagctgcaacaccgtggccgagatctggctgcacaaggaggcccagaaggagggctggagcaaggccgccaagctgcagggcagaaagaccaaggagggcctgatcggcctgctgcaggagggcaacaccaccgtgctggtggaggtgaactgcgagaccgacttcgtgagcagaaacctgaagttccagctgctggtgcagcaggtggccctgggcaccatgatgcactgccagaccctgaaggaccagcccagcgcctacagcaagggcttcctgaacagcagcgagctgagcggcctgcccgccggccccgacagagagggcagcctgaaggaccagctggccctggccatcggcaagctgggcgagaacatgatcctgaagagagccgcctgggtgaaggtgcccagcggcttctacgtgggcagctacgtgcacggcgccatgcagagccccagcctgcacaagctggtgctgggcaagtacggcgccctggtgatctgcgagaccagcgagcagaagaccaacctggaggacgtgggcagaagactgggccagcacgtggtgggcatggcccccctgagcgtgggcagcctggacgacgagcccggcggcgaggccgagaccaagatgctgagccagccctacctgctggaccccagcatcaccctgggccagtacgtgcagccccagggcgtgagcgtggtggacttcgtgagattcgagtgcggcgagggcgaggaggccgccgagaccgagtag

SEQ ID NO: 158801 - DNA, 978 bp, Artificial Sequence
  derived and/or modified sequence
atgagcctgctgagaagcctgagagtgttcctggtggccagaaccggcagctaccccgccggcagcctgctgagacagagcccccagcccagacacaccttctacgccggccccagactgagcgccagcgccagcagcaaggagctgctgatgaagctgagaagaaagaccggctacagcttcgtgaactgcaagaaggccctggagacctgcggcggcgacctgaagcaggccgagatctggctgcacaaggaggcccagaaggagggctggagcaaggccgccaagctgcagggcagaaagaccaaggagggcctgatcggcctgctgcaggagggcaacaccaccgtgctggtggaggtgaactgcgagaccgacttcgtgagcagaaacctgaagttccagctgctggtgcagcaggtggccctgggcaccatgatgcactgccagaccctgaaggaccagcccagcgcctacagcaagggcttcctgaacagcagcgagctgagcggcctgcccgccggccccgacagagagggcagcctgaaggaccagctggccctggccatcggcaagctgggcgagaacatgatcctgaagagagccgcctgggtgaaggtgcccagcggcttctacgtgggcagctacgtgcacggcgccatgcagagccccagcctgcacaagctggtgctgggcaagtacggcgccctggtgatctgcgagaccagcgagcagaagaccaacctggaggacgtgggcagaagactgggccagcacgtggtgggcatggcccccctgagcgtgggcagcctggacgacgagcccggcggcgaggccgagaccaagatgctgagccagccctacctgctggaccccagcatcaccctgggccagtacgtgcagccccagggcgtgagcgtggtggacttcgtgagattcgagtgcggcgagggcgaggaggccgccgagaccgagtag

SEQ ID NO: 158802 - DNA, 858 bp, Artificial Sequence
  derived and/or modified sequence
atggtctactgtactaccacttgggcgatctggaactgccaattactcctgggctacaaacctcttcagaacgtcacaggactcaacacagtgggaagctgtaatactgtggccgagatctggctgcataaagaggctcagaaagagggatggtcaaaagccgcgaaactccagggacggaaaacaaaggaggggttaattggcttgttgcaggagggcaataccacggtgctagtggaagtgaattgtgagactgactttgtgagtagaaacctgaagttccagcttctggtgcagcaggtggcactcggcaccatgatgcattgccagacactaaaggatcagccgtccgcttactccaagggctttctgaattcctctgaactgtcaggcctcccagcaggtcctgaccgcgagggaagtctgaaagaccagttggcactggccattggcaaattgggggagaacatgatccttaaacgggccgcttgggtgaaagtaccatcaggcttctacgtgggctcctacgtacatggagccatgcaatcccccagcctgcataaattggttcttggaaagtacggcgcgctggtgatctgtgaaacgtcagagcaaaaaactaacctcgaagacgtgggcaggcgcctgggccagcacgtagtgggaatggcccctctcagcgtgggctctctggatgacgaacctggcggagaggcagagaccaagatgctgagccagccctacctgctagacccttctatcaccctgggccagtacgtgcagccccagggtgtgtcagtggttgactttgtgcgtttcgagtgcggcgaaggggaggaggctgcagagacagagtag

SEQ ID NO: 158803 - DNA, 978 bp, Artificial Sequence
  derived and/or modified sequence
atgtcattgttgaggtctctacgggtgttcctggtcgctcggactggttcttatccagctggttcactgttgcgacagtcccctcagccgcgccacaccttttacgccggcccccggctctctgctagcgcctcctcaaaggagctgctcatgaaactccgtagaaaaacgggctattcttttgtgaattgcaagaaggccctcgagacatgcggtggggatctgaagcaagctgaaatctggcttcacaaagaggcccagaaggaaggctggtccaaagccgccaagttgcaaggtcgaaagacgaaggaaggcctaattggccttctgcaggagggcaatactactgtgctcgtcgaagtgaattgcgaaaccgacttcgtctcacggaacctgaagttccagcttcttgtccagcaggtcgctttggggacaatgatgcattgtcagaccctcaaggatcagcctagcgcctacagcaaggggtttttgaattctagcgagctaagcgggctccctgcgggccctgaccgggaagggagcctcaaagaccagttggcactagctataggtaagttgggcgaaaacatgatcttaaaaagagcggcttgggttaaggtccctagcggcttctacgtgggatcttatgtgcacggagccatgcagagccctagcctgcataagttggttctgggtaagtatggcgcccttgtgatctgcgagacctccgagcagaagactaaccttgaggacgttggaaggaggttgggacaacacgtggtgggcatggcacctcttagcgtggggtcattggacgatgagcccggaggcgaagcagagactaagatgttaagccagccttacctattggatccgtcaatcacacttggacagtacgtccaaccccaaggggtgtccgttgtagactttgtccgctttgaatgtggagagggtgaggaagcggcagaaaccgaatag

SEQ ID NO: 158804 - DNA, 858 bp, Artificial Sequence
  derived and/or modified sequence
atggtgtactgcaccaccacctgggccatctggaactgccagctgctgctgggctacaagcccctgcagaatgtgacaggcctgaacacagtgggcagctgcaacacagtggccgagatctggctgcacaaggaggcccagaaggagggctggagcaaggccgccaagctgcagggcaggaagaccaaggagggcctgattggcctgctgcaggagggcaacaccaccgtgctggtggaggtgaactgtgaaacagactttgtgtccaggaacctgaagttccagctgctggtgcagcaggtggccctgggcaccatgatgcactgccagaccctgaaggaccagcccagcgcctacagcaagggcttcctgaacagcagcgagctgagcggcctgcctgctggccctgaccgggagggcagcctgaaggaccagctggccctggccatcggcaagctgggggagaacatgatcctgaagagagctgcctgggtgaaggtgcccagcggcttctacgtgggcagctatgtgcacggggccatgcagagccccagcctgcacaagctggtgctgggcaagtacggggccctggtgatctgtgagaccagcgagcagaagaccaacctggaggatgtgggccggcggctgggccagcacgtggtgggcatggcccccctgtctgtgggcagcctggatgatgagcctggaggagaggccgagaccaagatgctgagccagccctacctgctggaccccagcatcaccctgggccagtatgtgcagccccagggcgtgtctgtggtggactttgtgcgctttgaatgtggggagggggaggaggccgctgagacagaatag

SEQ ID NO: 158805 - DNA, 978 bp, Artificial Sequence
  derived and/or modified sequence
atgagcctgctgcggagcctgcgggtcttcctggtggccaggacaggcagctacccagctggcagcctgctgcggcagagcccccagcccaggcacaccttctacgccggcccccggctgagcgccagcgccagcagcaaggagctgctgatgaagctgcggaggaagacaggctacagctttgtgaactgcaagaaggccctggagacctgtggcggggacctgaagcaggccgagatctggctgcacaaggaggcccagaaggagggctggagcaaggccgccaagctgcagggcaggaagaccaaggagggcctgattggcctgctgcaggagggcaacaccaccgtgctggtggaggtgaactgtgaaacagactttgtgtccaggaacctgaagttccagctgctggtgcagcaggtggccctgggcaccatgatgcactgccagaccctgaaggaccagcccagcgcctacagcaagggcttcctgaacagcagcgagctgagcggcctgcctgctggccctgaccgggagggcagcctgaaggaccagctggccctggccatcggcaagctgggggagaacatgatcctgaagagagctgcctgggtgaaggtgcccagcggcttctacgtgggcagctatgtgcacggggccatgcagagccccagcctgcacaagctggtgctgggcaagtacggggccctggtgatctgtgagaccagcgagcagaagaccaacctggaggatgtgggccggcggctgggccagcacgtggtgggcatggcccccctgtctgtgggcagcctggatgatgagcctggaggagaggccgagaccaagatgctgagccagccctacctgctggaccccagcatcaccctgggccagtatgtgcagccccagggcgtgtctgtggtggactttgtgcgctttgaatgtggggagggggaggaggccgctgagacagaatag

SEQ ID NO: 158806 - DNA, 858 bp, Artificial Sequence
  derived and/or modified sequence
atggtgtactgcaccaccacctgggccatctggaactgccagctgctcttgggctataaaccattgcagaatgtgactggcctgaacactgtcggatcctgcaataccgttgccgagatttggttacacaaagaagcccagaaggagggttggtccaaggcggccaaactgcagggtcgcaagacgaaggagggcctgatcggattactgcaggaggggaacactaccgtgctggttgaagtgaactgcgagacagattttgtgtctagaaatctgaaattccagctcttagtgcagcaggttgctctcgggaccatgatgcattgtcagactctgaaggaccaaccttcggcctatagtaaggggttcctgaatagttccgaactgagcggactgcccgctggtccggatagagaagggagcttgaaggatcaactggcactcgccatcgggaaacttggagagaatatgattttaaagagagccgcatgggttaaagttccttcaggcttctacgtaggctcttatgtccatggcgctatgcagtccccttcactgcataaactggtcctgggcaaatacggtgccctggttatctgtgagacctcagagcagaagacaaaccttgaggacgtcggccgcaggttaggccagcacgtagttggaatggctcctctgtccgtgggttcattggacgacgagccaggcggagaagctgagaccaaaatgctctctcaaccctatttactcgacccatctatcaccctcggacagtatgttcaaccccagggagtgagtgtagtggatttcgttcgctttgaatgcggagagggcgaggaagccgccgagacagaatag

SEQ ID NO: 158807 - DNA, 978 bp, Artificial Sequence
  derived and/or modified sequence
atgagcctgctgcggagcctgcgggtgttcctggtggcccggaccggatcttacccagccggctcattgttacgccagtccccccagccccggcatacgttttacgctggtccgagactgtcggctagtgccagctccaaggagctgctcatgaaactgagaagaaaaaccgggtattcatttgtgaactgcaagaaagctttagaaacttgcggtggcgacctgaagcaggcagagatttggcttcataaggaagctcagaaagaggggtggagcaaagcagcaaaactccaaggtagaaagacaaaagaaggtctgatcggtctgctccaagaggggaacacgactgtcctggtggaagttaattgcgaaaccgacttcgtaagcagaaacctgaaattccaactgctggtgcagcaggttgctctgggaacaatgatgcactgccagaccttgaaggatcagccgagcgcgtattctaaaggcttcctgaacagttctgaactcagcgggctccctgctgggcccgaccgggagggctccctgaaagaccagttggctctggccattggtaagctcggcgagaacatgatactcaaaagggccgcatgggtgaaagtcccaagtgggttttatgtcggatcttatgtgcatggcgcgatgcagtccccttcacttcacaagctggttctcggcaagtacggagcactcgtgatatgcgagacttctgagcagaagacaaacctcgaagacgttgggagaagactcgggcagcatgtggtgggaatggctccactcagcgtgggatcactggacgacgagcccgggggcgaggctgaaactaagatgctatctcagccttacctgttagaccctagcatcacccttggtcaatacgtgcagccacaaggtgtgtccgtcgtcgacttcgtcaggtttgagtgtggcgagggggaggaggccgctgagaccgaatag

SEQ ID NO: 158808 - DNA, 858 bp, Artificial Sequence
  derived and/or modified sequence
atggtctactgtaccacaacatgggctatctggaactgccagcttcttttaggttataaaccactgcagaatgtaacgggcctcaataccgttggatcctgcaacactgtggcagaaatatggctgcataaggaggcccagaaagaaggttggtcaaaagcagccaagctgcagggaagaaagactaaagagggacttataggactgttacaggaaggcaacactacagtgctggttgaggtgaattgtgagaccgatttcgttagtcggaacctcaagtttcagctgttggttcagcaggtggcgctcggtactatgatgcactgccagacattgaaggaccagccttcagcctattccaagggattcctgaatagctcagagctgtcgggccttcctgctgggccagacagagaaggaagtctcaaagatcagctagcattggctatcggcaaattaggggagaatatgattctgaaacgcgctgcctgggtgaaagtaccctccgggttctatgtcggatcatacgtccatggtgcaatgcaatccccctctctccacaaactggttttagggaagtacggagctctagtcatttgcgagacatcagaacaaaaaaccaacctggaagatgtcgggcgacgactgggccagcatgtggtaggcatggctcctttgtctgtgggctcgctggacgacgaacccggaggagaagcggagacaaagatgctgagtcagccttacctcctggaccccagcatcacactaggtcagtacgtccagcctcagggcgtctctgtagtggacttcgtaaggtttgaatgtggcgagggggaagaagccgcagagactgaatag

SEQ ID NO: 158809 - DNA, 978 bp, Artificial Sequence
  derived and/or modified sequence
atgtcacttctgcgctcactcagagtatttctggtggctcgcactggctcataccccgctggctccctcctgaggcagagtccacagccaaggcacactttttacgccggacctaggctcagcgcaagcgcatcatcgaaggagctgctcatgaaactgagaaggaaaaccggttactccttcgtcaactgtaagaaagccctcgagacctgcggaggcgacttgaagcaggcggagatttggctgcataaagaagctcaaaaagagggctggagcaaggctgcaaaattacaaggaaggaaaaccaaggagggcttgataggcctcttgcaggagggcaacacaaccgtgcttgtggaagtgaactgcgagactgacttcgtgtcacggaatttaaaattccaactcctagtgcagcaggttgctctggggacaatgatgcattgtcaaacactcaaggatcaaccgtctgcatacagcaagggctttcttaacagctctgaactttctggcctgcccgctgggccagatagggaaggctccctgaaagatcagttagcactggccattggcaaactgggcgagaacatgattctgaagcgtgctgcatgggtcaaagttcctagcggattttacgtggggtcatatgtgcacggagcaatgcagtcaccctcactgcataaactcgtgctcggaaaatatggggctttggtgatctgtgagaccagcgagcaaaagacaaacctggaagatgtaggaagaaggcttggacagcacgtcgtcggaatggcgccacttagcgtgggttcccttgacgatgagcccggaggcgaagccgaaacgaagatgctgtcccaaccctatctcctagatccaagtatcacgctcggtcagtacgtgcagcctcagggtgtttcagtggtcgatttcgtgaggttcgaatgcggagaaggggaggaggccgcagagactgagtag

SEQ ID NO: 158810 - DNA, 1450 bp, Artificial Sequence
  derived and/or modified sequence
gtgtttatcgcggctagagagatgtcgctgctgcggtcgctgcgcgtgtttctggtcgcgcggaccgggagctacccggctgggtctcttctgcgtcagtcgccccagccaaggcacacattttatgctgggccccgtctgtctgcctcggcctccagcaaggagctcctcatgaagctgcggcggaaaacaggctactcctttgtaaattgcaagaaagctctggagacttgtggcggggacctcaaacagacggagtcttgctctgtggcccaggccggcgtgcaatgagttgtgtagtttttgcctgtacggtcatgcgtctcttaataggaagatacattctgagaaatggcgtcgttaggagattttggcttatgcacatcatagagtacctacacaaacctagatggtatattgtactacaacctgggctatatggaattgccagctgctcctaggctacaaaccgttacaaaatgttactggactgaatactgtaggcagttgtaacacagtggcagagatctggctccacaaggaggcccagaaggagggctggagcaaagctgccaagctccaagggaggaagaccaaagaaggcctgattgggctgttgcaggaaggaaacacaactgtattagtagaggtaaactgtgagacagattttgtttctagaaatttaaaatttcaactgttggtccagcaagtagcccttggaaccatgatgcattgtcagaccctaaaggatcaaccctctgcatacagtaaaggtttcttgaattcctctgagctttctggacttccagctgggcctgacagagaaggctcactcaaggatcagttggctttagcaattggaaaactgggagaaaacatgattcttaaacgagctgcatgggtgaaggtgccatctgggttctacgttggctcttatgtccacggagcaatgcagagtccctcacttcacaagctggtgctggggaagtatggggccctggtcatctgtgagacgtctgaacagaaaacaaaccttgaagacgttggccgccgccttgggcagcatgtggtgggcatggcccccctctctgttggctccctggacgatgagcctgggggagaggcagagactaagatgctgtcccagccgtatttgctggatccctccattaccttggggcagtatgtgcagcctcagggggtgtcggtagtagactttgtgcggtttgaatgtggagaaggtgaagaggcagcagaaactgaataggttccagagacttttggcccaggaggaatatttacttttagctctggacatcattacaaaaaggaatatttcccaaacctcttcagaccgagaatgcatgggtaaaattattaaatagttgtataataaaaataattttttccttgtttgcgtaatactggatttagcttttctgtgcctttc

SEQ ID NO: 158811 - DNA, 2159 bp, Artificial Sequence
  derived and/or modified sequence
attttacctggggtgggaggtggggggtaattcccgtatgaaatgtgtcgtctcaagaaatcaagtagaggcgaggactgtgttcctccggccagcaggtggcaccatactcgtttggtgcgttccgctggagaattctggcccttccgccgcgccgtaggtttgttgcctcaccagtgcgcccgccggagggtgtttatcgcggctagagagatgtcgctgctgcggtcgctgcgcgtgtttctggtcgcgcggaccgggagctacccggctgggtctcttctgcgtcagtcgccccagccaaggcacacattttatgctgggccccgtctgtctgcctcggcctccagcaaggagctcctcatgaagctgcggcggaaaacaggctactcctttgtaaattgcaagaaagctctggagacttgtggcggggacctcaaacaggcagagatctggctccacaaggaggcccagaaggagggctggagcaaagctgccaagctccaagggaggaagaccaaagaaggcctgattgggctgttgcaggaaggaaacacaactgtattagtagaggtaaactgtgagacagattttgtttctagaaatttaaaatttcaactgttggtccagcaagtagcccttggaaccatgatgcattgtcagaccctaaaggatcaaccctctgcatacagtaaaggtttcttgaattcctctgagctttctggacttccagctgggcctgacagagaaggctcactcaaggatcagttggctttagcaattggaaaactgggagaaaacatgattcttaaacgagctgcatgggtgaaggtgccatctgggttctacgttggctcttatgtccacggagcaatgcagagtccctcacttcacaagctggtgctggggaagtatggggccctggtcatctgtgagacgtctgaacagaaaacaaaccttgaagacgttggccgccgccttgggcagcatgtggtgggcatggcccccctctctgttggctccctggacgatgagcctgggggagaggcagagactaagatgctgtcccagccgtatttgctggatccctccattaccttggggcagtatgtgcagcctcagggggtgtcggtagtagactttgtgcggtttgaatgtggagaaggtgaagaggcagcagaaactgaataggttccagagacttttggcccaggaggaatatttacttttagctctggacatcattacaaaaaggaatatttcccaaacctcttcagaccgagaatgcatgggtaaaattattaaatagttgtataataaaaataattttttccttgtttgcgtaatactggatttagcttttctgtgcctttcaaaaacaacaggtgggccttattgacgtgatagtgtcgtggagaacaggcatcaacaatactgctgctcccttcaacatagatttattatggtatttctgaaatttctaacttatatgttctgtcttacaccttttatgacatagaactcttttgttctgtttttgctttgcgacactgtgaaccgtgcttctgcctcggaacctccctagttatattacttgtgccacatggatttctttaggattattgattcaaacctagagttgtctggaaaatgtgggttctcttctttgtgattgtctgtagtatgctttgaaggtgctctgcagtggtagacacactggttctggcctcatttaatgaaattaataacacatgcccctatttctcttttggatgatgtgtgggtgggtgggtactgaggtttcctggccagctgtaaggcagattttgacattcttgtgccagaaacagaaattagagtagtccagttacccagagagctcacttaacattgcctctttacttccccagtactgaaacatttcttcaagtataacataaaattaccgtaacaagcagacccagaatactgaaaataactccatttgttcattataggtatctttatttgaaaagtgaaaaatgctttgacacattacagatctgggtatttggattttgcctatggagtgcatatatgatttcaatgatttacaggctaaatagattttagaaataatcatcttaaaattgaaaacaaaggtaggtcctggtataata

SEQ ID NO: 158812 - DNA, 1951 bp, Artificial Sequence
  derived and/or modified sequence
gtaggtttgttgcctcaccagtgcgcccgccggagggtgtttatcgcggctagagagatgtcgctgctgcggtcgctgcgcgtgtttctggtcgcgcggaccgggagctacccggctgggtctcttctgcgtcagtcgccccagccaaggcacacattttatgctgggccccgtctgtctgcctcggcctccagcaaggagctcctcatgaagctgcggcggaaaacaggctactcctttgtaaattgcaagaaagctctggagacttgtggcggggacctcaaacaggcagagatctggctccacaaggaggcccagaaggagggctggagcaaagctgccaagctccaagggaggaagaccaaagaaggcctgattgggctgttgcaggaaggaaacacaactgtattagtagaggtaaactgtgagacagattttgtttctagaaatttaaaatttcaactgttggtccagcaagtagcccttggaaccatgatgcattgtcagaccctaaaggatcaaccctctgcatacagtaaagaaaactgggagaaaacatgattcttaaacgagctgcatgggtgaaggtgccatctgggttctacgttggctcttatgtccacggagcaatgcagagtccctcacttcacaagctggtgctggggaagtatggggccctggtcatctgtgagacgtctgaacagaaaacaaaccttgaagacgttggccgccgccttgggcagcatgtggtgggcatggcccccctctctgttggctccctggacgatgagcctgggggagaggcagagactaagatgctgtcccagccgtatttgctggatccctccattaccttggggcagtatgtgcagcctcagggggtgtcggtagtagactttgtgcggtttgaatgtggagaaggtgaagaggcagcagaaactgaataggttccagagacttttggcccaggaggaatatttacttttagctctggacatcattacaaaaaggaatatttcccaaacctcttcagaccgagaatgcatgggtaaaattattaaatagttgtataataaaaataattttttccttgtttgcgtaatactggatttagcttttctgtgcctttcaaaaacaacaggtgggccttattgacgtgatagtgtcgtggagaacaggcatcaacaatactgctgctcccttcaacatagatttattatggtatttctgaaatttctaacttatatgttctgtcttacaccttttatgacatagaactcttttgttctgtttttgctttgcgacactgtgaaccgtgcttctgcctcggaacctccctagttatattacttgtgccacatggatttctttaggattattgattcaaacctagagttgtctggaaaatgtgggttctcttctttgtgattgtctgtagtatgctttgaaggtgctctgcagtggtagacacactggttctggcctcatttaatgaaattaataacacatgcccctatttctcttttggatgatgtgtgggtgggtgggtactgaggtttcctggccagctgtaaggcagattttgacattcttgtgccagaaacagaaattagagtagtccagttacccagagagctcacttaacattgcctctttacttccccagtactgaaacatttcttcaagtataacataaaattaccgtaacaagcagacccagaatactgaaaataactccatttgttcattataggtatctttatttgaaaagtgaaaaatgctttgacacattacagatctgggtatttggattttgcctatggagtgcatatatgatttcaatgatttacaggctaaatagattttagaaataatcatcttaaaattgaaaacaaaggtaggtcctggtataatattaaacataaagttattaaacattttaagcattgtt

SEQ ID NO: 158813 - protein, 207 aa, Artificial Sequence
  derived and/or modified sequence
MLALRCGSRWLGLLSVPRSVPLRLPAARACSKGSGDPSSSSSSGNPLVYLDVDANGKPLGRVVLELKADVVPKTAENFRALCTGEKGFGYKGSTFHRVIPSFMCQAGDFTNHNGTGGKSIYGSRFPDENFTLKHVGPGVLSMANAGPNTNGSQFFICTIKTDWLDGKHVVFGHVKEGMDVVKKIESFGSKSGRTSKKIVITDCGQLS

SEQ ID NO: 158814 - protein, 155 aa, Artificial Sequence
  derived and/or modified sequence
MLALRCGSRWLGLLSVPRSVPLRLPAARACSKGSGDPSSSSSSGNPLVYLDVDANGKPLGRVVLELKADVVPKTAENFRALCTGEKGFGYKGSTFHRVIPSFMCQAGDFTNHNGTGGKSIYGSRFPDENFTLKHVGPGWMASMLCSVTSKRAWTS

SEQ ID NO: 158815 - DNA, 624 bp, Artificial Sequence
  derived and/or modified sequence
atgctggccctgagatgcggcagcagatggctgggcctgctgagcgtgcccagaagcgtgcccctgagactgcccgccgccagagcctgcagcaagggcagcggcgaccccagcagcagcagcagcagcggcaaccccctggtgtacctggacgtggacgccaacggcaagcccctgggcagagtggtgctggagctgaaggccgacgtggtgcccaagaccgccgagaacttcagagccctgtgcaccggcgagaagggcttcggctacaagggcagcaccttccacagagtgatccccagcttcatgtgccaggccggcgacttcaccaaccacaacggcaccggcggcaagagcatctacggcagcagattccccgacgagaacttcaccctgaagcacgtgggccccggcgtgctgagcatggccaacgccggccccaacaccaacggcagccagttcttcatctgcaccatcaagaccgactggctggacggcaagcacgtggtgttcggccacgtgaaggagggcatggacgtggtgaagaagatcgagagcttcggcagcaagagcggcagaaccagcaagaagatcgtgatcaccgactgcggccagctgagctag

SEQ ID NO: 158816 - DNA, 624 bp, Artificial Sequence
  derived and/or modified sequence
atgttggcccttcggtgtggttcacgctggttgggactgctctctgttcccaggagcgtgcccctgagactccccgccgcaagagcttgtagcaagggcagtggtgacccaagcagtagctccagcagtgggaacccacttgtttatttggatgtagatgctaacggaaaaccactcggtagagtagtccttgagttaaaggctgacgtggttccaaagaccgctgaaaactttagagctctgtgcacaggggagaaagggtttggctacaagggcagtacgtttcatagagtcatcccctcgttcatgtgccaagccggagacttcactaatcataacggaacaggaggaaagagtatttatggatcacgttttccagacgagaatttcactctgaagcacgtcgggcccggagtgctgtccatggccaatgcgggccctaatacaaatggaagtcagtttttcatttgcaccataaaaactgattggctcgacggtaaacacgttgtctttggacacgttaaggagggcatggatgttgtaaaaaagatcgagtcctttggatccaagagtggcagaacctctaaaaagatcgttattaccgactgtggtcaattatcatag

SEQ ID NO: 158817 - DNA, 624 bp, Artificial Sequence
  derived and/or modified sequence
atgctggccctgcgctgtggcagccgctggctgggcctgctgtctgtgcccaggtctgtgcccctgcggctgcctgctgcccgggcctgcagcaagggcagcggggaccccagcagcagcagcagcagcggcaaccccctggtgtacctggatgtggatgccaacgggaagcccctgggccgggtggtgctggagctgaaggcagatgtggtgcccaagacagctgagaacttccgggccctgtgcacaggagagaagggcttcggctacaagggcagcaccttccacagggtcatccccagcttcatgtgccaggccggggacttcaccaaccacaatggaactggaggcaagagcatctacggcagccgcttcccagatgagaacttcaccctgaagcacgtgggccctggggtgctgtccatggccaatgccggccccaacaccaacggcagccagttcttcatctgcaccatcaagacagactggctggatggcaagcacgtggtgtttggacatgtgaaggagggcatggatgtggtgaagaagattgagagctttggcagcaagagcggccgcaccagcaagaagatcgtcatcacagactgtggccagctgtcctag

SEQ ID NO: 158818 - DNA, 624 bp, Artificial Sequence
  derived and/or modified sequence
atgctggccctgcggtgcggcagccggtggctgggcctgctgagcgtgccacggtccgtgcccctgaggctacccgctgctcgggcctgttctaaaggctcaggcgacccctcctcctcatcttcatcgggaaaccccctcgtttatctcgacgtggacgctaatgggaagcctctcggtcgggtggtgttggagctgaaagcagacgtggttcccaaaacagcagagaatttccgggcgctttgtacaggagaaaagggttttggctataagggaagcacattccacagagtgataccaagctttatgtgtcaggccggcgattttactaaccataatgggacagggggcaaaagtatctacggatctagatttcctgatgaaaatttcacactcaagcacgtcggtccaggagttctttccatggcaaatgccggccccaacacaaacgggtcccaatttttcatctgtactataaaaacagattggcttgatggaaaacatgttgtctttggacatgtgaaagagggcatggatgttgtgaaaaagattgagtcctttggcagcaagtctggtagaacttccaaaaaaatagtaattacagattgcggacagctgtcttag

SEQ ID NO: 158819 - DNA, 624 bp, Artificial Sequence
  derived and/or modified sequence
atgttagcgctgcggtgcgggtcgcgatggctgggacttctgtccgtcccccgaagcgtgccactcagattgcctgctgctagggcctgctctaagggtagcggggacccttccagctcctcatcctccgggaatccactcgtgtacttggatgtggacgctaacgggaagccactggggagagtggtgctggaactgaaagcagatgttgtgcccaagacagcggaaaattttagagctctgtgtacgggtgagaagggatttggatacaaaggttccaccttccaccgtgtaattccttcctttatgtgtcaggcaggtgattttacaaatcataacgggaccggcggtaaatctatttatggcagtcggtttccagatgaaaacttcacacttaaacacgtcgggccaggcgtactgtctatggccaacgctgggccaaataccaacggcagtcagttctttatctgcacaattaaaaccgactggttggacggtaagcatgtggtctttgggcatgttaaagagggaatggatgtcgtgaaaaaaattgaatctttcggatcaaaatcaggcaggaccagcaaaaagatcgtcattaccgattgtggccagttaagttag

SEQ ID NO: 158820 - DNA, 2190 bp, Artificial Sequence
  derived and/or modified sequence
tctgggcgcgcgcgacgtcagtttgagttctgtgttctccccgcccgtgtcccgcccgacccgcgcccgcgatgctggcgctgcgctgcggctcccgctggctcggcctgctctccgtcccgcgctccgtgccgctgcgcctccccgcggcccgcgcctgcagcaagggctccggcgacccgtcctcttcctcctcctccgggaacccgctcgtgtacctggacgtggacgccaacgggaagccgctcggccgcgtggtgctggagctgaaggcagatgtcgtcccaaagacagctgagaacttcagagccctgtgcactggtgagaagggcttcggctacaaaggctccaccttccacagggtgatcccttccttcatgtgccaggcgggcgacttcaccaaccacaatggcacaggcgggaagtccatctacggaagccgctttcctgacgagaactttacactgaagcacgtggggccaggtgtcctgtccatggctaatgctggtcctaacaccaacggctcccagttcttcatctgcaccataaagacagactggttggatggcaagcatgttgtgttcggtcacgtcaaagagggcatggacgtcgtgaagaaaatagaatctttcggctctaagagtgggaggacatccaagaagattgtcatcacagactgtggccagttgagctaatctgtggccagggtgctggcatggtggcagctgcaaatgtccatgcacccaggtggccgcgttgggctgtcagccaaggtgcctgaaacgatacgtgtgcccactccactgtcacagtgtgcctgaggaaggctgctagggatgttagacctcggccaggacccaccacattgcttcctaatacccacccttcctcacgacctcatttctgggcatctttgtggacatgatgtcacccaccccttgtcaagcattgcctgtgattgcccagcccagattcatctgtgccttggacatggtgatggtgatgggttgccatccaagtgaaagtcttttccttgaccaagggggacagtcagttttgcaaaaggactctaatacctgtttaatattgtcttcctaattgggataatttaattaacaagattgactagaagtgaaactgcaacactaacttccccgtgctgtggtgtgacctgagttggtgacacaggccacagaccccagagcttggcttttgaaacacaactcagggcttttgtgaaggttcccccgctgagatctttcctcctggttactgtgaagcctgttggtttgctgctgtcgtttttgaggagggcccatgggggtaggagcagttgaacctgggaacaaacctcacttgagctgtgcctagacaatgtgaattcctgtgttgctaacagaagtggcctgtaagctcctgtgctccggagggaagcatttcctggtaggctttgatttttctgtgtgttaaagaaattcaatctactcatgatgtgttatgcataaaacatttctggaacatggatttgtgttcaccttaaatgtgaaaataaatcctattttctatggaagactggtacctggtttctggaagaggggtctgtgacttggagctgatctttactgagctcgccgtggcagatgccatgctcaggacgttcatgtggatggtttcatgtcatcgtgctggcaacttgtcctccctgccttagagatgaggctcagacaaacgaccttagcacccatagcctatgccatgagcactggctccaccctgaatcccagctcctccccttagtgaccccaagtctgtttccctcagctgcataaggaggcgatatagtttgaatatttgtccccagccaaatctcatgttgaactgtaatccccagtgctggaggtggggcctgctacgaggtgtttggatcatggggacgggtatttcatggcttggtgctgttttcttgatggtgaattattgcaagatacggtcatttaaaattgtgtggcacctccccctgcccccttcttgctcctgctttcaccatgtgacatgcctgatcccccttcaccttttgccatggtcataagcttcctgaggcctccctggaagctgagcagatgccagcaccatgcttcctgtacatcctgcagaaccataagccaattaaacctttttaataataaatta

SEQ ID NO: 158821 - DNA, 1258 bp, Artificial Sequence
  derived and/or modified sequence
tcggccttctgggcgcgcgcgacgtcagtttgagttctgtgttctccccgcccgtgtcccgcccgacccgcgcccgcgatgctggcgctgcgctgcggctcccgctggctcggcctgctctccgtcccgcgctccgtgccgctgcgcctccccgcggcccgcgcctgcagcaagggctccggcgacccgtcctcttcctcctcctccgggaacccgctcgtgtacctggacgtggacgccaacgggaagccgctcggccgcgtggtgctggagctgaaggcagatgtcgtcccaaagacagctgagaacttcagagccctgtgcactggtgagaagggcttcggctacaaaggctccaccttccacagggtgatcccttccttcatgtgccaggcgggcgacttcaccaaccacaatggcacaggcgggaagtccatctacggaagccgctttcctgacgagaactttacactgaagcacgtggggccaggttggatggcaagcatgttgtgttcggtcacgtcaaagagggcatggacgtcgtgaagaaaatagaatctttcggctctaagagtgggaggacatccaagaagattgtcatcacagactgtggccagttgagctaatctgtggccagggtgctggcatggtggcagctgcaaatgtccatgcacccaggtggccgcgttgggctgtcagccaaggtgcctgaaacgatacgtgtgcccactccactgtcacagtgtgcctgaggaaggctgctagggatgttagacctcggccaggacccaccacattgcttcctaatacccacccttcctcacgacctcatttctgggcatctttgtggacatgatgtcacccaccccttgtcaagcattgcctgtgattgcccagcccagattcatctgtgccttggacatggtgatggtgatgggttgccatccaagtgaaagtcttttccttgaccaagggggacagtcagttttgcaaaaggactctaatacctgtttaatattgtcttcctaattgggataatttaattaacaagattgactagaagtgaaactgcaacactaacttccccgtgctgtggtgtgacctgagttggtgacacaggccacagaccccagagcttggcttttgaaacacaactcagggcttttgtgaaggttcccccgctgagatctttcctcctggttactgtgaagcctgttggtttgctgctgtcgtttttgaggagggcccatgggggtag

SEQ ID NO: 158822 - protein, 271 aa, Artificial Sequence
  derived and/or modified sequence
MEHGSIITQARREDALVLTKQGLVSKSSPKKPRGRNIFKALFCCFRAQHVGQSSSSTELAAYKEEANTIAKSDLLQCLQYQFYQIPGTCLLPEVTEEDQGRICVVIDLDETLVHSSFKPINNADFIVPIEIEGTTHQVYVLKRPYVDEFLRRMGELFECVLFTASLAKYADPVTDLLDRCGVFRARLFRESCVFHQGCYVKDLSRLGRDLRKTLILDNSPASYIFHPENAVPVQSWFDDMADTELLNLIPIFEELSGAEDVYTSLGQLRAP

SEQ ID NO: 158823 - DNA, 816 bp, Artificial Sequence
  derived and/or modified sequence
atggagcacggttccattatcacacaggcacggagggaggatgcactggttcttacaaagcaagggctagtgtcaaaatcttccccaaaaaagcctcggggaaggaatattttcaaggcactgttttgttgttttagagcacagcatgtgggacagtcatcatcctctacagagctggcagcatataaggaggaagccaatacgatagcaaaaagtgacttacttcaatgcctgcagtatcagttttaccagataccgggcacgtgcttactcccggaagtcaccgaggaagatcagggccggatttgcgtggtcatagatcttgatgagaccctcgtgcattcttcatttaagcccattaataacgccgatttcatcgtccccattgagatcgaaggcacaacccatcaggtttacgtgctgaagaggccatatgttgatgagttccttcgccgaatgggcgagctgtttgagtgtgtattgtttacagcctccctggctaagtacgccgaccccgtcaccgatcttttggatcggtgcggggttttccgggcccgtttgtttcgggaatcatgcgtgtttcaccagggctgttacgttaaggatttatcacggctcggaagggacctgcgtaagacactaattctagataacagtcccgcgagctacatcttccaccctgagaatgccgtgccagtacagagctggttcgacgacatggctgatacagaactactcaatctcattcctatattcgaggagctctctggagcagaggatgtgtacacctcccttgggcaactccgcgctccttag

SEQ ID NO: 158824 - DNA, 816 bp, Artificial Sequence
  derived and/or modified sequence
atggagcacggcagcatcatcacccaggccaggagagaagatgccctggtgctgaccaagcagggcctggtgtccaagagcagccccaagaagccccggggcaggaacatcttcaaggccctcttctgctgcttccgggcccagcacgtgggccagagcagcagcagcacagagctggccgcctacaaggaggaggccaacaccatcgccaagagtgacctgctgcagtgcctgcagtaccagttctaccagatccctggcacctgcctgctgcctgaggtgacagaggaggaccagggccgcatctgtgtggtgattgacctggatgagaccctggtgcacagcagcttcaagcccatcaacaatgctgacttcatcgtgcccattgaaattgagggcaccacccaccaggtgtatgtgctgaagaggccctacgtggatgagttcctgcggaggatgggagagctgtttgaatgtgtgctcttcaccgccagcctggccaagtatgctgaccctgtgacagacctgctggacagatgtggggtcttccgggcccggctcttccgggagagctgtgtgttccaccagggctgctacgtgaaggacctgagccggctgggccgggacctgaggaagaccctcatcctggacaacagccctgccagctacatcttccacccagaaaatgctgtgcctgtgcagagctggtttgatgacatggctgacacagagctgctgaacctgatccccatctttgaggagctgagcggggctgaagatgtgtacaccagcctgggccagctgcgggccccctag

SEQ ID NO: 158825 - DNA, 816 bp, Artificial Sequence
  derived and/or modified sequence
atggagcacggcagcatcatcacccaggcccggcgggaggacgccctggtgttgaccaagcaggggcttgtctcaaagagttcccccaagaagccccgaggacgcaacattttcaaggctctgttctgctgctttcgggcacaacacgtcgggcaatctagctcttccacagagctagccgcatacaaggaagaagctaatacaattgccaaaagtgacctcctgcagtgcctccagtaccagttctatcagataccaggcacttgtcttctccccgaagtgaccgaggaagaccagggtaggatttgtgtcgttatcgatctggacgagacactggttcacagctccttcaagcctatcaataacgccgatttcatcgttccgattgaaattgagggtactacccatcaggtttatgtcttgaaaaggccctacgttgacgaatttcttcgccgaatgggagaattatttgagtgcgtcctgttcactgcctcattagccaagtacgcagatcccgtgactgacctgctcgaccgttgtggggtgtttagggccaggttatttagggagtcttgcgtgtttcatcaagggtgctacgtgaaggatttgagcaggctgggccgggatcttcgcaaaacactgattctggacaacagcccggcttcgtatattttccatcctgaaaacgccgtgcccgtccagagctggttcgatgacatggccgacacagaactgttgaatctcatccccatcttcgaagaactatctggagctgaggacgtgtacacatctctgggccagcttcgcgcaccatag

SEQ ID NO: 158826 - DNA, 816 bp, Artificial Sequence
  derived and/or modified sequence
atggagcatgggtctatcattacacaagctcgccgagaagacgctcttgtcctcacgaaacagggactggtgtctaaaagcagtcccaagaagccaaggggcagaaacatattcaaagcactgttctgttgcttccgagctcagcatgtcggccaaagttctagctctaccgagttagcagcgtacaaagaggaggccaataccatcgccaagagcgacctgttacagtgcctgcagtaccagttttatcagattcccggaacttgtctgctgcctgaggtcaccgaagaggaccagggaagaatctgtgtcgtgattgacctggatgagactcttgtccactcatcttttaagcctattaataacgccgatttcattgtgcctatcgagatcgaggggacaactcaccaggtatatgtcctgaagcgcccatacgtggatgagttcttgcgcagaatgggtgagctcttcgagtgtgtcttattcaccgccagtttggccaaatacgcagaccccgtgacggacctgctcgataggtgtggtgtgttccgggcacggttgtttagggagtcatgcgtctttcaccaaggctgctacgtcaaggatctctcaaggctgggacgggatttgagaaagacacttatcttagataatagccccgcatcatatattttccacccggagaacgcagtgcccgttcagagctggtttgatgacatggcagatacagagttgctgaacctcattcccatcttcgaggagttgagcggtgccgaggacgtctataccagcttgggacagttacgggctccttag

SEQ ID NO: 158827 - DNA, 4795 bp, Artificial Sequence
  derived and/or modified sequence
ccatttcctcctcttgttttcgctccggattctccatgttggacccaaactgaggagcccggagctgccgctgggggatcggggccgggggcacccgggggagccgctgcccgggccgcccgccctttgtacaggccgcctcccttcccggtccggggaggaaacgagaggggggatgtgaacagctgtggaagtcggagtctcgggagccggagcgggcccccgcccaggccccccagcccagcccagcccgcgcgcccgcccgtcctcccgcccagccagcccgggcccgcgggattgttagatggaacacggctccatcatcacccaggcgcggagggaagacgccctggtgctcaccaagcaaggcctggtctccaagtcctctcctaagaagcctcgtggacgtaacatcttcaaggcccttttctgctgttttcgcgcccagcatgttggccagtcaagttcctccactgagctcgctgcgtataaggaggaagcaaacaccattgctaagtcggatctgctccagtgtctccagtaccagttctaccagatcccagggacctgcctgctcccagaggtgacagaggaagatcaaggaaggatctgtgtggtcattgacctcgatgaaacccttgtgcatagctcctttaagccaatcaacaatgctgacttcatagtgcctatagagattgaggggaccactcaccaggtgtatgtgctcaagaggccttatgtggatgagttcctgagacgcatgggggaactctttgaatgtgttctcttcactgccagcctggccaagtatgccgaccctgtgacagacctgctggaccggtgtggggtgttccgggcccgcctattccgtgagtcttgcgtgttccaccagggctgctacgtcaaggacctcagccgcctggggagggacctgagaaagaccctcatcctggacaactcgcctgcttcttacatattccaccccgagaatgcagtgcctgtgcagtcctggtttgatgacatggcagacactgagttgctgaacctgatcccaatctttgaggagctgagcggagcagaggacgtctacaccagccttgggcagctgcgggccccttagcctgccctgcttccaagcgacggccatcccagtaggggactttcccacactgtgcctttacgatcagcgtgacagagtagaagctggagtgcctcaccacacggcccggaaacagcgggaagtaactggaaagagctttaggacagcttagatgccgagtgggcgaatgccagaccaatgatacccagagctacctgccgccaacttgttgagatgtgtgtttgactgtgagagagtgtgtgtttgtgtgtgtgttttgccatgaactgtggccccagtgtatagtgtttcagtgggggagaagctgaaagaccaagactcttcccaagttagcttgtctcctctcctgtcaccctaagagccactgagttgtgtagggatgaagactattgaagactccattgccaaaccatggcctttcctcagtgttgtaaggcctatgccaaggataaaggaagggtatgcctttgggtactccaggcacacacctttctgaaatccttctccagccagctgctgcagacaaaagatcacatttctgggaagatgagaacttgtttccagaccagcatccagtggccatcaggtcttgtggcccaaaggctatgcttgcctccggctgagtgcctgggataggccttttctatgtctccccaaggctggggtgctgagcctgccttcctcaccacctagccatagtctcaaacctgtggggaaggaggttttctccctgcccgggaagaggacagataactgatttccgttcttttgactgtgttttaaaattctctttctaaacacagagtgttgggcctggtttgtttctgacaaagttacagtcctgggcctgtaatgaatgtcggcggcgctggggttgcagggaaaagacaaatcctcaaagcgtggacgtgtgtccccatggcttgtggatcagctaagctcgggatcatttccataagtctgcttttcagggattctctgctggtgctggtgcaaggacttctgttccaaaggctgggaaaaactaagctgtcccagcccctcccatttcttgggcagggctcttttcctgttgtgtcttcccccagggcctgtcctgtaccgagctctgtctgttccagccttcatccttcctggctgttgcttttcctcttaagggcctcagaactcttgctcttcctgggctgagggggaatgagtgttcttgccatttgccagcctaatgcgcatgctttctgcctctggtaacaggagtgagtgagcccctcagacctgcactctgggtgtctcctgctttcaaaggttcttaatagtgaatgctttaaaattaaagtcatcacgaaatggaagttttcccagggtggaaaataagaggaagtgctgctgtaattgggagcacaaggggcctcccaaaaaggagccccacctcagcatcactgccttaatcgtggcctccctggggtgggtggggttctctcctccctccctccctcctcctggggtgggagggcgctcctgttcccatctctgtgttccctggaggcaggtatcacaaagcatttgtgaattgctttaggtgcagggacaccacccactcaggactcttccccatcatcccttccattgccacaccctagatccagcctcaggaactaacaagttttgagaaaagcaggtagtagagcagcagcttcgtgctctcagcggtggctggctggcatttttctctagcgttgtggtgccaccttcccttcttgtcccaaggttataaggccttgtctttctctttggaatcataaagtggaacagagtccccagaactcatgtggccatttccgccagcatcactccccggtgcctatggggtcccggtgtacctaaagggagaaggaccccatgtgctagccagaaatatactgtctcttgaaggaaagcaggagctcagactcttagagccagctgtggcttcggacccaaggcctgacctaggctgctatcctaatattgcaggaggggcctctcttccaagccccaccctaagggttagcccttggccaaatcttttgccgtctaggcccagccaggcttttctgactaaataagcaataagaggctctaagctgactgagttgcaaggaccctttccgccctcccttggatctccatgtttttccagatggcggaagagcatgtgccaccccctttcctaacagacttgtccaagtgcttggcgtgggacccatgaccaaagcccaggatggcttggtgggagtgtccctgctgcatctgcatgaagcccctgctttttaggcctcactcccatcagaaccctgcctgcccacctgcaactcccccccaacaatgccattcccacttgccccagagaagctactcggccaaacctagccagggtctgttcttgtggaccagagccagcctagtcattatttgctgtcgggtttccagtttcaccgtgtgttagggtgagggatgattgtaaaatttgctcctcaaaggaatcaggccagactcaattttggagggcaagacagggaggaggccgcttcatcccagactctcttctagggcttcccaccatcagcccctcccacttgagactggtctttgggaggcaataggccaccatgcctggtcagcaccaattcaagccatgccaggaatctgcctacctgccaggttcagttcttttaaggtgcctcttcagggacacagtgtgtctctctgattgggcttctaaatcaaaagcctgatgttcgtgtccctctcatagggggagctttggacacaggaccagtttggaaaagggtcaggtaagggtttccactctgcacattgtagagggaacactctgtaggcccatgggtcccttactagagaggttgagtgaatttgccttcagttaacatgggaccttctgtttagcttcctcttgcttcccaaagattttaagcattttgtaaatgtataaactcacctctggtaacagtggcccagacgctgctttgtgctaaaagcatgggaaatgtaaaggcagtctttctctgggaaatggatgctattctattctgctgcccctacctgttcctgaggcctcatttagaaagaaaatcccctcagaaggctgtctggcacccagtgtcctagccaggccaagtatatgagaaaggtaagtccattttccccttcaggtcctcagtggattacttaaccactgctgtccctcggtccctttttcctaaacgggtttagttctgtcttttttctccttttttctaaatgctggtaaatatttacattcagccagggaagaggaggccagaggtcgggccagctgccccattcttttaacgttgtagggcctgcccatggagcggaccctcctctttgggcctcgtgagcttttttgcttatcatgttccatttcgtgccgctttcccccttcaagatgccatttggagggtaggggatctgcttcccactgtgactgggctatgggattctgactaccttgcttacagattcatggtttgataaatttgttgtattcaaaaacttgaaatgcaggacgccattaagtgtctgtttatatttttggaatatttgtattacttacaattaattaataaaagtgggtttaaaaaacctttccaggaa

SEQ ID NO: 158828 - DNA, 816 bp, Artificial Sequence
  derived and/or modified sequence
atggagcacggcagcatcatcacccaggccagaagagaggacgccctggtgctgaccaagcagggcctggtgagcaagagcagccccaagaagcccagaggcagaaacatcttcaaggccctgttctgctgcttcagagcccagcacgtgggccagagcagcagcagcaccgagctggccgcctacaaggaggaggccaacaccatcgccaagagcgacctgctgcagtgcctgcagtaccagttctaccagatccccggcacctgcctgctgcccgaggtgaccgaggaggaccagggcagaatctgcgtggtgatcgacctggacgagaccctggtgcacagcagcttcaagcccatcaacaacgccgacttcatcgtgcccatcgagatcgagggcaccacccaccaggtgtacgtgctgaagagaccctacgtggacgagttcctgagaagaatgggcgagctgttcgagtgcgtgctgttcaccgccagcctggccaagtacgccgaccccgtgaccgacctgctggacagatgcggcgtgttcagagccagactgttcagagagagctgcgtgttccaccagggctgctacgtgaaggacctgagcagactgggcagagacctgagaaagaccctgatcctggacaacagccccgccagctacatcttccaccccgagaacgccgtgcccgtgcagagctggttcgacgacatggccgacaccgagctgctgaacctgatccccatcttcgaggagctgagcggcgccgaggacgtgtacaccagcctgggccagctgagagccccctag

SEQ ID NO: 158829 - protein, 300 aa, Artificial Sequence
  derived and/or modified sequence
MILLEVNNRIIEETLALKFENAAAGNKPEAVEVTFADFDGVLYHISNPNGDKTKVMVSISLKFYKELQAHGADELLKRVYGSFLVNPESGYNVSLLYDLENLPASKDSIVHQAGMLKRNCFASVFEKYFQFQEEGKEGENRAVIHYRDDETMYVESKKDRVTVVFSTVFKDDDDVVIGKVFMQEFKEGRRASHTAPQVLFSHREPPLELKDTDAAVGDNIGYITFVLFPRHTNASARDNTINLIHTFRDYLHYHIKCSKAYIHTRMRAKTSDFLKVLNRARPDAEKKEMKTITGKTFSSR

SEQ ID NO: 158830 - protein, 90 aa, Artificial Sequence
  derived and/or modified sequence
MILLEVNNRIIEETLALKFENAAAGNKPEAVEVTFADFDGVLYHISNPNGDKTKVMVSISLKFYKELQAHGADELLKRVYGSFLVNPESG

SEQ ID NO: 158831 - DNA, 903 bp, Artificial Sequence
  derived and/or modified sequence
atgatattactcgaagtgaacaacagaatcatcgaggagactctcgcactgaagttcgagaatgccgccgcgggaaataaaccagaggctgtggaagtcaccttcgccgactttgacggggtgttgtatcatatctcgaatcctaacggggacaagactaaggtgatggtgtctattagccttaagttctacaaagaactccaggcccacggggccgatgagttattgaagcgggtctatggaagttttctagtgaaccctgagagtgggtataatgtcagtttgctctatgatttggagaatctcccagcaagcaaggactccatcgtgcaccaggccggcatgcttaaaagaaattgcttcgcctccgtgttcgaaaagtactttcagttccaggaggagggcaaagaaggagaaaaccgcgccgttattcactatagagatgacgaaaccatgtatgtcgagagcaagaaggatagggtgacagtggtgttttcaactgtcttcaaagacgatgatgacgtcgttattggcaaggtctttatgcaggagtttaaagagggcagaagggcctcccatacggctccccaagtcctgttctcccatcgcgagccacctctggagcttaaagataccgacgctgctgtaggagataatatcggctatattacatttgtgctctttccgcggcacacaaatgcctcagcgcgcgataacacaataaacctcattcacactttccgggactatctgcattatcacattaagtgttccaaggcctacatccatacacgtatgcgcgcaaagacatctgactttctcaaggttttaaacagggcaagaccagatgccgagaaaaaggaaatgaaaacaatcaccggcaagaccttctccagccgttag

SEQ ID NO: 158832 - DNA, 903 bp, Artificial Sequence
  derived and/or modified sequence
atgatactcttggaagtaaacaatcgaattatcgaggagacactggcgctaaaattcgaaaacgccgccgctgggaataagcccgaagcagtggaggtcacattcgcggattttgatggagttctttaccatatcagtaaccctaatggagataagacgaaagtaatggtgagcatttcgttgaagttttataaagagctgcaggcgcacggcgccgacgagctgttaaaaagagtgtatggctctttcttggtgaaccctgagagcggctataatgtctccctgctgtacgatctagagaatctgcccgcatcaaaagatagcatcgtgcaccaggcgggcatgcttaagagaaattgtttcgcgtctgtgttcgaaaagtatttccagtttcaagaggaaggcaaagaaggcgagaaccgggcagttattcactatagggatgatgagacgatgtacgttgaatccaagaaggatcgcgtgaccgtggtttttagcactgtgtttaaagacgatgatgatgtggtgatcggcaaagtcttcatgcaggaatttaaggagggaaggagagcatcccacacagccccccaggtgctgttctctcaccgggagcctcccttagagctgaaggataccgacgccgcagtgggagataacatcggctacattacctttgtgctgttcccgagacataccaacgctagcgcccgggacaatactatcaacttaattcataccttcagggactacctccattatcatatcaaatgcagtaaggcttatattcacacccgaatgagggctaaaacgtccgactttctcaaggtcctgaatagggcccggccagatgccgaaaaaaaagagatgaagactatcactggcaagaccttctccagtagatag

SEQ ID NO: 158833 - DNA, 273 bp, Artificial Sequence
  derived and/or modified sequence
atgatcttactagaagtgaacaatcgtattatcgaggagacattggcgctcaagtttgaaaacgccgccgcaggaaataagcctgaggccgtcgaagtgacatttgccgacttcgacggcgtgctgtatcacatcagtaacccaaatggtgacaaaactaaagtcatggtgagcatttcccttaagttctacaaagagctccaggcacatggggcagacgagctgctgaagcgcgtttatggctcattcctggtgaacccggagtccggatag

SEQ ID NO: 158834 - DNA, 903 bp, Artificial Sequence
  derived and/or modified sequence
atgatcctgctggaggtgaacaaccgcatcatcgaggagaccctggccctgaagtttgaaaatgctgctgctggcaacaagccagaggccgtggaggtgacctttgctgactttgatggagtgctgtaccacatcagcaaccccaatggagacaagaccaaggtgatggtgtccatcagcctgaagttctacaaggagctgcaggcccacggggctgatgagctgctgaagagggtgtatggcagcttcctggtgaaccctgagagcggctacaacgtgtccctgctgtatgacctggagaacctgcctgccagcaaggacagcatcgtgcaccaggccggcatgctgaagaggaactgctttgcctctgtgtttgagaagtacttccagttccaggaggagggcaaggagggagaaaatagagctgtgatccactacagagatgatgagaccatgtatgtggagagcaagaaggacagagtgacagtggtgttcagcacagtgttcaaggatgatgatgatgtggtgattggcaaggtgttcatgcaggagttcaaggagggcagaagagccagccacacagccccccaggtgctcttcagccaccgggagccccccctggagctgaaggacacagatgctgctgtgggggacaacatcggctacatcacctttgtgctcttccccaggcacaccaatgccagcgcccgggacaacaccatcaacctgatccacaccttccgggactacctgcactaccacatcaagtgcagcaaggcctacatccacaccaggatgagggccaagaccagtgacttcctgaaggtgctgaacagagcccggccagatgctgagaagaaggagatgaagaccatcaccgggaagaccttcagcagcaggtag

SEQ ID NO: 158835 - DNA, 273 bp, Artificial Sequence
  derived and/or modified sequence
atgatcctgctggaggtgaacaaccgcatcatcgaggagaccctggccctgaagtttgaaaatgctgctgctggcaacaagccagaggccgtggaggtgacctttgctgactttgatggagtgctgtaccacatcagcaaccccaatggagacaagaccaaggtgatggtgtccatcagcctgaagttctacaaggagctgcaggcccacggggctgatgagctgctgaagagggtgtatggcagcttcctggtgaaccctgagagcggctag

SEQ ID NO: 158836 - DNA, 903 bp, Artificial Sequence
  derived and/or modified sequence
atgatcctgctggaggtgaacaaccggatcatcgaggagaccctggctttgaagtttgaaaacgccgccgctggtaataagccagaagccgttgaagtcacattcgctgactttgacggagtgctttaccacataagcaacccgaacggggataaaacgaaagtaatggtgtctatctctctcaagttttacaaggagctgcaggctcatggagctgatgagcttttaaaacgagtgtacggatcatttctggtaaaccctgagagtggatacaatgtatcacttctgtacgacctcgagaatttacccgcttctaaggattccattgttcatcaggccggaatgctgaagcgtaattgttttgcatctgtctttgagaaatattttcaatttcaggaggagggaaaggaaggagaaaatcgtgccgtaattcactaccgagacgacgaaacaatgtatgtggagagcaagaaagaccgtgtaactgtggtcttttccacagtcttcaaggatgatgatgacgtggtcatcggcaaggtgttcatgcaggagttcaaggagggcagaagggctagccacacggccccacaggtcttattcagtcaccgagaaccccctctggagctgaaggacacagacgcagcagtgggcgataacatcggctatattactttcgttctatttccacgacacacgaacgcatccgcccgagacaatacaataaatctaatacacactttccgggactacttgcactatcatatcaagtgttccaaggcttatattcacactcgaatgagggcaaaaacatcagattttttaaaagtattaaacagggctcgaccagacgccgaaaagaaggagatgaagacaatcaccggaaagaccttttcttccagatag

SEQ ID NO: 158837 - DNA, 903 bp, Artificial Sequence
  derived and/or modified sequence
atgatcctgctggaggtgaacaaccggatcatcgaggagaccctggcactcaagttcgaaaatgccgcggcggggaacaagccagaggccgtggaggttacattcgctgactttgacggggtgttgtaccatatttctaaccccaatggagataagactaaggtgatggtgagtatttccctcaagttttataaagagctacaggcacatggagccgatgagctcctgaaaagggtgtacggctctttcctggtgaatcccgaatcagggtacaacgtgagcctgctgtatgatctcgagaacctgcccgcctccaaagattccatagtacaccaggcaggtatgctaaagcgcaactgttttgcctccgtgtttgaaaaatattttcagtttcaggaggagggtaaagagggggagaacagggccgtgattcactatagggacgacgagaccatgtatgtggagagcaagaaggacagggtaacagtggttttctcgacagtgttcaaagatgatgacgacgtcgttataggcaaggtgtttatgcaggagtttaaagaagggagacgggcatcccacaccgcaccccaagttcttttttcacatcgggagcccccacttgagctaaaggatacagatgctgctgtgggcgacaacataggatacatcactttcgtcctcttccctaggcatacaaatgcctctgcccgtgataacaccattaatttgatccatacattccgggactacttacactatcatattaagtgttccaaagcatacattcacactcgtatgcgggccaaaactagtgatttcctgaaggttttgaatagagctcggccagacgctgagaaaaaggagatgaagacaattactggcaaaacattctcctcaaggtag

SEQ ID NO: 158838 - DNA, 273 bp, Artificial Sequence
  derived and/or modified sequence
atgatcctgctggaggtgaacaaccggatcatcgaggagaccctggctttgaaatttgaaaacgctgctgctgggaataaacctgaagccgtcgaggtaacctttgctgactttgacggtgtgctctaccacatctccaatcccaacggagacaaaactaaagtgatggttagtatctccctcaagttctacaaggagctccaggcacatggagcagatgaactcctgaagagggtctatggctcctttctcgtgaaccctgagtccggctag

SEQ ID NO: 158839 - DNA, 903 bp, Artificial Sequence
  derived and/or modified sequence
atgatcctcctcgaggtgaacaataggattatcgaagagacgctagccctgaagtttgagaatgcggcagccggtaataagccggaggctgtggaggtgaccttcgcagatttcgatggggttttataccacatttccaatcctaacggagacaagacaaaggtcatggtgagtatttctctgaaattctataaggagctccaggcacacggtgctgacgagctcttgaaacgggtatacggaagctttctggtaaatcctgaaagtgggtacaatgtgtcacttctctacgaccttgagaatctccccgcaagcaaggatagtattgtgcaccaggcaggtatgctaaaaagaaactgttttgcctcagtatttgagaagtactttcagttccaggaagaaggcaaagaaggcgagaatcgggctgtcatccattacagagacgacgagaccatgtacgtcgagagcaaaaaagaccgggttaccgtggtcttcagtacggtttttaaggatgatgacgacgtggtgatcggaaaggtattcatgcaggagttcaaggaggggagaagagcctcgcataccgctccccaggttctgttctcacaccgtgagccacctctggagcttaaagacaccgacgccgctgtgggcgataatatcggctacattacatttgtcttattcccaaggcacacgaacgcaagcgcacgggacaatacaataaacctgattcacacctttagggactatttacactatcacattaaatgctctaaagcctacatccacacaaggatgcgggcaaagactagcgatttccttaaggtgctaaatcgggcaaggccagacgccgaaaaaaaagaaatgaagacaattacaggaaaaacctttagcagcagatag

SEQ ID NO: 158840 - DNA, 903 bp, Artificial Sequence
  derived and/or modified sequence
atgattctcttagaggtcaacaataggataatcgaagaaacccttgcattgaagttcgagaatgcggctgccggtaataagcctgaagccgtagaggtgacctttgcggattttgatggtgtgttataccacatatccaatcctaacggcgacaagacgaaggttatggttagtataagtctcaaattctataaggagctgcaggcacacggtgcagatgagcttttgaagagagtatatggcagctttttagtcaaccctgagtctgggtataatgtaagtcttttgtacgacctggaaaatctaccagctagtaaagactcgatcgttcaccaagctggtatgctgaagaggaactgctttgcatcagtgttcgagaagtacttccagttccaggaagagggaaaggagggggaaaatcgcgctgtgatccattaccgcgatgacgagaccatgtatgtggagagcaagaaagatcgggtcacagtcgtcttttctactgttttcaaggacgatgatgacgtggtaatcggaaaagtttttatgcaggaattcaaagaggggagaagagctagccacactgcacctcaagtgctatttagccaccgtgagcctccactggagctcaaagacacagacgctgctgttggcgacaatattgggtacattacttttgttctctttcctagacatacaaacgccagcgcccgagacaacactatcaatcttatccacacgtttcgcgattacctccactaccacattaaatgcagtaaggcgtacatccacacaaggatgcgtgctaaaacctctgattttcttaaggtacttaatagagccagaccagatgccgagaaaaaagaaatgaaaacaattaccggcaagaccttcagtagtcgatag

SEQ ID NO: 158841 - DNA, 273 bp, Artificial Sequence
  derived and/or modified sequence
atgatattgctggaggtcaacaaccgcataattgaagaaacactggcactgaaattcgagaacgccgctgctgggaacaagcccgaagcagtcgaggtgacattcgctgactttgacggcgtgctgtaccacatctcaaaccccaatggcgacaaaacaaaggtgatggtgagcattagtctgaagttttacaaggaactgcaggcccatggggcagatgaattacttaaaagagtgtatggatcctttctggtgaaccccgaaagcggctag

SEQ ID NO: 158842 - DNA, 1605 bp, Artificial Sequence
  derived and/or modified sequence
gcggcggcggcggctcggcaggcgggttcaggcttcgggggccaggtcggttgggtgggtgggtgtctccacagtctgcgtgcgtgggccagcgcgttcgtcttacccttccctccaccccggcccctctccccttctcccctaacctcctaccccacccagccccactcagggggcagcagggccgctccctccgtccttgcctcccttacccaccctcaccggcccttgtttctccttcccctgggggcagccgccgccatgatcctgctggaggtgaacaaccgcatcatcgaggagacgctcgcgctcaagttcgagaacgcggccgccggaaacaaaccggaagcagtagaagtaacatttgcagatttcgatggggtcctctatcatatttcaaatcctaatggagacaaaacaaaagtgatggtcagtatttctttgaaattctacaaggaacttcaggcacatggtgctgatgagttattaaagagggtgtacgggagtttcttggtaaatccagaatcaggatacaatgtctctttgctatatgaccttgaaaatcttccggcatccaaggattccattgtgcatcaagctggcatgttgaagcgaaattgttttgcctctgtctttgaaaaatacttccaattccaagaagagggcaaggaaggagagaacagggcagttatccattatagggatgatgagaccatgtatgttgagtctaaaaaggacagagtcacagtagtcttcagcacagtgtttaaggatgacgacgatgtggtcattggaaaggtgttcatgcaggagttcaaagaaggacgcagagccagccacacagccccacaggtcctctttagccacagggaacctcctctggagctgaaagacacagacgccgctgtgggtgacaacattggctacattacctttgtgctgttccctcgtcacaccaatgccagtgctcgagacaacaccatcaacctgatccacacgttccgggactacctgcactaccacatcaagtgctctaaggcctatattcacacacgtatgcgggcgaaaacgtctgacttcctcaaggtgctgaaccgcgcacgcccagatgccgagaaaaaagaaatgaaaacaatcacggggaagacgttttcatcccgctaatcttgggaataagaggaggaagcggctggcaactgaaggctggaacacttgctactggataatcgtagcttttaatgttgcgcctcttcaggttcttaagggattctccgttttggttccattttgtacacgtttggaaaataatctgcagaaacgagctgtgcttgcaaagacttcatagttcccaagaattaaaaaaaaaaaaaaaagaattccacttgatcaacttaattccttttctttatcttccctccctcacttcccttttctcccaccctcttttccaagctgtttcgctttgcaatatattactggtaatgagttgcaggataatgcagtcataacttgttttctcctaagtatttgagttcaaaactcctgtatctaaagaaatacggttggggtcattaataaagaaaatctttctatcttacatgagaa

SEQ ID NO: 158843 - DNA, 1505 bp, Artificial Sequence
  derived and/or modified sequence
ggcgccgcggggccgcgcgtccaggcggcgagcggaagtgggtgtgagagcggaagtggccggctagagccgggggctgggcggggaccgggcttgtcggtgaagcggcagtggcggcggcggcggcggctcggcaggcgggttcaggcttcgggggccagccgccgccatgatcctgctggaggtgaacaaccgcatcatcgaggagacgctcgcgctcaagttcgagaacgcggccgccggaaacaaaccggaagcagtagaagtaacatttgcagatttcgatggggtcctctatcatatttcaaatcctaatggagacaaaacaaaagtgatggtcagtatttctttgaaattctacaaggaacttcaggcacatggtgctgatgagttattaaagagggtgtacgggagtttcttggtaaatccagaatcaggatacaatgtctctttgctatatgaccttgaaaatcttccggcatccaaggattccattgtgcatcaagctggcatgttgaagcgaaattgttttgcctctgtctttgaaaaatacttccaattccaagaagagggcaaggaaggagagaacagggcagttatccattatagggatgatgagaccatgtatgttgagtctaaaaaggacagagtcacagtagtcttcagcacagtgtttaaggatgacgacgatgtggtcattggaaaggtgttcatgcaggagttcaaagaaggacgcagagccagccacacagccccacaggtcctctttagccacagggaacctcctctggagctgaaagacacagacgccgctgtgggtgacaacattggctacattacctttgtgctgttccctcgtcacaccaatgccagtgctcgagacaacaccatcaacctgatccacacgttccgggactacctgcactaccacatcaagtgctctaaggcctatattcacacacgtatgcgggcgaaaacgtctgacttcctcaaggtgctgaaccgcgcacgcccagatgccgagaaaaaagaaatgaaaacaatcacggggaagacgttttcatcccgctaatcttgggaataagaggaggaagcggctggcaactgaaggctggaacacttgctactggataatcgtagcttttaatgttgcgcctcttcaggttcttaagggattctccgttttggttccattttgtacacgtttggaaaataatctgcagaaacgagctgtgcttgcaaagacttcatagttcccaagaattaaaaaaaaaaaaaaaagaattccacttgatcaacttaattccttttctttatcttccctccctcacttcccttttctcccaccctcttttccaagctgtttcgctttgcaatatattactggtaatgagttgcaggataatgcagtcataacttgttttctcctaagtatttgagttcaaaactcctgtatctaaagaaatacggttggggtcattaataaagaaaatctttctatctta

SEQ ID NO: 158844 - DNA, 482 bp, Artificial Sequence
  derived and/or modified sequence
gagcggaagtggccggctagagccgggggctgggcggggaccgggcttgtcggtgaagcggcagtggcggcggcggcggcggctcggcaggcgggttcaggcttcgggggccagccccactcagggggcagcagggccgctccctccgtccttgcctcccttacccaccctcaccggcccttgtttctccttcccctgggggcagccgccgccatgatcctgctggaggtgaacaaccgcatcatcgaggagacgctcgcgctcaagttcgagaacgcggccgccggaaacaaaccggaagcagtagaagtaacatttgcagatttcgatggggtcctctatcatatttcaaatcctaatggagacaaaacaaaagtgatggtcagtatttctttgaaattctacaaggaacttcaggcacatggtgctgatgagttattaaagagggtgtacgggagtttcttggtaaatccagaatcagg

SEQ ID NO: 158845 - DNA, 903 bp, Artificial Sequence
  derived and/or modified sequence
atgatcctgctggaggtgaacaacagaatcatcgaggagaccctggccctgaagttcgagaacgccgccgccggcaacaagcccgaggccgtggaggtgaccttcgccgacttcgacggcgtgctgtaccacatcagcaaccccaacggcgacaagaccaaggtgatggtgagcatcagcctgaagttctacaaggagctgcaggcccacggcgccgacgagctgctgaagagagtgtacggcagcttcctggtgaaccccgagagcggctacaacgtgagcctgctgtacgacctggagaacctgcccgccagcaaggacagcatcgtgcaccaggccggcatgctgaagagaaactgcttcgccagcgtgttcgagaagtacttccagttccaggaggagggcaaggagggcgagaacagagccgtgatccactacagagacgacgagaccatgtacgtggagagcaagaaggacagagtgaccgtggtgttcagcaccgtgttcaaggacgacgacgacgtggtgatcggcaaggtgttcatgcaggagttcaaggagggcagaagagccagccacaccgccccccaggtgctgttcagccacagagagccccccctggagctgaaggacaccgacgccgccgtgggcgacaacatcggctacatcaccttcgtgctgttccccagacacaccaacgccagcgccagagacaacaccatcaacctgatccacaccttcagagactacctgcactaccacatcaagtgcagcaaggcctacatccacaccagaatgagagccaagaccagcgacttcctgaaggtgctgaacagagccagacccgacgccgagaagaaggagatgaagaccatcaccggcaagaccttcagcagcagatag

SEQ ID NO: 158846 - DNA, 273 bp, Artificial Sequence
  derived and/or modified sequence
atgatcctgctggaggtgaacaacagaatcatcgaggagaccctggccctgaagttcgagaacgccgccgccggcaacaagcccgaggccgtggaggtgaccttcgccgacttcgacggcgtgctgtaccacatcagcaaccccaacggcgacaagaccaaggtgatggtgagcatcagcctgaagttctacaaggagctgcaggcccacggcgccgacgagctgctgaagagagtgtacggcagcttcctggtgaaccccgagagcggctag

SEQ ID NO: 158847 - protein, 1312 aa, Artificial Sequence
  derived and/or modified sequence
MSRIEKMSILGVRSFGIEDKDKQIITFFSPLTILVGPNGAGKTTIIECLKYICTGDFPPGTKGNTFVHDPKVAQETDVRAQIRLQFRDVNGELIAVQRSMVCTQKSKKTEFKTLEGVITRTKHGEKVSLSSKCAEIDREMISSLGVSKAVLNNVIFCHQEDSNWPLSEGKALKQKFDEIFSATRYIKALETLRQVRQTQGQKVKEYQMELKYLKQYKEKACEIRDQITSKEAQLTSSKEIVKSYENELDPLKNRLKEIEHNLSKIMKLDNEIKALDSRKKQMEKDNSELEEKMEKVFQGTDEQLNDLYHNHQRTVREKERKLVDCHRELEKLNKESRLLNQEKSELLVEQGRLQLQADRHQEHIRARDSLIQSLATQLELDGFERGPFSERQIKNFHKLVRERQEGEAKTANQLMNDFAEKETLKQKQIDEIRDKKTGLGRIIELKSEILSKKQNELKNVKYELQQLEGSSDRILELDQELIKAERELSKAEKNSNVETLKMEVISLQNEKADLDRTLRKLDQEMEQLNHHTTTRTQMEMLTKDKADKDEQIRKIKSRHSDELTSLLGYFPNKKQLEDWLHSKSKEINQTRDRLAKLNKELASSEQNKNHINNELKRKEEQLSSYEDKLFDVCGSQDFESDLDRLKEEIEKSSKQRAMLAGATAVYSQFITQLTDENQSCCPVCQRVFQTEAELQEVISDLQSKLRLAPDKLKSTESELKKKEKRRDEMLGLVPMRQSIIDLKEKEIPELRNKLQNVNRDIQRLKNDIEEQETLLGTIMPEEESAKVCLTDVTIMERFQMELKDVERKIAQQAAKLQGIDLDRTVQQVNQEKQEKQHKLDTVSSKIELNRKLIQDQQEQIQHLKSTTNELKSEKLQISTNLQRRQQLEEQTVELSTEVQSLYREIKDAKEQVSPLETTLEKFQQEKEELINKKNTSNKIAQDKLNDIKEKVKNIHGYMKDIENYIQDGKDDYKKQKETELNKVIAQLSECEKHKEKINEDMRLMRQDIDTQKIQERWLQDNLTLRKRNEELKEVEEERKQHLKEMGQMQVLQMKSEHQKLEENIDNIKRNHNLALGRQKGYEEEIIHFKKELREPQFRDAEEKYREMMIVMRTTELVNKDLDIYYKTLDQAIMKFHSMKMEEINKIIRDLWRSTYRGQDIEYIEIRSDADENVSASDKRRNYNYRVVMLKGDTALDMRGRCSAGQKVLASLIIRLALAETFCLNCGIIALDEPTTNLDRENIESLAHALVEIIKSRSQQRNFQLLVITHDEDFVELLGRSEYVEKFYRIKKNIDQCSEIVKCSVSSLGFNVH

SEQ ID NO: 158848 - protein, 1173 aa, Artificial Sequence
  derived and/or modified sequence
MISSLGVSKAVLNNVIFCHQEDSNWPLSEGKALKQKFDEIFSATRYIKALETLRQVRQTQGQKVKEYQMELKYLKQYKEKACEIRDQITSKEAQLTSSKEIVKSYENELDPLKNRLKEIEHNLSKIMKLDNEIKALDSRKKQMEKDNSELEEKMEKVFQGTDEQLNDLYHNHQRTVREKERKLVDCHRELEKLNKESRLLNQEKSELLVEQGRLQLQADRHQEHIRARDSLIQSLATQLELDGFERGPFSERQIKNFHKLVRERQEGEAKTANQLMNDFAEKETLKQKQIDEIRDKKTGLGRIIELKSEILSKKQNELKNVKYELQQLEGSSDRILELDQELIKAERELSKAEKNSNVETLKMEVISLQNEKADLDRTLRKLDQEMEQLNHHTTTRTQMEMLTKDKADKDEQIRKIKSRHSDELTSLLGYFPNKKQLEDWLHSKSKEINQTRDRLAKLNKELASSEQNKNHINNELKRKEEQLSSYEDKLFDVCGSQDFESDLDRLKEEIEKSSKQRAMLAGATAVYSQFITQLTDENQSCCPVCQRVFQTEAELQEVISDLQSKLRLAPDKLKSTESELKKKEKRRDEMLGLVPMRQSIIDLKEKEIPELRNKLQNVNRDIQRLKNDIEEQETLLGTIMPEEESAKVCLTDVTIMERFQMELKDVERKIAQQAAKLQGIDLDRTVQQVNQEKQEKQHKLDTVSSKIELNRKLIQDQQEQIQHLKSTTNELKSEKLQISTNLQRRQQLEEQTVELSTEVQSLYREIKDAKEQVSPLETTLEKFQQEKEELINKKNTSNKIAQDKLNDIKEKVKNIHGYMKDIENYIQDGKDDYKKQKETELNKVIAQLSECEKHKEKINEDMRLMRQDIDTQKIQERWLQDNLTLRKRNEELKEVEEERKQHLKEMGQMQVLQMKSEHQKLEENIDNIKRNHNLALGRQKGYEEEIIHFKKELREPQFRDAEEKYREMMIVMRTTELVNKDLDIYYKTLDQAIMKFHSMKMEEINKIIRDLWRSTYRGQDIEYIEIRSDADENVSASDKRRNYNYRVVMLKGDTALDMRGRCSAGQKVLASLIIRLALAETFCLNCGIIALDEPTTNLDRENIESLAHALVEIIKSRSQQRNFQLLVITHDEDFVELLGRSEYVEKFYRIKKNIDQCSEIVKCSVSSLGFNVH

SEQ ID NO: 158849 - DNA, 3939 bp, Artificial Sequence
  derived and/or modified sequence
atgagcagaatcgagaagatgagcatcctgggcgtgagaagcttcggcatcgaggacaaggacaagcagatcatcaccttcttcagccccctgaccatcctggtgggccccaacggcgccggcaagaccaccatcatcgagtgcctgaagtacatctgcaccggcgacttcccccccggcaccaagggcaacaccttcgtgcacgaccccaaggtggcccaggagaccgacgtgagagcccagatcagactgcagttcagagacgtgaacggcgagctgatcgccgtgcagagaagcatggtgtgcacccagaagagcaagaagaccgagttcaagaccctggagggcgtgatcaccagaaccaagcacggcgagaaggtgagcctgagcagcaagtgcgccgagatcgacagagagatgatcagcagcctgggcgtgagcaaggccgtgctgaacaacgtgatcttctgccaccaggaggacagcaactggcccctgagcgagggcaaggccctgaagcagaagttcgacgagatcttcagcgccaccagatacatcaaggccctggagaccctgagacaggtgagacagacccagggccagaaggtgaaggagtaccagatggagctgaagtacctgaagcagtacaaggagaaggcctgcgagatcagagaccagatcaccagcaaggaggcccagctgaccagcagcaaggagatcgtgaagagctacgagaacgagctggaccccctgaagaacagactgaaggagatcgagcacaacctgagcaagatcatgaagctggacaacgagatcaaggccctggacagcagaaagaagcagatggagaaggacaacagcgagctggaggagaagatggagaaggtgttccagggcaccgacgagcagctgaacgacctgtaccacaaccaccagagaaccgtgagagagaaggagagaaagctggtggactgccacagagagctggagaagctgaacaaggagagcagactgctgaaccaggagaagagcgagctgctggtggagcagggcagactgcagctgcaggccgacagacaccaggagcacatcagagccagagacagcctgatccagagcctggccacccagctggagctggacggcttcgagagaggccccttcagcgagagacagatcaagaacttccacaagctggtgagagagagacaggagggcgaggccaagaccgccaaccagctgatgaacgacttcgccgagaaggagaccctgaagcagaagcagatcgacgagatcagagacaagaagaccggcctgggcagaatcatcgagctgaagagcgagatcctgagcaagaagcagaacgagctgaagaacgtgaagtacgagctgcagcagctggagggcagcagcgacagaatcctggagctggaccaggagctgatcaaggccgagagagagctgagcaaggccgagaagaacagcaacgtggagaccctgaagatggaggtgatcagcctgcagaacgagaaggccgacctggacagaaccctgagaaagctggaccaggagatggagcagctgaaccaccacaccaccaccagaacccagatggagatgctgaccaaggacaaggccgacaaggacgagcagatcagaaagatcaagagcagacacagcgacgagctgaccagcctgctgggctacttccccaacaagaagcagctggaggactggctgcacagcaagagcaaggagatcaaccagaccagagacagactggccaagctgaacaaggagctggccagcagcgagcagaacaagaaccacatcaacaacgagctgaagagaaaggaggagcagctgagcagctacgaggacaagctgttcgacgtgtgcggcagccaggacttcgagagcgacctggacagactgaaggaggagatcgagaagagcagcaagcagagagccatgctggccggcgccaccgccgtgtacagccagttcatcacccagctgaccgacgagaaccagagctgctgccccgtgtgccagagagtgttccagaccgaggccgagctgcaggaggtgatcagcgacctgcagagcaagctgagactggcccccgacaagctgaagagcaccgagagcgagctgaagaagaaggagaagagaagagacgagatgctgggcctggtgcccatgagacagagcatcatcgacctgaaggagaaggagatccccgagctgagaaacaagctgcagaacgtgaacagagacatccagagactgaagaacgacatcgaggagcaggagaccctgctgggcaccatcatgcccgaggaggagagcgccaaggtgtgcctgaccgacgtgaccatcatggagagattccagatggagctgaaggacgtggagagaaagatcgcccagcaggccgccaagctgcagggcatcgacctggacagaaccgtgcagcaggtgaaccaggagaagcaggagaagcagcacaagctggacaccgtgagcagcaagatcgagctgaacagaaagctgatccaggaccagcaggagcagatccagcacctgaagagcaccaccaacgagctgaagagcgagaagctgcagatcagcaccaacctgcagagaagacagcagctggaggagcagaccgtggagctgagcaccgaggtgcagagcctgtacagagagatcaaggacgccaaggagcaggtgagccccctggagaccaccctggagaagttccagcaggagaaggaggagctgatcaacaagaagaacaccagcaacaagatcgcccaggacaagctgaacgacatcaaggagaaggtgaagaacatccacggctacatgaaggacatcgagaactacatccaggacggcaaggacgactacaagaagcagaaggagaccgagctgaacaaggtgatcgcccagctgagcgagtgcgagaagcacaaggagaagatcaacgaggacatgagactgatgagacaggacatcgacacccagaagatccaggagagatggctgcaggacaacctgaccctgagaaagagaaacgaggagctgaaggaggtggaggaggagagaaagcagcacctgaaggagatgggccagatgcaggtgctgcagatgaagagcgagcaccagaagctggaggagaacatcgacaacatcaagagaaaccacaacctggccctgggcagacagaagggctacgaggaggagatcatccacttcaagaaggagctgagagagccccagttcagagacgccgaggagaagtacagagagatgatgatcgtgatgagaaccaccgagctggtgaacaaggacctggacatctactacaagaccctggaccaggccatcatgaagttccacagcatgaagatggaggagatcaacaagatcatcagagacctgtggagaagcacctacagaggccaggacatcgagtacatcgagatcagaagcgacgccgacgagaacgtgagcgccagcgacaagagaagaaactacaactacagagtggtgatgctgaagggcgacaccgccctggacatgagaggcagatgcagcgccggccagaaggtgctggccagcctgatcatcagactggccctggccgagaccttctgcctgaactgcggcatcatcgccctggacgagcccaccaccaacctggacagagagaacatcgagagcctggcccacgccctggtggagatcatcaagagcagaagccagcagagaaacttccagctgctggtgatcacccacgacgaggacttcgtggagctgctgggcagaagcgagtacgtggagaagttctacagaatcaagaagaacatcgaccagtgcagcgagatcgtgaagtgcagcgtgagcagcctgggcttcaacgtgcactag

SEQ ID NO: 158850 - DNA, 3522 bp, Artificial Sequence
  derived and/or modified sequence
atgatcagcagcctgggcgtgagcaaggccgtgctgaacaacgtgatcttctgccaccaggaggacagcaactggcccctgagcgagggcaaggccctgaagcagaagttcgacgagatcttcagcgccaccagatacatcaaggccctggagaccctgagacaggtgagacagacccagggccagaaggtgaaggagtaccagatggagctgaagtacctgaagcagtacaaggagaaggcctgcgagatcagagaccagatcaccagcaaggaggcccagctgaccagcagcaaggagatcgtgaagagctacgagaacgagctggaccccctgaagaacagactgaaggagatcgagcacaacctgagcaagatcatgaagctggacaacgagatcaaggccctggacagcagaaagaagcagatggagaaggacaacagcgagctggaggagaagatggagaaggtgttccagggcaccgacgagcagctgaacgacctgtaccacaaccaccagagaaccgtgagagagaaggagagaaagctggtggactgccacagagagctggagaagctgaacaaggagagcagactgctgaaccaggagaagagcgagctgctggtggagcagggcagactgcagctgcaggccgacagacaccaggagcacatcagagccagagacagcctgatccagagcctggccacccagctggagctggacggcttcgagagaggccccttcagcgagagacagatcaagaacttccacaagctggtgagagagagacaggagggcgaggccaagaccgccaaccagctgatgaacgacttcgccgagaaggagaccctgaagcagaagcagatcgacgagatcagagacaagaagaccggcctgggcagaatcatcgagctgaagagcgagatcctgagcaagaagcagaacgagctgaagaacgtgaagtacgagctgcagcagctggagggcagcagcgacagaatcctggagctggaccaggagctgatcaaggccgagagagagctgagcaaggccgagaagaacagcaacgtggagaccctgaagatggaggtgatcagcctgcagaacgagaaggccgacctggacagaaccctgagaaagctggaccaggagatggagcagctgaaccaccacaccaccaccagaacccagatggagatgctgaccaaggacaaggccgacaaggacgagcagatcagaaagatcaagagcagacacagcgacgagctgaccagcctgctgggctacttccccaacaagaagcagctggaggactggctgcacagcaagagcaaggagatcaaccagaccagagacagactggccaagctgaacaaggagctggccagcagcgagcagaacaagaaccacatcaacaacgagctgaagagaaaggaggagcagctgagcagctacgaggacaagctgttcgacgtgtgcggcagccaggacttcgagagcgacctggacagactgaaggaggagatcgagaagagcagcaagcagagagccatgctggccggcgccaccgccgtgtacagccagttcatcacccagctgaccgacgagaaccagagctgctgccccgtgtgccagagagtgttccagaccgaggccgagctgcaggaggtgatcagcgacctgcagagcaagctgagactggcccccgacaagctgaagagcaccgagagcgagctgaagaagaaggagaagagaagagacgagatgctgggcctggtgcccatgagacagagcatcatcgacctgaaggagaaggagatccccgagctgagaaacaagctgcagaacgtgaacagagacatccagagactgaagaacgacatcgaggagcaggagaccctgctgggcaccatcatgcccgaggaggagagcgccaaggtgtgcctgaccgacgtgaccatcatggagagattccagatggagctgaaggacgtggagagaaagatcgcccagcaggccgccaagctgcagggcatcgacctggacagaaccgtgcagcaggtgaaccaggagaagcaggagaagcagcacaagctggacaccgtgagcagcaagatcgagctgaacagaaagctgatccaggaccagcaggagcagatccagcacctgaagagcaccaccaacgagctgaagagcgagaagctgcagatcagcaccaacctgcagagaagacagcagctggaggagcagaccgtggagctgagcaccgaggtgcagagcctgtacagagagatcaaggacgccaaggagcaggtgagccccctggagaccaccctggagaagttccagcaggagaaggaggagctgatcaacaagaagaacaccagcaacaagatcgcccaggacaagctgaacgacatcaaggagaaggtgaagaacatccacggctacatgaaggacatcgagaactacatccaggacggcaaggacgactacaagaagcagaaggagaccgagctgaacaaggtgatcgcccagctgagcgagtgcgagaagcacaaggagaagatcaacgaggacatgagactgatgagacaggacatcgacacccagaagatccaggagagatggctgcaggacaacctgaccctgagaaagagaaacgaggagctgaaggaggtggaggaggagagaaagcagcacctgaaggagatgggccagatgcaggtgctgcagatgaagagcgagcaccagaagctggaggagaacatcgacaacatcaagagaaaccacaacctggccctgggcagacagaagggctacgaggaggagatcatccacttcaagaaggagctgagagagccccagttcagagacgccgaggagaagtacagagagatgatgatcgtgatgagaaccaccgagctggtgaacaaggacctggacatctactacaagaccctggaccaggccatcatgaagttccacagcatgaagatggaggagatcaacaagatcatcagagacctgtggagaagcacctacagaggccaggacatcgagtacatcgagatcagaagcgacgccgacgagaacgtgagcgccagcgacaagagaagaaactacaactacagagtggtgatgctgaagggcgacaccgccctggacatgagaggcagatgcagcgccggccagaaggtgctggccagcctgatcatcagactggccctggccgagaccttctgcctgaactgcggcatcatcgccctggacgagcccaccaccaacctggacagagagaacatcgagagcctggcccacgccctggtggagatcatcaagagcagaagccagcagagaaacttccagctgctggtgatcacccacgacgaggacttcgtggagctgctgggcagaagcgagtacgtggagaagttctacagaatcaagaagaacatcgaccagtgcagcgagatcgtgaagtgcagcgtgagcagcctgggcttcaacgtgcactag

SEQ ID NO: 158851 - DNA, 3939 bp, Artificial Sequence
  derived and/or modified sequence
atgtctcgaatagagaagatgtcaattctgggcgttagatcatttggaatagaagacaaagacaaacaaattattaccttctttagcccattaacaattctggtgggaccaaatggcgctggcaaaacaacaattattgaatgcctaaaatacatctgcaccggggactttccgcctggaacgaaaggaaatacattcgtccatgacccaaaagtagctcaggaaacagacgtccgggctcagatccgccttcagtttagggacgtgaacggagaacttattgccgtccagcgctctatggtctgcacacagaagagtaaaaaaacagaatttaaaaccctcgagggggttatcacccgaactaaacacggggaaaaggtctcccttagtagtaaatgtgccgagatagatcgcgagatgatttcatctttgggagtctcaaaagccgtgctgaataatgtcatcttttgccaccaggaagatagcaactggccactctctgaaggcaaagcactgaagcagaaattcgatgaaattttttctgctacacgttatataaaggctctcgaaacactccgccaggtgaggcaaactcagggccagaaagtgaaagaatatcagatggaactaaagtatctgaaacagtataaagagaaagcatgcgagattagggaccagatcacctccaaggaggcccagctcacatcttcaaaggagatcgtgaaaagttatgaaaacgaactcgacccgctaaagaaccgattgaaggaaattgaacataacctctcgaaaatcatgaaactagacaatgagattaaggctctggattctcgcaaaaagcaaatggaaaaagataacagcgaactcgaggagaagatggagaaagtcttccagggcactgatgagcaactgaatgatctgtaccacaatcaccagaggacagtcagggagaaagaaaggaagctggtggattgccatagggagctggagaaacttaacaaagagtcacggctcctgaatcaggagaagtccgagctgctcgtggaacagggccgcctgcagctgcaggcagatcgacaccaggagcacattcgtgctagagattcactaatccagtcgctggctacgcaactggaactggatggcttcgagcggggccctttttccgagcgccagattaaaaactttcataaacttgttcgagaaaggcaggaaggcgaagccaagactgccaaccagctgatgaacgatttcgctgagaaggaaaccttaaaacagaagcagatcgatgaaatccgcgacaagaagacaggtttgggtaggattatcgagcttaaaagtgagatcttgtcaaaaaaacaaaacgagctcaaaaatgtgaaatatgagctgcagcaactggagggtagtagcgatcggatcctggagctggatcaagagctgataaaagcggaacgagagctgagcaaggcagaaaaaaactccaacgtggagactctaaaaatggaagtcatctctctacaaaatgagaaagccgacctggatcgtaccttgcggaagcttgaccaggaaatggaacagctcaatcatcacacgactaccaggacccaaatggaaatgttaactaaagacaaagcagacaaggacgaacagatccggaagatcaagtcacggcatagtgacgaactgacatctttgctgggctattttccaaataagaagcaactggaggattggctccactcaaagtctaaagaaataaatcaaactagagaccgtctcgccaagctcaataaagaactcgcctcttcagagcagaacaagaaccatattaataatgagttgaagcggaaggaggagcagctctcatcatacgaggataaactatttgatgtctgtggcagtcaggactttgaatctgatctggacagacttaaggaagagatcgagaagtcctccaagcagagagcaatgctggctggggccacagcggtttacagccagttcattactcagcttacggatgagaatcagtcctgttgtcccgtgtgccagcgggtgtttcagacagaggccgagctgcaggaggtgatttcagatctgcagagcaaactgcgcctagcccccgataagctgaagagcactgaatcagagttaaaaaaaaaagaaaaacggcgcgatgagatgctcggtctggtcccaatgcggcagtctatcatcgacctgaaagaaaaggaaatccccgaactgaggaacaagcttcaaaacgtgaacagggacatccagcgcctaaaaaatgacatcgaggagcaggagactctgctgggcactattatgcccgaagaggagtcagcgaaagtgtgcctgaccgatgtcacaattatggagaggtttcagatggagctgaaggacgtggagaggaaaatcgcgcagcaggccgccaaactgcagggaatcgacttggaccggacagtgcagcaggtcaaccaagagaaacaggaaaagcaacacaagctcgacacagtttctagcaaaattgagctgaatcggaagctcatccaggatcagcaggaacaaatccagcacctgaagagcaccacaaacgagctgaagtctgaaaagctccagatttcaaccaacctgcaacggagacagcagctcgaggagcagacagtggaactgtccacagaggttcagtccctatacagggaaataaaggatgcaaaggagcaggtctcccctcttgaaaccacattggagaagtttcaacaggagaaagaagaactcattaacaagaagaataccagcaacaaaattgcacaagacaaactaaacgatatcaaggaaaaagtgaagaatattcacggatatatgaaggatatcgaaaactacatccaggatggcaaagacgattataaaaaacagaaggagacagagctgaacaaagtgattgctcagctgtccgaatgtgagaagcacaaagagaagatcaacgaggacatgaggctcatgaggcaagatatcgatacccagaagatccaagagcgatggctgcaagacaacctgaccctgaggaaaaggaatgaagaactgaaagaggttgaagaggaacggaaacagcatctcaaggaaatgggccagatgcaggtactccagatgaagagtgagcatcagaagttggaggagaacattgacaacattaagcgcaatcacaatctggccctcggaaggcagaaggggtacgaagaggagatcatccattttaaaaaggagttgagagaaccccagtttagggatgcagaagagaagtaccgtgagatgatgattgtgatgcgtacgactgaacttgtgaacaaggatctcgacatttattacaagactctggatcaggcaataatgaaattccacagcatgaaaatggaggaaataaataaaattattcgggacctgtggcgtagtacatacaggggacaggacattgagtacatcgagatcaggtccgacgccgacgagaacgtcagcgcctcggacaaaagacggaattacaattatcgggtcgtgatgctgaaaggtgacacggcattagacatgcgcgggagatgcagcgccggtcagaaggtcctggcttcactaatcatacgtctggcattagccgaaactttctgcttgaattgcggaattatagccctagacgaaccaaccaccaatctcgatagagaaaacatcgagtcactcgcccacgctctggtagagattatcaagtccaggtcacagcagcggaatttccagctcctggtaattacacatgacgaagattttgttgagcttctaggaagaagcgagtacgtggaaaaattctatcgcataaagaagaacattgaccagtgctcagagatcgtgaaatgtagcgtttccagtctggggttcaatgtccactag

SEQ ID NO: 158852 - DNA, 3522 bp, Artificial Sequence
  derived and/or modified sequence
atgatatcctctctcggcgtttctaaagccgtgctcaataatgtgatcttctgccaccaggaagactctaactggcctctgtccgaggggaaggcacttaagcaaaaatttgacgaaatctttagcgccaccaggtatattaaggcactggaaaccctaaggcaggtgaggcagactcaggggcaaaaggtgaaggagtaccagatggagctgaaatacctgaagcagtacaaggaaaaagcttgtgagataagggatcagatcactagtaaggaggcccagctcactagctccaaggagatcgtgaagtcctacgagaatgaactggatcctctgaaaaacaggttaaaggagattgagcacaatctctctaaaatcatgaagcttgataacgagattaaagccttggattctcgcaaaaaacagatggaaaaggacaattcagaactcgaggaaaagatggagaaggttttccaggggacggacgagcagctgaatgacctctaccataaccatcagcgcaccgtgcgggagaaggaacgcaagcttgtagactgccacagagagctggaaaagctgaacaaggaatctcgactgctgaaccaggagaagtcggagcttctggttgagcagggtaggctgcaattgcaggctgatcgacaccaggaacatattcgtgcccgggacagcttgatccagtcattggccacgcagctggagcttgatgggttcgaaaggggaccattctcagaaagacagatcaaaaacttccacaaactagtgcgtgaaagacaggagggcgaggctaagaccgctaaccaactgatgaacgattttgcagagaaggagacacttaagcaaaaacagatagacgagattcgtgataaaaaaactggtttgggccgcatcatcgaacttaagtcagaaattctctccaagaaacaaaatgaacttaaaaacgttaagtatgaactacagcaactggaagggtccagcgatcggatactggagctcgatcaagagctgataaaggctgaacgggaactgagcaaggccgagaagaattctaatgttgaaactctcaagatggaagttatcagtctccaaaacgagaaggccgaccttgaccgcacgctcaggaaactcgaccaggagatggagcagttgaatcatcatactaccaccaggacccagatggaaatgcttacgaaagacaaggccgataaagacgagcagattcgaaagatcaaatctagacattccgacgaactgacatctctgctggggtatttcccaaataaaaagcagctggaggattggctccactccaagtccaaagaaattaaccaaacaagagatagactagccaagctgaacaaagaactggctagtagtgaacaaaacaagaatcacattaataacgagctgaagcgcaaggaggaacagttatcatcatatgaggacaaattatttgacgtgtgcggctcacaggacttcgagtctgacctcgaccggttgaaggaagaaatcgaaaaaagcagtaaacagcgcgcaatgctggctggtgcaactgccgtgtatagtcagttcatcacccagcttacagacgaaaatcagtcctgctgtcccgtgtgccagagggtgtttcagacagaagccgagctgcaggaggtgataagcgatctgcagtcaaagctccggctcgcacccgataaattaaagtctacggaatccgaactgaaaaagaaggagaagaggagggatgagatgcttggactcgttcccatgaggcagtccatcatcgacttaaaggaaaaggagatcccagaacttcgaaataagctccagaacgtgaaccgggacattcagagactcaaaaacgacatcgaagagcaggagaccctactgggaacaatcatgccagaggaggagtctgcaaaggtgtgtctgactgatgttactatcatggagcgctttcagatggagcttaaagacgtcgaaaggaagatcgcccagcaagcagctaaactccagggaattgatttagacaggacagtccagcaagttaaccaggagaagcaagaaaaacagcataaactggataccgtgtcctcaaagattgagcttaaccgcaaactcatccaagaccaacaagaacagattcagcacctcaaaagtactacaaacgaactcaagtccgagaaactccaaatctccactaatctccagagacggcaacagctggaggagcagacggtcgagctgagtacagaggtgcagtctttgtatcgggaaatcaaggacgctaaggaacaggtctctcccctggagaccactcttgagaagtttcagcaggagaaagaggaattaatcaataagaaaaacacctccaacaagattgctcaggacaaattaaacgatataaaagagaaggtgaagaacatacacggctatatgaaggacattgagaattatatccaggacggtaaggatgactataagaaacaaaaggaaactgaactgaataaagtcatcgcacaactgtcagaatgtgaaaagcataaagagaaaatcaacgaagatatgagactgatgcgccaagacattgacacccagaaaatccaggagcggtggctgcaggacaatttgactctccgaaagcgcaatgaggaattgaaggaggttgaagaggaacgtaaacagcatttaaaggaaatgggccaaatgcaggtgctgcagatgaagtcagagcaccagaagctcgaggaaaatatagacaatatcaagcggaaccacaacctggccctgggcagacagaaaggctatgaggaggagatcatacattttaagaaagagcttagggagccacagttccgcgatgccgaggaaaagtaccgcgaaatgatgattgtcatgagaacaacggaattggtgaataaagacctagatatctattacaagacgcttgaccaggctatcatgaaattccactcaatgaaaatggaggagattaataaaattattcgcgacctatggcgaagtacgtaccgtggccaggacatagagtatattgaaatccggtcagacgccgacgagaatgtttctgcatccgataagcggaggaactacaactatcgcgtggtgatgctgaagggggacactgcgctagatatgcgcggcagatgttctgcggggcaaaaggtcctcgctagcctgattataaggctggcactggctgaaaccttttgcctcaattgcggaatcattgcgctcgacgagcccaccacgaatcttgatcgcgagaatatcgaatccctggctcatgccctggtggagataataaagtcgcgaagccagcaacgcaacttccagcttcttgtgatcacacacgacgaagattttgtggagttactggggagatccgaatatgttgaaaagttttatcgtatcaaaaagaacattgaccagtgttccgaaatcgtgaaatgctctgtgtcctccttagggttcaacgtgcattag

SEQ ID NO: 158853 - DNA, 3939 bp, Artificial Sequence
  derived and/or modified sequence
atgagccgcatcgagaagatgagcatcctgggcgtgcgcagctttggaattgaggacaaggacaagcagatcatcaccttcttcagccccctgaccatcctggtgggccccaacggggccggcaagaccaccatcattgaatgtctgaagtacatctgcaccggggacttccccccaggcaccaagggcaacacctttgtgcatgaccccaaggtggcccaggagacagatgtgcgggcccagatccggctgcagttcagagatgtgaatggagagctgattgctgtgcagaggtccatggtgtgcacccagaagagcaagaagacagagttcaagaccctggagggcgtcatcaccaggaccaagcatggagagaaggtgtccctgagcagcaaatgtgccgagattgaccgggagatgatcagcagcctgggcgtgtccaaggctgtgctgaacaacgtcatcttctgccaccaggaggacagcaactggcccctgtctgagggcaaggccctgaagcagaagtttgatgagatcttcagcgccacccgctacatcaaggccctggagaccctgcggcaggtgcggcagacccagggccagaaggtgaaggagtaccagatggagctgaagtacctgaagcagtacaaggagaaggcctgtgagatccgggaccagatcaccagcaaggaggcccagctgaccagcagcaaggagatcgtgaagagctatgaaaatgagctggaccccctgaagaaccggctgaaggagattgagcacaacctgagcaagatcatgaagctggacaatgagatcaaggccctggacagcaggaagaagcagatggagaaggacaacagcgagctggaggagaagatggagaaggtgttccagggcacagatgagcagctgaatgacctgtaccacaaccaccagaggacagtgcgggagaaggagaggaagctggtggactgccaccgggagctggagaagctgaacaaggagagccggctgctgaaccaggagaagtctgagctgctggtggagcagggccgcctgcagctgcaggccgacagacaccaggagcacatccgggcccgggacagcctcatccagagcctggccacccagctggagctggatggctttgagcggggccccttcagcgagcggcagatcaagaacttccacaagctggtgcgggagcggcaggagggggaggccaagacagccaaccagctgatgaatgactttgctgagaaggagaccctgaagcagaagcagattgatgagatccgggacaagaagacaggcctgggccgcatcatcgagctgaagtctgagatcctgagcaagaagcagaatgagctgaagaatgtgaagtatgagctgcagcagctggagggcagcagtgaccgcatcctggagctggaccaggagctgatcaaggccgagcgggagctgagcaaggccgagaagaacagcaatgtggagaccctgaagatggaggtgatcagcctgcagaatgagaaggctgacctggacaggaccctgaggaagctggaccaggagatggagcagctgaaccaccacaccaccaccaggacccagatggagatgctgaccaaggacaaggctgacaaggatgagcagatcaggaagatcaagagccgccacagtgatgagctgaccagcctgctgggctacttccccaacaagaagcagctggaggactggctgcacagcaagagcaaggagatcaaccagacccgggaccggctggccaagctgaacaaggagctggccagcagcgagcagaacaagaaccacatcaacaatgagctgaagaggaaggaggagcagctgagcagctatgaggacaagctgtttgatgtgtgtggcagccaggactttgaaagtgacctggaccggctgaaggaggagattgagaagagcagcaagcagagggccatgctggccggggccacagctgtgtacagccagttcatcacccagctgacagatgagaaccagagctgctgccctgtgtgccagagggtcttccagacagaggccgagctgcaggaggtgatcagtgacctgcagagcaagctgcggctggccccagacaagctgaagagcacagaaagtgagctgaagaagaaggagaagagaagagatgagatgctgggcctggtgcccatgaggcagagcatcatcgacctgaaggagaaggagatccctgagctgaggaacaagctgcagaatgtgaacagagacatccagaggctgaagaatgacatcgaggagcaggagaccctgctgggcaccatcatgcctgaggaggagagcgccaaggtgtgcctgacagatgtgaccatcatggagcgcttccagatggagctgaaggatgtggagaggaagatcgcccagcaggccgccaagctgcagggcatcgacctggacagaacagtgcagcaggtgaaccaggagaagcaggagaagcagcacaagctggacacagtgagcagcaagattgagctgaacaggaagctgatccaggaccagcaggagcagatccagcacctgaagagcaccaccaatgagctgaagtctgagaagctgcagatcagcaccaacctgcagaggcggcagcagctggaggagcagacagtggagctgagcacagaggtgcagagcctgtaccgggagatcaaggatgccaaggagcaggtgagccccctggagaccaccctggagaagttccagcaggagaaggaggagctgatcaacaagaagaacaccagcaacaagatcgcccaggacaagctgaatgacatcaaggagaaggtgaagaacatccacggctacatgaaggacatcgagaactacatccaggacggcaaggatgactacaagaagcagaaggagacagagctgaacaaggtgattgcccagctgtctgaatgtgagaagcacaaggagaagatcaatgaagacatgaggctgatgaggcaggacatcgacacccagaagatccaggagcgctggctgcaggacaacctgaccctgaggaagagaaatgaggagctgaaggaggtggaggaggagaggaagcagcacctgaaggagatgggccagatgcaggtgctgcagatgaagtctgagcaccagaagctggaggagaacatcgacaacatcaagaggaaccacaacctggccctgggccggcagaagggctatgaggaggagatcatccacttcaagaaggagctgcgggagccccagttcagagatgctgaggagaagtaccgggagatgatgattgtgatgaggaccacagagctggtgaacaaggacctggacatctactacaagaccctggaccaggccatcatgaagttccacagcatgaagatggaggagatcaacaagatcatccgggacctgtggaggagcacctaccggggccaggacatcgagtacatcgagatccgcagtgatgctgatgaaaatgtgtctgccagtgacaagagaagaaactacaactacagagtggtgatgctgaagggggacacagccctggacatgaggggccgctgcagcgctggccagaaggtgctggccagcctcatcatccggctggccctggccgagaccttctgcctgaactgtggcatcatcgccctggatgagcccaccaccaacctggaccgggagaacatcgagagcctggcccacgccctggtggagatcatcaagagccgcagccagcagaggaacttccagctgctggtgatcacccatgatgaagattttgtggagctgctgggccgctcagaatatgtggagaagttctaccgcatcaagaagaacatcgaccagtgcagcgagatcgtgaagtgcagcgtgagcagcctgggcttcaacgtgcactag

SEQ ID NO: 158854 - DNA, 3522 bp, Artificial Sequence
  derived and/or modified sequence
atgatcagcagcctgggcgtgtccaaggctgtgctgaacaacgtcatcttctgccaccaggaggacagcaactggcccctgtctgagggcaaggccctgaagcagaagtttgatgagatcttcagcgccacccgctacatcaaggccctggagaccctgcggcaggtgcggcagacccagggccagaaggtgaaggagtaccagatggagctgaagtacctgaagcagtacaaggagaaggcctgtgagatccgggaccagatcaccagcaaggaggcccagctgaccagcagcaaggagatcgtgaagagctatgaaaatgagctggaccccctgaagaaccggctgaaggagattgagcacaacctgagcaagatcatgaagctggacaatgagatcaaggccctggacagcaggaagaagcagatggagaaggacaacagcgagctggaggagaagatggagaaggtgttccagggcacagatgagcagctgaatgacctgtaccacaaccaccagaggacagtgcgggagaaggagaggaagctggtggactgccaccgggagctggagaagctgaacaaggagagccggctgctgaaccaggagaagtctgagctgctggtggagcagggccgcctgcagctgcaggccgacagacaccaggagcacatccgggcccgggacagcctcatccagagcctggccacccagctggagctggatggctttgagcggggccccttcagcgagcggcagatcaagaacttccacaagctggtgcgggagcggcaggagggggaggccaagacagccaaccagctgatgaatgactttgctgagaaggagaccctgaagcagaagcagattgatgagatccgggacaagaagacaggcctgggccgcatcatcgagctgaagtctgagatcctgagcaagaagcagaatgagctgaagaatgtgaagtatgagctgcagcagctggagggcagcagtgaccgcatcctggagctggaccaggagctgatcaaggccgagcgggagctgagcaaggccgagaagaacagcaatgtggagaccctgaagatggaggtgatcagcctgcagaatgagaaggctgacctggacaggaccctgaggaagctggaccaggagatggagcagctgaaccaccacaccaccaccaggacccagatggagatgctgaccaaggacaaggctgacaaggatgagcagatcaggaagatcaagagccgccacagtgatgagctgaccagcctgctgggctacttccccaacaagaagcagctggaggactggctgcacagcaagagcaaggagatcaaccagacccgggaccggctggccaagctgaacaaggagctggccagcagcgagcagaacaagaaccacatcaacaatgagctgaagaggaaggaggagcagctgagcagctatgaggacaagctgtttgatgtgtgtggcagccaggactttgaaagtgacctggaccggctgaaggaggagattgagaagagcagcaagcagagggccatgctggccggggccacagctgtgtacagccagttcatcacccagctgacagatgagaaccagagctgctgccctgtgtgccagagggtcttccagacagaagctgagctgcaggaggtgatcagtgacctgcagagcaagctgcggctggccccagacaagctgaagagcacagagagcgagctgaagaagaaggagaagagaagagatgagatgctgggcctggtgcccatgaggcagagcatcatcgacctgaaggagaaggagatccctgagctgaggaacaagctgcagaatgtgaacagagacatccagaggctgaagaatgacatcgaggagcaggagaccctgctgggcaccatcatgcctgaggaggagagcgccaaggtgtgcctgacagatgtgaccatcatggagcgcttccagatggagctgaaggatgtggagaggaagatcgcccagcaggccgccaagctgcagggcatcgacctggacagaacagtgcagcaggtgaaccaggagaagcaggagaagcagcacaagctggacacagtgagcagcaagattgagctgaacaggaagctgatccaggaccagcaggagcagatccagcacctgaagagcaccaccaatgagctgaagtctgagaagctgcagatcagcaccaacctgcagaggcggcagcagctggaggagcagacagtggagctgagcacagaggtgcagagcctgtaccgggagatcaaggatgccaaggagcaggtgagccccctggagaccaccctggagaagttccagcaggagaaggaggagctgatcaacaagaagaacaccagcaacaagatcgcccaggacaagctgaatgacatcaaggagaaggtgaagaacatccacggctacatgaaggacatcgagaactacatccaggacggcaaggatgactacaagaagcagaaggagacagagctgaacaaggtgattgcccagctgtctgaatgtgagaagcacaaggagaagatcaatgaagacatgaggctgatgaggcaggacatcgacacccagaagatccaggagcgctggctgcaggacaacctgaccctgaggaagagaaatgaggagctgaaggaggtggaggaggagaggaagcagcacctgaaggagatgggccagatgcaggtgctgcagatgaagtctgagcaccagaagctggaggagaacatcgacaacatcaagaggaaccacaacctggccctgggccggcagaagggctatgaggaggagatcatccacttcaagaaggagctgcgggagccccagttcagagatgctgaggagaagtaccgggagatgatgattgtgatgaggaccacagagctggtgaacaaggacctggacatctactacaagaccctggaccaggccatcatgaagttccacagcatgaagatggaggagatcaacaagatcatccgggacctgtggaggagcacctaccggggccaggacatcgagtacatcgagatccgcagtgatgctgatgaaaatgtgtctgccagtgacaagagaagaaactacaactacagagtggtgatgctgaagggggacacagccctggacatgaggggccgctgcagcgctggccagaaggtgctggccagcctcatcatccggctggccctggccgagaccttctgcctgaactgtggcatcatcgccctggatgagcccaccaccaacctggacagagaaaatattgagagcctggcccacgccctggtggagatcatcaagagccgcagccagcagaggaacttccagctgctggtgatcacccatgatgaggactttgtggagctgctgggccgctcagaatatgtggagaagttctaccgcatcaagaagaacatcgaccagtgcagcgagatcgtgaagtgcagcgtgagcagcctgggcttcaacgtgcactag

SEQ ID NO: 158855 - DNA, 3939 bp, Artificial Sequence
  derived and/or modified sequence
atgagccggatcgagaagatgagcatcctgggcgtgcggagcttcggaatcgaggataaggacaagcaaatcataacattcttctctcctcttactatcctagtcggacccaacggggccgggaagactaccatcatagagtgcctgaaatatatatgcacaggcgactttccccccgggacaaaaggcaacacttttgtgcacgatcctaaagtcgcccaggaaacagacgtccgtgcacaaatccgactgcagttcagggacgtgaatggagagctcatcgcagtgcagcgttcaatggtatgcacccaaaagagcaagaagacagaatttaagaccttagaaggcgtgatcacgagaactaaacatggcgaaaaggtctctctgtcctccaaatgcgcggagattgatcgtgaaatgatttcctctctaggtgtatctaaggccgtgctgaataatgtgatattttgccaccaggaggactctaattggccgctgtccgagggaaaagcattaaagcagaaattcgacgagatcttttctgctacgcgttacattaaagccctcgaaaccctcaggcaggtgcgccaaacacaggggcagaaagtcaaggagtaccaaatggaacttaaatatctgaaacagtataaggaaaaggcttgtgaaattcgggaccagataacatccaaggaggcgcagttgactagcagcaaagagattgtgaaatcatacgaaaatgaactggatccgttgaagaaccggctgaaagagatcgaacataatctgtcaaaaattatgaaactcgacaatgaaatcaaggcgttagacagccgaaagaaacagatggagaaggacaactcagagcttgaggagaagatggagaaggtgttccaggggaccgatgagcagctgaatgacttgtaccataatcatcagagaaccgtacgcgagaaggagcgcaagctagtggattgccatcgtgagctggagaagctgaacaaggagtctcgcttgctgaatcaagagaagagtgagcttctggtggaacagggccggcttcaactacaggccgacagacaccaggagcatataagggcccgcgattcactgattcagagtctcgccacccagctggagctcgatgggtttgagaggggcccgttcagcgagcggcagattaaaaatttccacaaattggtccgtgaaagacaggagggagaagccaagaccgcaaaccagcttatgaatgatttcgctgaaaaagaaacactgaaacagaaacagatcgacgagatccgcgataaaaagacaggtttagggaggatcattgaactcaagtccgaaatactgagcaagaagcagaacgagctgaaaaatgtgaaatacgagttgcagcaactggagggcagcagcgaccggattctggagctggaccaggaactaatcaaagccgagagagaactcagtaaggccgagaagaacagcaatgtggagacactgaaaatggaggtcattagcctgcagaatgagaaggctgatctcgataggactttaagaaagttagaccaagaaatggaacagctaaaccatcacaccacaacaaggacccaaatggaaatgctgacgaaggataaagccgataaagatgaacaaattaggaaaatcaagtccaggcactctgatgagctcacctccctccttggctattttccgaacaaaaagcaactggaagactggctccattccaaaagcaaagaaattaaccagacacgcgacagactggccaaattgaacaaagaactagccagctccgagcagaacaagaatcacatcaataatgagctcaagcggaaagaggagcagctctcatcctacgaagacaaactgttcgacgtttgcggaagccaggattttgagtccgatctcgatcgtctgaaagaagagatcgagaagagttcaaaacagcgcgctatgttggctggagctaccgccgtgtactctcagttcattacacaactgacagatgagaatcagagctgttgccccgtttgccagcgcgtcttccagacggaagccgagctgcaggaggtgatttccgacttgcagagcaagctgcggttagcgccggataagctgaagtctaccgagtcagaactgaagaagaaggaaaagcgtcgagacgagatgttgggacttgtccctatgcgacagtccatcatcgacttgaaagaaaaagaaattccggaacttcggaataagctccagaatgtgaaccgggacatccagaggctaaagaacgacatcgaggaacaggaaactcttctgggtacaatcatgcccgaggaggaatctgccaaggtctgtctgacagacgtgaccatcatggaacgctttcaaatggaactcaaggacgtggagcgaaagatcgcgcagcaggccgcaaaattacagggcattgatttagaccgcacagtccagcaagtgaaccaggagaagcaagaaaagcagcataaactagataccgtatccagcaaaattgagctgaataggaagttgatccaagaccagcaagaacagatccagcacctgaaaagcacaacgaatgaactgaaaagtgagaagctgcaaatcagcacaaacctgcagcggaggcagcaattagaggagcagactgtcgagctgtcgacagaggtacagtcattataccgcgagatcaaagatgccaaggagcaggtgagtccactagagacaacactcgagaaatttcaacaggaaaaagaggaacttatcaacaagaagaacacctccaacaaaattgcccaagataagctgaacgatataaaggaaaaggtcaagaatatacacgggtatatgaaagacattgagaattatattcaggatggaaaggatgactacaaaaaacaaaaagagacagaactcaacaaagtaatagctcaactgtccgaatgtgagaagcacaaggaaaagataaatgaagacatgaggctaatgaggcaggatattgacacgcagaagattcaggagaggtggctgcaagataacctaactctgcggaagagaaacgaggaactcaaagaagtggaggaggagagaaaacagcacctgaaagagatgggtcagatgcaggtcctgcagatgaagagcgagcatcagaaattggaggaaaatatcgacaacattaaacgtaaccataatctggccctgggacggcagaagggctacgaagaggaaattattcactttaaaaaggaattgagggagccgcagttccgggacgcagaggaaaagtaccgcgaaatgatgatagtcatgaggacaacagagttggtgaacaaagacctcgatatatactataagaccctcgaccaggccataatgaagtttcattccatgaagatggaggagataaataaaatcattagagacttgtggcgttctacgtacagggggcaggacatcgagtatattgagattcgaagtgacgctgacgaaaacgtgagcgctagcgataagcgccgcaactataattatcgggtcgtcatgctgaaaggggacactgcccttgacatgcgcggacggtgcagtgcgggacagaaggtgcttgcctctttaatcatccggctggccttggccgagaccttctgcctaaattgtggcatcattgccttggacgagccaaccactaatctcgaccgagaaaatattgagtcattggcacacgcccttgttgagatcattaaatcacggtcacagcagcgcaactttcaactgctggtcatcacacacgacgaagacttcgttgagctattgggaaggtccgaatacgtggagaaattttaccggatcaaaaagaacatcgatcagtgtagcgagatcgtcaagtgttcagtatcttcccttggtttcaacgtgcactag

SEQ ID NO: 158856 - DNA, 3522 bp, Artificial Sequence
  derived and/or modified sequence
atgatcagcagcctgggcgtgagcaaggccgtgctgaacaacgtgatcttttgtcatcaggaggattcgaattggccgctgtccgaggggaaagcacttaagcagaagtttgacgagatattctcagccacacggtacattaaggctttagagactttgcgacaggttcgccagactcagggacaaaaagtcaaagaataccagatggagctgaagtacctgaagcagtataaagaaaaggcttgcgaaatccgggaccaaatcacgtcgaaggaggcccagcttacctcctctaaggagatcgttaagtcctacgagaacgaattggacccactaaagaaccgtttgaaggagattgaacacaacctgagtaaaatcatgaagctggataatgagattaaggctcttgattcaaggaaaaaacaaatggaaaaagacaactctgaactggaggaaaaaatggaaaaggtgtttcaggggacagacgaacagctgaacgacctataccataaccaccagcgcaccgtgcgtgaaaaggagcgcaaactcgtagactgccatagagagctcgaaaagttgaataaggaatcccgcctgctcaaccaggagaagtctgaactcttggtggaacagggtcggcttcaacttcaagcagaccgacatcaggagcacatccgagcccgcgacagcctaattcagagtctggcaactcaactggaactggatgggttcgagaggggccctttctctgagcgccagatcaaaaactttcacaagctggttcgtgagcgacaagagggcgaagcaaagaccgcaaaccagttgatgaacgacttcgccgagaaggaaacgctcaagcagaaacagatcgatgagatacgcgacaaaaaaacaggtctgggcagaattatagagctgaagagcgagattttgagtaagaagcagaacgaactcaaaaatgtgaagtacgagctgcaacagctagagggatccagtgatcggattctggaactggaccaggagctaatcaaggccgagcgtgagctgtccaaggccgaaaaaaattctaatgttgagaccctcaaaatggaggtgatcagcctgcagaacgaaaaagccgatttggaccgcactctgaggaaactcgatcaggaaatggagcaattgaaccatcacacaaccactcggactcagatggagatgctgactaaagacaaggccgacaaagatgaacagatccgcaagatcaagtcccgtcacagcgatgaattaacctccttactcggctacttccccaataaaaagcagttggaagactggcttcatagtaaatccaaagaaatcaaccagactagggatcgtctcgctaaactcaacaaagagttagcctcttctgaacaaaataagaaccacatcaataacgagctcaagcgtaaagaggagcagctgtcatcttacgaagataagctctttgacgtgtgcggatcgcaggacttcgagtcggacttggacaggctgaaagaagagatagagaagtcctccaagcagagggcgatgctggccggtgccactgcggtgtattcccaatttatcacacagcttactgacgagaatcaaagttgctgtcccgtgtgtcagagagtctttcagacagaagcagaattacaggaagttataagcgacttacagagcaaactgcgcctggcaccagataagctgaagtccacagagtccgaactgaaaaaaaaagaaaagagaagagatgagatgctgggtctagtgccaatgcgtcagtccatcatcgatctgaaggagaaggaaattcccgaactgaggaataaactgcagaatgtcaaccgcgatatccagcggctcaagaatgacatcgaggagcaggaaacactcttgggtacaataatgcccgaagaggagtccgccaaggtttgtctcactgacgtcaccataatggagcgctttcaaatggagctgaaggacgtggagcggaagatagctcagcaggcggccaaactgcagggaatcgaccttgacagaactgtgcagcaggtcaaccaggagaagcaggagaagcaacacaaattggacacagttagctctaagatcgagctgaaccgcaagcttattcaagatcagcaagagcaaattcagcacctgaagagcaccacaaatgaactgaaatctgagaagcttcagattagcactaacctgcagcggagacagcagctggaggagcaaactgttgagttgtctacagaggtgcaaagcctctatcgggagattaaggatgccaaggaacaagtatcgccacttgagaccaccctggaaaagttccagcaagaaaaggaggagctcattaataaaaaaaacacgagcaataagattgcccaagacaaactgaatgacattaaagagaaggttaagaatattcatggctatatgaaggacatcgagaactacatacaggatggaaaggatgattacaaaaagcaaaaggaaacagagctaaataaggtgatcgcgcagttatccgaatgtgaaaagcacaaagagaaaatcaatgaagacatgcgtctgatgagacaagacattgatacccaaaagatccaggagcggtggttacaggacaatctgacactacgaaaacggaacgaggaactgaaagaggtggaggaggagaggaagcagcacctgaaggagatggggcagatgcaggtattgcagatgaagtcagagcaccagaaattggaagaaaacattgataatatcaagcggaatcacaaccttgcgcttggcagacagaagggatatgaggaggagataatacactttaaaaaagagttgagagagccccagtttcgagatgcggaagaaaagtaccgagaaatgatgatcgtgatgagaaccaccgagctggtgaataaagacctcgacatttactataaaactctggatcaggccattatgaaatttcattctatgaaaatggaggaaatcaataagattatccgagatctttggcggagtacataccgtggacaggatatcgagtacatcgagattcgctctgatgctgatgaaaatgtgtccgcttccgataaacggcggaattataattacagggtggttatgctcaagggcgacactgcgctggacatgagagggaggtgcagcgctgggcaaaaagtgttagcctctttaatcatcagactcgcactggccgaaaccttctgccttaactgcggcattattgccctcgatgagcctacaactaatttggatagggagaacattgagagtctggcccacgcactcgtagaaataattaagtccaggagtcaacagagaaattttcagctgctggttatcacccacgatgaggattttgttgagttgctcggccggtcagagtacgtggaaaaattttatcgcatcaagaagaacatcgaccagtgtagtgagattgttaagtgttccgttagtagtctaggctttaacgtacactag

SEQ ID NO: 158857 - DNA, 3939 bp, Artificial Sequence
  derived and/or modified sequence
atgagcagaatagaaaaaatgtcaatcctgggagttagatctttcggaattgaggataaagacaaacagattatcacattttttagccctttgactatacttgtggggccaaatggggcaggaaagacaaccattatcgagtgtttgaagtatatctgtacaggggactttccaccgggaacgaagggaaatacctttgtgcatgaccctaaggtagcccaggagactgatgttcgagcgcaaattaggctgcagttcagagacgtcaacggagaactgattgctgtacagcgatccatggtgtgcacgcagaaaagcaagaagactgagttcaagacactggagggcgtaatcacacgaaccaaacatggggagaaggtgtccctgtcatccaaatgtgcagaaattgaccgtgaaatgatatcctcccttggagtttctaaagctgtgctcaacaacgtgatcttctgccatcaagaagactccaactggcccttgtctgaaggaaaagcccttaagcagaaattcgacgaaattttctcggccacgagatatatcaaggccttggaaaccctgcgccaggttcgccaaacccagggacagaaagtgaaggagtaccagatggaattaaagtatctgaagcaatacaaagagaaggcctgcgaaatcagggaccaaattactagtaaggaagctcaactgacatcctcaaaggaaatagtgaaaagctacgaaaatgaactggacccgttgaagaatcggctgaaggaaattgagcataatctgtcaaagattatgaaactggataacgagatcaaggctctagactcgagaaaaaagcagatggagaaagacaacagtgagctggaagaaaagatggaaaaagtcttccagggcactgatgagcagctcaacgacctctaccacaaccaccagaggactgttagagaaaaagaacggaaactggtcgattgtcatcgcgaactcgagaaactcaataaggagagccgactgcttaaccaggagaagtctgaactgctggtggaacagggacgattacaactgcaagccgacagacatcaagaacatatcagagccagggattctctcattcagagccttgccacgcaacttgaactggacgggttcgagcgaggaccattttccgagcggcagataaagaacttccataaattggtcagagaacggcaggagggggaagccaagaccgccaatcagttaatgaatgattttgccgaaaaggagaccttgaaacagaagcagattgatgaaatcagggacaaaaagactgggttgggccgaattattgagctcaagtcagagattctgtccaagaagcagaacgaactcaagaacgtgaaatatgagctgcagcagcttgagggtagcagcgaccggatactcgaactggaccaagaattgattaaagctgagcgggagctgagcaaagcagaaaagaatagtaacgtggaaaccttgaagatggaggtgatctccctgcagaacgaaaaggctgacttggataggactctgcgaaaactggaccaagagatggaacagctgaatcaccatacaaccactcgtacccagatggaaatgctgacgaaggataaggcagacaaagatgaacagatccggaaaattaagagccgccacagtgatgagcttacttctctgctgggctattttccgaataagaaacagctcgaagattggctgcactctaaatccaaagagataaaccagacacgcgacagactggctaagctcaataaggagctggcttcatccgaacagaataagaatcatatcaacaatgagctgaagcgtaaggaagaacagttatctagctacgaagataaactgttcgatgtctgtggttcacaggacttcgaatctgacttggatcgcctgaaggaagagatcgagaagtcctctaagcagcgcgcaatgctggccggagcaactgctgtttattctcagtttattacccaattgactgacgagaatcagtcatgttgtcccgtttgccagagggtttttcaaacagaggccgaacttcaagaggtgataagcgatttacaatccaagctgaggctggcacctgataagctgaaatctactgaatccgaactgaaaaagaaggaaaaaaggcgggacgagatgttaggcctcgtgcccatgcgccaatctattatcgacctcaaggagaaagagatacccgagctcagaaacaaactgcaaaacgtgaatagggacattcagcggttgaagaacgatattgaggagcaggaaacgctgctggggaccatcatgcctgaagaagagtcagcaaaagtgtgcctaaccgatgttaccataatggagaggtttcagatggaactgaaggatgttgagcggaagattgcccagcaagcagccaaactccagggaatcgacctggaccggacagtccagcaagtcaaccaggagaaacaggaaaagcagcacaaattggacacagtgtccagcaagattgagctgaatagaaaactgatccaagatcagcaggagcagatccagcatctgaagagcacaaccaacgagcttaagagtgagaagcttcagatctcaactaatttacaaagaagacagcagcttgaagaacaaactgtagagctgtccaccgaggtgcagagcctgtacagagagataaaggacgcaaaggagcaggtctctccccttgaaaccacgctggagaaattccaacaggagaaggaagaacttatcaacaagaagaatacctcaaacaagatcgctcaagacaaactgaacgacataaaggaaaaagtcaagaatattcatggatacatgaaggacatcgaaaactacattcaggacgggaaggacgactataaaaagcagaaggagacagaactaaacaaggtcatcgctcaactctccgaatgtgagaaacacaaggaaaaaatcaatgaagacatgcgcttaatgcgtcaggacattgacacacaaaagattcaggagcgctggcttcaagacaacctgacattgaggaagagaaacgaggagctgaaggaggtggaggaggaacggaagcaacacctgaaagagatgggacagatgcaggtcctgcagatgaagagtgagcaccaaaaacttgaggagaatatagataacatcaagagaaaccacaacctcgcacttggacgacagaagggctatgaggaagaaatcatacatttcaagaaggagctgcgcgaaccccagttccgggatgccgaggaaaagtatagagagatgatgatcgtcatgcgcaccactgaactggtgaacaaggacctcgatatttattataaaacacttgatcaagctataatgaaattccattcaatgaaaatggaggagataaacaagattatccgtgatttatggagatccacttaccggggacaggatatagaatacattgaaatccgaagtgatgcggacgagaatgttagcgcgagcgacaagaggaggaattacaactatcgcgtggttatgcttaaaggcgatacagccttggatatgagagggcgttgtagcgcagggcagaaagtccttgcttctcttataataagactggccttagctgaaactttttgcctaaattgcggcataattgccttagatgagcctacaacaaatttagatcgtgaaaacattgaaagccttgcccacgccctagttgagatcatcaagtcacggtctcaacagaggaattttcagttgctggtgattacacacgacgaagacttcgtggagcttctcgggcgttcagagtacgtggagaaattttaccgaatcaaaaaaaatatcgaccagtgctctgaaatcgtaaagtgttcagtttcttcactcgggtttaatgtgcactag

SEQ ID NO: 158858 - DNA, 3522 bp, Artificial Sequence
  derived and/or modified sequence
atgatctcaagcctcggagtctccaaggcggtccttaataacgttatcttctgtcaccaggaagactctaattggccattgtccgagggcaaggccttgaaacagaagttcgatgagattttctcggccaccaggtatatcaaagccttagaaacattaaggcaggtgcggcagacacaggggcagaaggtgaaggaataccagatggaacttaagtatcttaaacagtacaaggaaaaagcctgtgaaataagagaccagattactagtaaggaggcccaattgacctctagtaaggaaatcgttaaatcatacgaaaatgagctggatccactgaaaaatcggttaaaggagattgaacacaacctaagcaagatcatgaagctggataatgagattaaagcgcttgactcacgcaaaaagcagatggaaaaggataatagtgagttggaagagaagatggagaaagtgtttcaggggaccgacgaacagctgaatgatctgtatcataaccatcaacgtacggtgcgggagaaagaacgaaaattggtagactgccatagggagctggaaaaattaaataaagaaagtcgtttactcaaccaggaaaagtctgaactcttggttgaacagggaaggctccagttgcaagccgaccggcatcaggaacatattcgcgcaagagacagtctgatccagagcctggctacacaactcgaactggatggattcgaaagagggccattctctgagaggcagatcaagaactttcacaaattggtgcgcgagagacaagagggtgaggccaagacagcaaatcagcttatgaacgacttcgctgagaaggaaaccctcaaacagaaacagatcgacgagattagggacaagaagaccggattggggagaattatcgagttaaaaagcgagatactcagtaagaagcagaatgaactgaagaacgtcaaatatgaactccagcagctcgaaggcagtagcgacaggatattggaactggatcaggaactcattaaagccgagagggagctttccaaggctgaaaaaaattccaacgtggagaccctcaagatggaagtgatctccctgcagaatgaaaaggccgatttggatagaacattgagaaaactggaccaggagatggagcagttgaaccatcacaccacaacccgtacacagatggagatgctaaccaaggacaaagcggataaagatgagcagataaggaagataaaatcgcgtcattctgatgagttgacctctttactaggctacttccccaacaaaaagcagcttgaagactggctacattccaaatccaaggagattaaccagactcgagacagattagccaaattgaataaggaactcgcctccagtgaacaaaacaaaaaccacattaacaatgagctcaaaagaaaggaggaacaactaagtagctacgaggataaattatttgatgtctgcgggtcccaggacttcgagagcgatctggacagactgaaggaagagatagagaagtcttccaagcagcgcgcaatgctcgccggagccacagctgtatacagccagttcatcacgcagctcactgacgagaaccaatcttgctgtcctgtgtgtcagagggtgtttcagacggaggctgaattacaggaggttatttccgatctccagtccaagttacggctggcaccggacaaattaaaaagtacagagtctgaactcaagaagaaagaaaaacgtcgggatgagatgcttggtcttgtgcccatgaggcagagcattatcgatctgaaagaaaaagagatccccgagttgcgaaacaagctgcagaacgtcaatagagacatccagcgactcaagaatgatatcgaggaacaggagacgctcctgggcacaatcatgcccgaggaagaaagcgccaaggtatgcctcacagacgtaaccattatggagcgatttcagatggaattgaaggacgtggaacgcaaaatcgcccaacaagctgctaagctccagggaatcgatttagatagaactgttcagcaggtgaaccaggaaaagcaggaaaagcagcacaagctggacacggtgtcttcaaagattgagcttaacagaaagctgatccaggatcagcaggagcaaatccagcacctgaagtctaccaccaacgaactgaagtccgagaagctgcagatcagtaccaatctccagaggcgccaacagctggaggaacaaactgtggaactgtccacagaggtccaatcattgtacagagagattaaggacgccaaggaacaggtaagtcccctggagaccaccctggaaaaattccagcaggagaaagaggagctgattaataagaagaacacgtctaataaaattgcacaggataagttgaatgatataaaggagaaggttaagaacatccatgggtacatgaaggacattgaaaactatattcaggacggtaaggacgattacaaaaagcaaaaggagactgagctgaataaggtgatcgcccagctgagcgagtgcgaaaaacataaagagaagattaacgaagacatgagactcatgcgacaggatattgatacgcagaagatccaggaacggtggctgcaggacaacctcacactgcgcaagaggaacgaagaacttaaagaggtagaagaagagcggaaacagcaccttaaagagatgggccaaatgcaagtcctccagatgaagtctgagcatcagaagctagaggagaacattgataacattaagcggaatcacaaccttgctctggggagacagaagggatacgaagaagagatcatccatttcaagaaggagttgcgggagccacagttcagggatgctgaggagaagtacagagagatgatgatcgtcatgagaacgacagaactggtgaataaagatctcgacatctactataagacgttagatcaggccattatgaaatttcactccatgaaaatggaggagatcaacaagatcatccgcgatctctggagatcaacctacaggggacaggatattgagtatatcgaaatccgttccgacgctgatgagaacgttagcgcctcagacaagcgcagaaactataattatagggttgtcatgctaaaaggtgatacggcactggacatgaggggccgatgttcggcaggacagaaagttctggcctctctcattattcgcctcgccctggctgaaaccttctgcctgaattgtggtatcattgcattagacgaacccacaaccaatctggaccgtgagaacatcgagtccctcgcccatgctctggtggagatcataaagtcgcgtagccagcagcggaactttcagctgctggttattactcacgacgaagacttcgtagagcttctggggcgatccgagtatgtggagaagttctatcgcatcaaaaagaatatagaccagtgctccgagatcgtcaaatgttctgtctcctcacttgggttcaatgtgcactag

SEQ ID NO: 158859 - DNA, 6022 bp, Artificial Sequence
  derived and/or modified sequence
ccaggagagcggcgtggacgcgtgcgggcctagaggcccacgtgatccgcagggcggccgaggcaggaagctgtgagtgcgcggttgcggggtcgcattgtggctacggctttgcgtccccggcgggcagccccaggctggtccccgcctccgctctccccaccggcggggaaagcagctggtgtgggaggaaaggctccatcccccgccccctctctcccgctgttggctggcaggatcttttggcagtcctgtggcctcgctccccgcccggatcctcctgaccctgagattcgcgggtctcacgtcccgtgcacgccttgcttcggcctcagttaagcctttgtgggctccaggtccctggtgagattagaaacgtttgcaaacatgtcccggatcgaaaagatgagcattctgggcgtgcggagttttggaatagaggacaaagataagcaaattatcactttcttcagcccccttacaattttggttggacccaatggggcgggaaagacgaccatcattgaatgtctaaaatatatttgtactggagatttccctcctggaaccaaaggaaatacatttgtacacgatcccaaggttgctcaagaaacagatgtgagagcccagattcgtctgcaatttcgtgatgtcaatggagaacttatagctgtgcaaagatctatggtgtgtactcagaaaagcaaaaagacagaatttaaaactctggaaggagtcattactagaacaaagcatggtgaaaaggtcagtctgagctctaagtgtgcagaaattgaccgagaaatgatcagttctcttggggtttccaaggctgtgctaaataatgtcattttctgtcatcaagaagattctaattggcctttaagtgaaggaaaggctttgaagcaaaagtttgatgagattttttcagcaacaagatacattaaagccttagaaacacttcggcaggtacgtcagacacaaggtcagaaagtaaaagaatatcaaatggaactaaaatatctgaagcaatataaggaaaaagcttgtgagattcgtgatcagattacaagtaaggaagcccagttaacatcttcaaaggaaattgtcaaatcctatgagaatgaacttgatccattgaagaatcgtctaaaagaaattgaacataatctctctaaaataatgaaacttgacaatgaaattaaagccttggatagccgaaagaagcaaatggagaaagataatagtgaactggaagagaaaatggaaaaggtttttcaagggactgatgagcaactaaatgacttatatcacaatcaccagagaacagtaagggagaaagaaaggaaattggtagactgtcatcgtgaactggaaaaactaaataaagaatctaggcttctcaatcaggaaaaatcagaactgcttgttgaacagggtcgtctacagctgcaagcagatcgccatcaagaacatatccgagctagagattcattaattcagtctttggcaacacagctagaattggatggctttgagcgtggaccattcagtgaaagacagattaaaaattttcacaaacttgtgagagagagacaagaaggggaagcaaaaactgccaaccaactgatgaatgactttgcagaaaaagagactctgaaacaaaaacagatagatgagataagagataagaaaactggactgggaagaataattgagttaaaatcagaaatcctaagtaagaagcagaatgagctgaaaaatgtgaagtatgaattacagcagttggaaggatcttcagacaggattcttgaactggaccaggagctcataaaagctgaacgtgagttaagcaaggctgagaaaaacagcaatgtagaaaccttaaaaatggaagtaataagtctccaaaatgaaaaagcagacttagacaggaccctgcgtaaacttgaccaggagatggagcagttaaaccatcatacaacaacacgtacccaaatggagatgctgaccaaagacaaagctgacaaagatgaacaaatcagaaaaataaaatctaggcacagtgatgaattaacctcactgttgggatattttcccaacaaaaaacagcttgaagactggctacatagtaaatcaaaagaaattaatcagaccagggacagacttgccaaattgaacaaggaactagcttcatctgagcagaataaaaatcatataaataatgaactaaaaagaaaggaagagcagttgtccagttacgaagacaagctgtttgatgtttgtggtagccaggattttgaaagtgatttagacaggcttaaagaggaaattgaaaaatcatcaaaacagcgagccatgctggctggagccacagcagtttactcccagttcattactcagctaacagacgaaaaccagtcatgttgccccgtttgtcagagagtttttcagacagaggctgagttacaagaagtcatcagtgatttgcagtctaaactgcgacttgctccagataaactcaagtcaacagaatcagagctaaaaaaaaaggaaaagcggcgtgatgaaatgctgggacttgtgcccatgaggcaaagcataattgatttgaaggagaaggaaataccagaattaagaaacaaactgcagaatgtcaatagagacatacagcgcctaaagaacgacatagaagaacaagaaacactcttgggtacaataatgcctgaagaagaaagtgccaaagtatgcctgacagatgttacaattatggagaggttccagatggaacttaaagatgttgaaagaaaaattgcacaacaagcagctaagctacaaggaatagacttagatcgaactgtccaacaagtcaaccaggagaaacaagagaaacagcacaagttagacacagtttctagtaagattgaattgaatcgtaagcttatacaggaccagcaggaacagattcaacatctaaaaagtacaacaaatgagctaaaatctgagaaacttcagatatccactaatttgcaacgtcgtcagcaactggaggagcagactgtggaattatccactgaagttcagtctttgtacagagagataaaggatgctaaagagcaggtaagccctttggaaacaacattggaaaagttccagcaagaaaaagaagaattaatcaacaaaaaaaatacaagcaacaaaatagcacaggataaactgaatgatattaaagagaaggttaaaaatattcatggctatatgaaagacattgagaattatattcaagatgggaaagacgactataagaagcaaaaagaaactgaacttaataaagtaatagctcaactaagtgaatgcgagaaacacaaagaaaagataaatgaagatatgagactcatgagacaagatattgatacacagaagatacaagaaaggtggctacaagataaccttactttaagaaaaagaaatgaggaactaaaagaagttgaagaagaaagaaaacaacatttgaaggaaatgggtcaaatgcaggttttgcaaatgaaaagtgaacatcagaagttggaagagaacatagacaatataaaaagaaatcataatttggcattagggcgacagaaaggttatgaagaagaaattattcattttaagaaagaacttcgagaaccacaatttcgggatgctgaggaaaagtatagagaaatgatgattgttatgaggacaacagaacttgtgaacaaggatctggatatttattataagactcttgaccaagcaataatgaaatttcacagtatgaaaatggaagaaatcaataaaattatacgtgacctgtggcgaagtacctatcgtggacaagatattgaatacatagaaatacggtctgatgccgatgaaaatgtatcagcttctgataaaaggcggaattataactaccgagtggtgatgctgaagggagacacagccttggatatgcgaggacgatgcagtgctggacaaaaggtattagcctcactcatcattcgcctggccctggctgaaacgttctgcctcaactgtggcatcattgccttggatgagccaacaacaaatcttgaccgagaaaacattgaatctcttgcacatgctctggttgagataataaaaagtcgctcacagcagcgtaacttccagcttctggtaatcactcatgatgaagattttgtggagcttttaggacgttctgaatatgtggagaaattctacaggattaaaaagaacatcgatcagtgctcagagattgtgaaatgcagtgttagctccctgggattcaatgttcattaaaaatatccaagatttaaatgccatagaaatgtaggtcctcagaaagtgtataataagaaacttatttctcatatcaacttagtcaataagaaaatatattctttcaaaggaacattgtgtctaggattttggatgttgagaggttctaaaatcatgaaacttgtttcactgaaaattggacagattgcctgtttctgatttgctgctcttcatcccattccaggcagcctctgtcaggccttcagggttcagcagtacagccgagactcgactctgtgcctccctccccagtgcaaatgcatgcttcttctcaaagcactgttgagaaggagataattactgccttgaaaatttatggttttggtatttttttaaatcatagttaaatgttacctctgaatttacttccttgcatgtggtttgaaaaactgagtattaatatctgaggatgaccagaaatggtgagatgtatgtttggctctgcttttaactttataaatccagtgacctctctctctgggacttggtttccccaactaaaatttgaagtagttgaatggggtctcaaagtttgacaggaaccttaagtaatcatctaagtcagtacccaccaccttcttctcctacatatcccttccagatggtcatccagactcagagctctctctacagagaggaaattctccactgtgcacacccacctttggaaagctctgaccacttgaggcctgatctgcccatcgtgaagaagcctgtaacactcctctgcgtctatcctgtgtagcatactggcttcaccatcaatcctgattcctctctaagtgggcattgccatgtggaaggcaagccaggctcactcacagagtcaaggcctgctccctgtagggtccaaccagacctggaagaacaggcctctccatttgctcttcagatgccacttctaagaaaagcctaatcacagtttttcctggaattgccagctgacatcttgaatccttccattccacacagaatgcaaccaagtcacacgcttttgaattatgctttgtagagttttgtcattcagagtcagccaggaccataccgggtcttgattcagtcacatggcatggttttgtgccatctgtagctataatgagcatgtttgcctagacagcttttctcaactgggtccagaagagaattaagccctaaggtcctaaggcatctatctgtgctaggttaaatggttggcccccaaagatagacaggtcctgatttctagaacccgtgactgttactttatacagcaaaggaaactttgcagatgtgattaaagctaaggaccttaagacagagtatcctgggggtggtggtggggtgggggggggtcctaaatgtaatcacgagtaagattaagagcaaatcaattctagtcatatattaaacatccacaataaccaagatatttttatcccaagaatgcaagatttcagaaaatgaaaaatctgttgataaatccatcactataataaaaccgaaggtgaaaaaaattctgaaaaaattctagcagctatatttgataaaattcaacatctcctagctttagcaaactcacagttttgcaaataatattttcttaatgttatctgttgctaaatcaaaattaaacagtcatcttaactgcaaaataaaacatttctcagtaaatattaaa

SEQ ID NO: 158860 - DNA, 6597 bp, Artificial Sequence
  derived and/or modified sequence
tttcccggcgtgccccaggagagcggcgtggacgcgtgcgggcctagaggcccacgtgatccgcagggcggccgaggcaggaagctgtgagtgcgcggttgcggggtcgcattgtggctacggctttgcgtccccggcgggcagccccaggctggtccccgcctccgctctccccaccggcggggaaagcagctggtgtgggaggaaaggctccatcccccgccccctctctcccgctgttggctggcaggatcttttggcagtcctgtggcctcgctccccgcccggatcctcctgaccctgagattcgcgggtctcacgtcccgtgcacgccttgcttcggcctcagttaagcctttgtgggctccaggtccctggtgagattagaaacgtttgcaaacatgtcccggatcgaaaagatgagcattctgggcgtgcggagttttggaatagaggacaaagataagcaaattatcactttcttcagcccccttacaattttggttggacccaatggggcgggaaagacgaccatcattgaatgtctaaaatatatttgtactggagatttccctcctggaaccaaaggaaatacatttgtacacgatcccaaggttgctcaagaaacagatgtgagagcccagattcgtctgcaatttcgtgatgtcaatggagaacttatagctgtgcaaagatctatggtgtgtactcagaaaagcaaaaagacagaatttaaaactctggaaggagtcattactagaacaaagcatggtgaaaaggtcagtctgagctctaagtgtgcagaaattgaccgagaaatgatcagttctcttggggtttccaaggctgtgctaaataatgtcattttctgtcatcaagaagattctaattggcctttaagtgaaggaaaggctttgaagcaaaagtttgatgagattttttcagcaacaagatacattaaagccttagaaacacttcggcaggtacgtcagacacaaggtcagaaagtaaaagaatatcaaatggaactaaaatatctgaagcaatataaggaaaaagcttgtgagattcgtgatcagattacaagtaaggaagcccagttaacatcttcaaaggaaattgtcaaatcctatgagaatgaacttgatccattgaagaatcgtctaaaagaaattgaacataatctctctaaaataatgaaacttgacaatgaaattaaagccttggatagccgaaagaagcaaatggagaaagataatagtgaactggaagagaaaatggaaaaggtttttcaagggactgatgagcaactaaatgacttatatcacaatcaccagagaacagtaagggagaaagaaaggaaattggtagactgtcatcgtgaactggaaaaactaaataaagaatctaggcttctcaatcaggaaaaatcagaactgcttgttgaacagggtcgtctacagctgcaagcagatcgccatcaagaacatatccgagctagagattcattaattcagtctttggcaacacagctagaattggatggctttgagcgtggaccattcagtgaaagacagattaaaaattttcacaaacttgtgagagagagacaagaaggggaagcaaaaactgccaaccaactgatgaatgactttgcagaaaaagagactctgaaacaaaaacagatagatgagataagagataagaaaactggactgggaagaataattgagttaaaatcagaaatcctaagtaagaagcagaatgagctgaaaaatgtgaagtatgaattacagcagttggaaggatcttcagacaggattcttgaactggaccaggagctcataaaagctgaacgtgagttaagcaaggctgagaaaaacagcaatgtagaaaccttaaaaatggaagtaataagtctccaaaatgaaaaagcagacttagacaggaccctgcgtaaacttgaccaggagatggagcagttaaaccatcatacaacaacacgtacccaaatggagatgctgaccaaagacaaagctgacaaagatgaacaaatcagaaaaataaaatctaggcacagtgatgaattaacctcactgttgggatattttcccaacaaaaaacagcttgaagactggctacatagtaaatcaaaagaaattaatcagaccagggacagacttgccaaattgaacaaggaactagcttcatctgagcagaataaaaatcatataaataatgaactaaaaagaaaggaagagcagttgtccagttacgaagacaagctgtttgatgtttgtggtagccaggattttgaaagtgatttagacaggcttaaagaggaaattgaaaaatcatcaaaacagcgagccatgctggctggagccacagcagtttactcccagttcattactcagctaacagacgaaaaccagtcatgttgccccgtttgtcagagagtttttcagacagaggctgagttacaagaagtcatcagtgatttgcagtctaaactgcgacttgctccagataaactcaagtcaacagaatcagagctaaaaaaaaaggaaaagcggcgtgatgaaatgctgggacttgtgcccatgaggcaaagcataattgatttgaaggagaaggaaataccagaattaagaaacaaactgcagaatgtcaatagagacatacagcgcctaaagaacgacatagaagaacaagaaacactcttgggtacaataatgcctgaagaagaaagtgccaaagtatgcctgacagatgttacaattatggagaggttccagatggaacttaaagatgttgaaagaaaaattgcacaacaagcagctaagctacaaggaatagacttagatcgaactgtccaacaagtcaaccaggagaaacaagagaaacagcacaagttagacacagtttctagtaagattgaattgaatcgtaagcttatacaggaccagcaggaacagattcaacatctaaaaagtacaacaaatgagctaaaatctgagaaacttcagatatccactaatttgcaacgtcgtcagcaactggaggagcagactgtggaattatccactgaagttcagtctttgtacagagagataaaggatgctaaagagcaggtaagccctttggaaacaacattggaaaagttccagcaagaaaaagaagaattaatcaacaaaaaaaatacaagcaacaaaatagcacaggataaactgaatgatattaaagagaaggttaaaaatattcatggctatatgaaagacattgagaattatattcaagatgggaaagacgactataagaagcaaaaagaaactgaacttaataaagtaatagctcaactaagtgaatgcgagaaacacaaagaaaagataaatgaagatatgagactcatgagacaagatattgatacacagaagatacaagaaaggtggctacaagataaccttactttaagaaaaagaaatgaggaactaaaagaagttgaagaagaaagaaaacaacatttgaaggaaatgggtcaaatgcaggttttgcaaatgaaaagtgaacatcagaagttggaagagaacatagacaatataaaaagaaatcataatttggcattagggcgacagaaaggttatgaagaagaaattattcattttaagaaagaacttcgagaaccacaatttcgggatgctgaggaaaagtatagagaaatgatgattgttatgaggacaacagaacttgtgaacaaggatctggatatttattataagactcttgaccaagcaataatgaaatttcacagtatgaaaatggaagaaatcaataaaattatacgtgacctgtggcgaagtacctatcgtggacaagatattgaatacatagaaatacggtctgatgccgatgaaaatgtatcagcttctgataaaaggcggaattataactaccgagtggtgatgctgaagggagacacagccttggatatgcgaggacgatgcagtgctggacaaaaggtattagcctcactcatcattcgcctggccctggctgaaacgttctgcctcaactgtggcatcattgccttggatgagccaacaacaaatcttgaccgagaaaacattgaatctcttgcacatgctctggttgagataataaaaagtcgctcacagcagcgtaacttccagcttctggtaatcactcatgatgaagattttgtggagcttttaggacgttctgaatatgtggagaaattctacaggattaaaaagaacatcgatcagtgctcagagattgtgaaatgcagtgttagctccctgggattcaatgttcattaaaaatatccaagatttaaatgccatagaaatgtaggtcctcagaaagtgtataataagaaacttatttctcatatcaacttagtcaataagaaaatatattctttcaaaggaacattgtgtctaggattttggatgttgagaggttctaaaatcatgaaacttgtttcactgaaaattggacagattgcctgtttctgatttgctgctcttcatcccattccaggcagcctctgtcaggccttcagggttcagcagtacagccgagactcgactctgtgcctccctccccagtgcaaatgcatgcttcttctcaaagcactgttgagaaggagataattactgccttgaaaatttatggttttggtatttttttaaatcatagttaaatgttacctctgaatttacttccttgcatgtggtttgaaaaactgagtattaatatctgaggatgaccagaaatggtgagatgtatgtttggctctgcttttaactttataaatccagtgacctctctctctgggacttggtttccccaactaaaatttgaagtagttgaatggggtctcaaagtttgacaggaaccttaagtaatcatctaagtcagtacccaccaccttcttctcctacatatcccttccagatggtcatccagactcagagctctctctacagagaggaaattctccactgtgcacacccacctttggaaagctctgaccacttgaggcctgatctgcccatcgtgaagaagcctgtaacactcctctgcgtctatcctgtgtagcatactggcttcaccatcaatcctgattcctctctaagtgggcattgccatgtggaaggcaagccaggctcactcacagagtcaaggcctgctccctgtagggtccaaccagacctggaagaacaggcctctccatttgctcttcagatgccacttctaagaaaagcctaatcacagtttttcctggaattgccagctgacatcttgaatccttccattccacacagaatgcaaccaagtcacacgcttttgaattatgctttgtagagttttgtcattcagagtcagccaggaccataccgggtcttgattcagtcacatggcatggttttgtgccatctgtagctataatgagcatgtttgcctagacagcttttctcaactgggtccagaagagaattaagccctaaggtcctaaggcatctatctgtgctaggttaaatggttggcccccaaagatagacaggtcctgatttctagaacccgtgactgttactttatacagcaaaggaaactttgcagatgtgattaaagctaaggaccttaagacagagtatcctgggggtggtggtggggtgggggggggtcctaaatgtaatcacgagtaagattaagagcaaatcaattctagtcatatattaaacatccacaataaccaagatatttttatcccaagaatgcaagatttcagaaaatgaaaaatctgttgataaatccatcactataataaaaccgaaggtgaaaaaaattctgaaaaaattctagcagctatatttgataaaattcaacatctcctagctttagcaaactcacagttttgcaaataatattttcttaatgttatctgttgctaaatcaaaattaaacagtcatcttaactgcaaaataaaacatttctcagtaaatattaaagccagttaccttctatcaacatgttaatgaaagtgctagttgttgcagcaaagaataacaaaggcaatacacgatcaatataggcagtgaaacaaaagtatcatttgcaagttaaaacagacttcccaattttaaatctggtttccccctgaatatgtggcatccttggcagcacttctgagagtggctgctttcattccaagaagcccatgggtttggaggtgggataggtgcctttctggcttctcattgctgcttctagatcagtctccaaatatcccccttccccacattggaatgaatagccatcacagcatggatggaggttagaatgagccagactgcctgggctcaaatcctagcacaccactcactagctggggaccttgagcaagttatttgtcctgttttctgtttccttatatgtaaaagtgggtaaaatggtacatattttgtagggttgttatgaagattgaatgacattatttacaaactgcttagaactgcttgccacctactaaatactgtgtaagtgttcaagaaaaagctgtcttcatttca

SEQ ID NO: 158861 - protein, 890 aa, Artificial Sequence
  derived and/or modified sequence
MSQGILSPPAGLLSDDDVVVSPMFESTAADLGSVVRKNLLSDCSVVSTSLEDKQQVPSEDSMEKVKVYLRVRPLLPSELERQEDQGCVRIENVETLVLQAPKDSFALKSNERGIGQATHRFTFSQIFGPEVGQASFFNLTVKEMVKDVLKGQNWLIYTYGVTNSGKTHTIQGTIKDGGILPRSLALIFNSLQGQLHPTPDLKPLLSNEVIWLDSKQIRQEEMKKLSLLNGGLQEEELSTSLKRSVYIESRIGTSTSFDSGIAGLSSISQCTSSSQLDETSHRWAQPDTAPLPVPANIRFSIWISFFEIYNELLYDLLEPPSQQRKRQTLRLCEDQNGNPYVKDLNWIHVQDAEEAWKLLKVGRKNQSFASTHLNQNSSRSHSIFSIRILHLQGEGDIVPKISELSLCDLAGSERCKDQKSGERLKEAGNINTSLHTLGRCIAALRQNQQNRSKQNLVPFRDSKLTRVFQGFFTGRGRSCMIVNVNPCASTYDETLHVAKFSAIASQLVHAPPMQLGFPSLHSFIKEHSLQVSPSLEKGAKADTGLDDDIENEADISMYGKEELLQVVEAMKTLLLKERQEKLQLEMHLRDEICNEMVEQMQQREQWCSEHLDTQKELLEEMYEEKLNILKESLTSFYQEEIQERDEKIEELEALLQEARQQSVAHQQSGSELALRRSQRLAASASTQQLQEVKAKLQQCKAELNSTTEELHKYQKMLEPPPSAKPFTIDVDKKLEEGQKNIRLLRTELQKLGESLQSAERACCHSTGAGKLRQALTTCDDILIKQDQTLAELQNNMVLVKLDLRKKAACIAEQYHTVLKLQGQVSAKKRLGTNQENQQPNQQPPGKKPFLRNLLPRTPTCQSSTDCSPYARILRSRRSPLLKSGPFGKKY

SEQ ID NO: 158862 - protein, 225 aa, Artificial Sequence
  derived and/or modified sequence
MSQGILSPPAGLLSDDDVVVSPMFESTAADLGSVVRKNLLSDCSVVSTSLEDKQQVPSEDSMEKVKVYLRVRPLLPSELERQEDQGCVRIENVETLVLQAPKDSFALKSNERGIGQATHRFTFSQIFGPEVGQASFFNLTVKEMVKDVLKGQNWLIYTYGVTNSGKTHTIQGTIKDGGILPRSLALIFNSLQGQLHPTPDLKPLLSNEVIWLDSKQIRQEEMKKL

SEQ ID NO: 158863 - protein, 872 aa, Artificial Sequence
  derived and/or modified sequence
MSQGILSPPAGLLSDDDVVVSPMFESTAADLGSVVRKNLLSDCSVVSTSLEDKQQVPSEDSMEKEDQGCVRIENVETLVLQAPKDSFALKSNERGIGQATHRFTFSQIFGPEVGQASFFNLTVKEMVKDVLKGQNWLIYTYGVTNSGKTHTIQGTIKDGGILPRSLALIFNSLQGQLHPTPDLKPLLSNEVIWLDSKQIRQEEMKKLSLLNGGLQEEELSTSLKRSVYIESRIGTSTSFDSGIAGLSSISQCTSSSQLDETSHRWAQPDTAPLPVPANIRFSIWISFFEIYNELLYDLLEPPSQQRKRQTLRLCEDQNGNPYVKDLNWIHVQDAEEAWKLLKVGRKNQSFASTHLNQNSSRSHSIFSIRILHLQGEGDIVPKISELSLCDLAGSERCKDQKSGERLKEAGNINTSLHTLGRCIAALRQNQQNRSKQNLVPFRDSKLTRVFQGFFTGRGRSCMIVNVNPCASTYDETLHVAKFSAIASQLVHAPPMQLGFPSLHSFIKEHSLQVSPSLEKGAKADTGLDDDIENEADISMYGKEELLQVVEAMKTLLLKERQEKLQLEMHLRDEICNEMVEQMQQREQWCSEHLDTQKELLEEMYEEKLNILKESLTSFYQEEIQERDEKIEELEALLQEARQQSVAHQQSGSELALRRSQRLAASASTQQLQEVKAKLQQCKAELNSTTEELHKYQKMLEPPPSAKPFTIDVDKKLEEGQKNIRLLRTELQKLGESLQSAERACCHSTGAGKLRQALTTCDDILIKQDQTLAELQNNMVLVKLDLRKKAACIAEQYHTVLKLQGQVSAKKRLGTNQENQQPNQQPPGKKPFLRNLLPRTPTCQSSTDCSPYARILRSRRSPLLKSGPFGKKY

SEQ ID NO: 158864 - protein, 159 aa, Artificial Sequence
  derived and/or modified sequence
MSQGILSPPAGLLSDDDVVVSPMFESTAADLGSVVRKNLLSDCSVVSTSLEDKQQVPSEDSMEKVKVYLRVRPLLPSELERQEDQGCVRIENVETLVLQAPKDSFALKSNERGIGQATHRFTFSQIFGPEVGQASFFNLTVKEMVKDVLKGQNWLIYTY

SEQ ID NO: 158865 - DNA, 2673 bp, Artificial Sequence
  derived and/or modified sequence
atgtcacagggtatcctgtcaccccctgccggccttctgtctgatgatgatgtcgtagtgtcccctatgtttgagagcactgccgcagacctgggcagcgttgttcgaaaaaacctgctgtccgattgctctgtggtatcaacctccctggaggataaacagcaggtgccaagcgaggacagtatggaaaaggtgaaggtgtatctccgggtgaggcccctactcccatcagagctcgaacgccaagaggaccagggatgtgtgaggatcgagaacgtagagacgctggttctgcaggcgccaaaggatagtttcgcactgaagtctaacgagaggggaatcgggcaggcaacgcaccgattcacttttagtcagatatttggacccgaagttggacaagcttcatttttcaacctgaccgtgaaagaaatggtgaaagatgtccttaaaggtcagaactggcttatttatacttatggtgtgactaactccgggaaaacccatacgattcaaggcacgatcaaagatggaggaatcctgccccgctcactggccctcatattcaatagtctacaaggccagctgcatccgacacccgatctgaagccgctgttatccaatgaagtgatctggctggattcaaaacaaatccgccaagaggagatgaaaaagctgagcctcctgaacggtggacttcaggaagaggagctttctacaagccttaagagatccgtgtatattgagagtcgcatcggcacatccacatcctttgacagtggtatcgcaggtctgagcagtatatcacagtgcacctcttcatcacagctcgacgaaacttcccataggtgggcccagccagacaccgctcccttacccgttcccgctaacattaggttttcaatatggatctcatttttcgagatctacaacgagcttctttacgatctgctggaaccaccttcgcaacagcgaaagcggcagactctcagattatgtgaagaccaaaatggaaacccctatgttaaggatcttaattggatacacgtgcaggacgccgaggaggcatggaagctcctgaaggtgggcaggaagaatcagagtttcgccagcactcatctgaatcagaattcgtctaggagccattcaatcttcagcatccggattctgcaccttcaaggagaaggggacattgtcccgaaaatctccgaactgtccttgtgtgacctggcaggctcagagcgttgcaaggatcagaagtccggggaaaggctcaaagaagctgggaacatcaacacttctctgcatacactgggccgctgcatagctgcccttcgtcagaaccagcaaaaccgttctaaacagaatctggtgcctttccgtgacagcaaactgactcgagtttttcagggcttctttacgggtcgaggaagaagctgtatgatcgtcaatgtcaatccttgtgcctcaacatatgacgaaacgttgcacgtggccaagttttcggcaatcgcctcccagcttgtccacgcacccccgatgcagctcgggttcccatccttacacagtttcatcaaagagcacagtctgcaggtttcccccagtctggagaagggagcaaaagccgatactggactggacgacgacattgagaacgaggcagatatctctatgtatggcaaggaggagcttctccaggttgtcgaggctatgaaaacgctgctgttaaaggagcgccaggaaaaacttcagctggagatgcacctgcgggacgaaatctgcaatgagatggtcgagcagatgcagcagagagaacagtggtgctcggagcacctggatacacagaaagaactactggaagaaatgtacgaggagaagttaaacattctgaaagaatcactaacaagcttctatcaggaggagatccaggagagagacgaaaagattgaggaactggaggcgctactacaggaggctcgccagcagtcagtcgcacatcaacaatctgggagcgaactggcactgagaaggagccagcggctcgctgccagtgctagcactcagcagctgcaggaggtcaaggccaagcttcagcagtgtaaggcagaactcaatagcaccaccgaggagttgcataagtatcaaaagatgctggagccacccccatccgcaaagccttttaccattgatgtcgataagaagcttgaagaaggtcagaaaaacattagactgttacgaaccgagttacagaaactaggcgagtcactgcagagcgctgaacgggcttgctgccatagtaccggggcaggcaagctgaggcaagcccttacgacctgtgacgatatactgatcaaacaggatcaaactcttgcggagctgcagaataacatggtattggtgaaattggacctgcgaaaaaaggcagcttgtatcgccgaacagtaccacactgttttgaaactccagggccaggtttcagcgaagaaaagattaggaacgaatcaggagaaccaacagccaaaccagcaaccacctggaaaaaaaccattcctacgaaatctgttaccacgtacccctacatgtcagagctcgactgactgtagtccttacgcaaggatactgcgatcccggagaagccccctgcttaagtccggacccttcggcaaaaaatactag

SEQ ID NO: 158866 - DNA, 678 bp, Artificial Sequence
  derived and/or modified sequence
atgagccagggaatcctgtccccccctgccggcctcctgagtgatgatgacgtggtggtgtccccgatgtttgagtccaccgccgccgacttggggtcagtggtgagaaaaaatctgttatccgactgcagcgttgtgtctacctctctcgaggacaaacagcaagtcccatctgaggatagcatggaaaaagtgaaagtgtacctgagggtcagaccgcttcttcccagcgaacttgagcgtcaggaggatcaagggtgcgtgcgtattgagaatgtggagactctggttctgcaggcacctaaggatagctttgcattaaagtcaaatgaaaggggtattggccaagccacgcaccgcttcaccttctcacagattttcggcccagaggtcggccaagccagctttttcaacctgaccgtgaaagaaatggtgaaggacgtccttaaggggcagaactggctgatatatacttacggcgtgaccaatagtgggaaaacacataccattcaggggacgatcaaagacggcggaatccttccacgcagcctcgccctaattttcaattccttgcagggacaactgcaccctaccccggacctgaaacccttgctatccaacgaggtaatctggctggactcaaaacagattcggcaggaagagatgaagaagctgtag

SEQ ID NO: 158867 - DNA, 2619 bp, Artificial Sequence
  derived and/or modified sequence
atgtcacaaggaatactatccccgccagctggcctgttgagtgacgacgacgtggtggtgtctcctatgttcgagagtaccgccgctgacctggggagcgtggtcaggaagaatttgctgtcagattgctccgtggtaagcacttcattggaggacaaacaacaggtcccatccgaggacagcatggaaaaggaggatcagggttgcgtgaggattgaaaacgtcgagacccttgtgctgcaagctcccaaggacagttttgcgctgaagtctaacgaaagggggataggtcaagctacccataggtttacgttctctcagatattcggacccgaagtaggacaggcgagtttcttcaacctgacggtgaaggaaatggttaaagacgtcctcaaaggccagaactggctgatctatacgtatggggtgaccaacagcggtaaaacccacactatccagggcacaatcaaagatggcgggatcctgccaaggtccctggccctgatttttaatagcttgcaggggcagctgcatcctacccctgaccttaagcccctcctttccaacgaggtgatttggctggacagcaagcagatccggcaggaggaaatgaagaagctctctctcctgaacggggggctgcaagaggaagagctaagcacgagcctgaagcgtagcgtgtatatagagtcacgaattggcacatccacttcttttgactccggcatagcaggcttatcatcaatcagccagtgtacttcctcttcccagcttgatgagacctcccataggtgggcccagcccgatacggccccgcttccagttcctgccaacatacggttttccatctggattagcttcttcgagatttataatgagctgctgtacgacctcttggagcctccgtctcagcagcggaagcgccaaactctgaggttatgcgaagaccagaatggaaacccctatgtgaaagatctcaattggatacacgtccaggacgcagaagaggcttggaaactccttaaggtggggagaaagaaccagagtttcgcatctacacacctaaaccagaatagctctcggtcacactctatcttcagcatacgtatcctgcatctccagggggaaggcgacatcgtgccgaaaatctctgagctatcattgtgcgacctggctggcagcgaaaggtgcaaggaccagaagagtggcgagagattgaaggaagccggaaacatcaacacaagtcttcatacccttgggcgatgtatcgctgcactgaggcaaaaccagcagaaccggagcaaacagaacctagtcccgttcagggattcaaaactgaccagagtgtttcaaggtttttttaccgggcgtggccggagttgcatgattgttaacgtcaatccatgcgcttctacctacgatgagaccctgcatgtggccaaattctctgcaatcgccagccagctggtgcacgcacccccaatgcaactaggatttccttcgctccactcttttatcaaagagcattctctgcaggtcagcccatccctcgagaagggagccaaagcagacaccggattagacgatgatatcgagaacgaggctgatatctccatgtacggaaaagaggagctactgcaggtggtcgaagcaatgaagactctgcttttgaaagaaagacaggagaagctccagctcgaaatgcacctccgtgatgagatatgcaatgaaatggtcgaacagatgcagcagagagaacagtggtgcagcgagcatctggatacacagaaggaactactggaggagatgtatgaagagaagctgaacatcctcaaagaaagcttgacatccttctatcaagaagaaatacaggagagggatgaaaagattgaggaattggaagccctgctgcaggaagcgaggcaacaaagcgtggctcaccaacagagcggttctgaacttgcacttcgacggtctcagaggcttgcggcctctgctagcactcagcaactgcaggaggtgaaggctaaattacagcagtgcaaggcagagctgaattcaacaacagaggagttgcataagtaccagaagatgctcgaaccacccccatcggctaagcctttcaccatcgatgtcgataaaaagctcgaagaaggacagaagaacatcaggctgctgcgcacagaacttcaaaagctcggcgaatctcttcagagtgccgaaagagcctgttgccactctactggagctgggaagcttaggcaggccctgaccacctgcgatgatatcttaatcaagcaggaccaaaccctggctgaactgcaaaataacatggtgctcgttaagctcgatctgagaaagaaggccgcttgcatcgcggaacagtatcacactgtgctgaaacttcaaggccaggtgagcgccaaaaagcgccttgggacaaatcaggaaaaccagcagcccaaccagcagcctccagggaagaagccctttctgcgaaaccttctgccgcgcaccccaacgtgtcaaagcagtaccgattgtagcccctacgctcgtatcctccggagtagaaggtccccgcttctgaagtcgggacctttcggcaaaaaatactag

SEQ ID NO: 158868 - DNA, 480 bp, Artificial Sequence
  derived and/or modified sequence
atgagccaggggattctgagtccgcccgccggcttactgagcgatgacgatgtcgttgtgtctcctatgtttgaaagcaccgcagctgatctcgggtcagtggtcaggaaaaatctgctttccgactgcagtgtagtgagcacatccctggaagataagcaacaggtgccatctgaagattctatggagaaggtcaaggtttatctgcgagtccgacctctcctgccttcggaactggagagacaggaggatcagggctgcgtcagaattgagaatgttgaaaccctggtactgcaggcacccaaggactcattcgctttaaagagcaatgaaaggggcatcgggcaagccacccacagattcacttttagtcagatcttcggccccgaggtgggccaagcatctttctttaacctgactgtgaaagaaatggtgaaggacgtcctgaagggccagaactggctcatatacacatactag

SEQ ID NO: 158869 - DNA, 3201 bp, Artificial Sequence
  derived and/or modified sequence
cgccccctttccttacgcggattggtagctgcaggcttccctatctgattggccgaacgaacgcagcgcgtaatttaaaatattgtatctgtaacaaagctgcacctcgtgggcggagttgtgctctgcggctgcgaaagtccagcttcggcgactaggtgtgagtaagccagtatcccaggaggagcaagtggcacgtcttcggacctaggctgcccctgccgtcatgtcgcaagggatcctttctccgccagcgggcttgctgtccgatgacgatgtcgtagtttctcccatgtttgagtccacagctgcagatttggggtctgtggtacgcaagaacctgctatcagactgctctgtcgtctctacctccctagaggacaagcagcaggttccatctgaggacagtatggagaaggtgaaagtatacttgagggttaggcccttgttaccttcagagttggaacgacaggaagatcagggttgtgtccgtattgagaatgtggagacccttgttctacaagcacccaaggactcttttgccctgaagagcaatgaacggggaattggccaagccacacacaggttcaccttttcccagatctttgggccagaagtgggacaggcatccttcttcaacctaactgtgaaggagatggtaaaggatgtactcaaagggcagaactggctcatctatacatatggagtcactaactcagggaaaacccacacgattcaaggtaccatcaaggatggagggattctcccccggtccctggcgctgatcttcaatagcctccaaggccaacttcatccaacacctgatctgaagcccttgctctccaatgaggtaatctggctagacagcaagcagatccgacaggaggaaatgaagaagctgtccctgctaaatggaggcctccaagaggaggagctgtccacttccttgaagaggagtgtctacatcgaaagtcggataggtaccagcaccagcttcgacagtggcattgctgggctctcttctatcagtcagtgtaccagcagtagccagctggatgaaacaagtcatcgatgggcacagccagacactgccccactacctgtcccggcaaacattcgcttctccatctggatctcattctttgagatctacaacgaactgctttatgacctattagaaccgcctagccaacagcgcaagaggcagactttgcggctatgcgaggatcaaaatggcaatccctatgtgaaagatctcaactggattcatgtgcaagatgctgaggaggcctggaagctcctaaaagtgggtcgtaagaaccagagctttgccagcacccacctcaaccagaactccagccgcagtcacagcatcttctcaatcaggatcctacaccttcagggggaaggagatatagtccccaagatcagcgagctgtcactctgtgatctggctggctcagagcgctgcaaagatcagaagagtggtgaacggttgaaggaagcaggaaacattaacacctctctacacaccctgggccgctgtattgctgcccttcgtcaaaaccagcagaaccggtcaaagcagaacctggttcccttccgtgacagcaagttgactcgagtgttccaaggtttcttcacaggccgaggccgttcctgcatgattgtcaatgtgaatccctgtgcatctacctatgatgaaactcttcatgtggccaagttctcagccattgctagccagcttgtgcatgccccacctatgcaactgggattcccatccctgcactcgttcatcaaggaacatagtcttcaggtatcccccagcttagagaaaggggctaaggcagacacaggccttgatgatgatattgaaaatgaagctgacatctccatgtatggcaaagaggagctcctacaagttgtggaagccatgaagacactgcttttgaaggaacgacaggaaaagctacagctggagatgcatctccgagatgaaatttgcaatgagatggtagaacagatgcaacagcgggaacagtggtgcagtgaacatttggacacccaaaaggaactattggaggaaatgtatgaagaaaaactaaatatcctcaaggagtcactgacaagtttttaccaagaagagattcaggagcgggatgaaaagattgaagagctagaagctctcttgcaggaagccagacaacagtcagtggcccatcagcaatcagggtctgaattggccctacggcggtcacaaaggttggcagcttctgcctccacccagcagcttcaggaggttaaagctaaattacagcagtgcaaagcagagctaaactctaccactgaagagttgcataagtatcagaaaatgttagaaccaccaccctcagccaagcccttcaccattgatgtggacaagaagttagaagagggccagaagaatataaggctgttgcggacagagcttcagaaacttggtgagtctctccaatcagcagagagagcttgttgccacagcactggggcaggaaaacttcgtcaagccttgaccacttgtgatgacatcttaatcaaacaggaccagactctggctgaactgcagaacaacatggtgctagtgaaactggaccttcggaagaaggcagcatgtattgctgagcagtatcatactgtgttgaaactccaaggccaggtttctgccaaaaagcgccttggtaccaaccaggaaaatcagcaaccaaaccaacaaccaccagggaagaaaccattccttcgaaatttacttccccgaacaccaacctgccaaagctcaacagactgcagcccttatgcccggatcctacgctcacggcgttcccctttactcaaatctgggccttttggcaaaaagtactaaggctgtggggaaagagaagagcagtcatggccctgaggtgggtcagctactctcctgaagaaataggtctcttttatgctttaccatatatcaggaattatatccaggatgcaatactcagacactagcttttttctcacttttgtattataaccacctatgtaatctcatgttgttgtttttttttatttacttatatgatttctatgcacacaaaaacagttatattaaagatattattgttcacattttttattgaattccaaatgtagcaaaatcattaaaacaaattataaaaggga

SEQ ID NO: 158870 - DNA, 810 bp, Artificial Sequence
  derived and/or modified sequence
tggagcccgggttaccagctcttgcccgcgcggaataggctttaagaaatcggagctgcagccatctgtttttctcttaatgctgcatctctgttctcacggtggtccttgggacctaggctgcccctgccgtcatgtcgcaagggatcctttctccgccagcgggcttgctgtccgatgacgatgtcgtagtttctcccatgtttgagtccacagctgcagatttggggtctgtggtacgcaagaacctgctatcagactgctctgtcgtctctacctccctagaggacaagcagcaggttccatctgaggacagtatggagaaggtgaaagtatacttgagggttaggcccttgttaccttcagagttggaacgacaggaagatcagggttgtgtccgtattgagaatgtggagacccttgttctacaagcacccaaggactcttttgccctgaagagcaatgaacggggaattggccaagccacacacaggttcaccttttcccagatctttgggccagaagtgggacaggcatccttcttcaacctaactgtgaaggagatggtaaaggatgtactcaaagggcagaactggctcatctatacatatggagtcactaactcagggaaaacccacacgattcaaggtaccatcaaggatggagggattctcccccggtccctggcgctgatcttcaatagcctccaaggccaacttcatccaacacctgatctgaagcccttgctctccaatgaggtaatctggctagacagcaagcagatccgacaggaggaaatgaagaagctgt

SEQ ID NO: 158871 - DNA, 2935 bp, Artificial Sequence
  derived and/or modified sequence
gagtaagccagtatcccaggaggagcaagtggcacgtcttcggacctaggctgcccctgccgtcatgtcgcaagggatcctttctccgccagcgggcttgctgtccgatgacgatgtcgtagtttctcccatgtttgagtccacagctgcagatttggggtctgtggtacgcaagaacctgctatcagactgctctgtcgtctctacctccctagaggacaagcagcaggttccatctgaggacagtatggagaaggaagatcagggttgtgtccgtattgagaatgtggagacccttgttctacaagcacccaaggactcttttgccctgaagagcaatgaacggggaattggccaagccacacacaggttcaccttttcccagatctttgggccagaagtgggacaggcatccttcttcaacctaactgtgaaggagatggtaaaggatgtactcaaagggcagaactggctcatctatacatatggagtcactaactcagggaaaacccacacgattcaaggtaccatcaaggatggagggattctcccccggtccctggcgctgatcttcaatagcctccaaggccaacttcatccaacacctgatctgaagcccttgctctccaatgaggtaatctggctagacagcaagcagatccgacaggaggaaatgaagaagctgtccctgctaaatggaggcctccaagaggaggagctgtccacttccttgaagaggagtgtctacatcgaaagtcggataggtaccagcaccagcttcgacagtggcattgctgggctctcttctatcagtcagtgtaccagcagtagccagctggatgaaacaagtcatcgatgggcacagccagacactgccccactacctgtcccggcaaacattcgcttctccatctggatctcattctttgagatctacaacgaactgctttatgacctattagaaccgcctagccaacagcgcaagaggcagactttgcggctatgcgaggatcaaaatggcaatccctatgtgaaagatctcaactggattcatgtgcaagatgctgaggaggcctggaagctcctaaaagtgggtcgtaagaaccagagctttgccagcacccacctcaaccagaactccagccgcagtcacagcatcttctcaatcaggatcctacaccttcagggggaaggagatatagtccccaagatcagcgagctgtcactctgtgatctggctggctcagagcgctgcaaagatcagaagagtggtgaacggttgaaggaagcaggaaacattaacacctctctacacaccctgggccgctgtattgctgcccttcgtcaaaaccagcagaaccggtcaaagcagaacctggttcccttccgtgacagcaagttgactcgagtgttccaaggtttcttcacaggccgaggccgttcctgcatgattgtcaatgtgaatccctgtgcatctacctatgatgaaactcttcatgtggccaagttctcagccattgctagccagcttgtgcatgccccacctatgcaactgggattcccatccctgcactcgttcatcaaggaacatagtcttcaggtatcccccagcttagagaaaggggctaaggcagacacaggccttgatgatgatattgaaaatgaagctgacatctccatgtatggcaaagaggagctcctacaagttgtggaagccatgaagacactgcttttgaaggaacgacaggaaaagctacagctggagatgcatctccgagatgaaatttgcaatgagatggtagaacagatgcaacagcgggaacagtggtgcagtgaacatttggacacccaaaaggaactattggaggaaatgtatgaagaaaaactaaatatcctcaaggagtcactgacaagtttttaccaagaagagattcaggagcgggatgaaaagattgaagagctagaagctctcttgcaggaagccagacaacagtcagtggcccatcagcaatcagggtctgaattggccctacggcggtcacaaaggttggcagcttctgcctccacccagcagcttcaggaggttaaagctaaattacagcagtgcaaagcagagctaaactctaccactgaagagttgcataagtatcagaaaatgttagaaccaccaccctcagccaagcccttcaccattgatgtggacaagaagttagaagagggccagaagaatataaggctgttgcggacagagcttcagaaacttggtgagtctctccaatcagcagagagagcttgttgccacagcactggggcaggaaaacttcgtcaagccttgaccacttgtgatgacatcttaatcaaacaggaccagactctggctgaactgcagaacaacatggtgctagtgaaactggaccttcggaagaaggcagcatgtattgctgagcagtatcatactgtgttgaaactccaaggccaggtttctgccaaaaagcgccttggtaccaaccaggaaaatcagcaaccaaaccaacaaccaccagggaagaaaccattccttcgaaatttacttccccgaacaccaacctgccaaagctcaacagactgcagcccttatgcccggatcctacgctcacggcgttcccctttactcaaatctgggccttttggcaaaaagtactaaggctgtggggaaagagaagagcagtcatggccctgaggtgggtcagctactctcctgaagaaataggtctcttttatgctttaccatatatcaggaattatatccaggatgcaatactcagacactagcttttttctcacttttgtattataaccacctatgtaatctcatgttgttgtttttttttatttacttatatgatttctatgcacacaaaaacagttatattaaagatattattgttcacatttt

SEQ ID NO: 158872 - DNA, 631 bp, Artificial Sequence
  derived and/or modified sequence
gaaatgtcgtttttccccttaagacaaagcaagcaccctaaaccagttaccctgtgcactcctgttaagattgttgctaaggaaggacaggagttggctgctgaagcctcaagatttcctttaggctcttagacctaggctgcccctgccgtcatgtcgcaagggatcctttctccgccagcgggcttgctgtccgatgacgatgtcgtagtttctcccatgtttgagtccacagctgcagatttggggtctgtggtacgcaagaacctgctatcagactgctctgtcgtctctacctccctagaggacaagcagcaggttccatctgaggacagtatggagaaggtgaaagtatacttgagggttaggcccttgttaccttcagagttggaacgacaggaagatcagggttgtgtccgtattgagaatgtggagacccttgttctacaagcacccaaggactcttttgccctgaagagcaatgaacggggaattggccaagccacacacaggttcaccttttcccagatctttgggccagaagtgggacaggcatccttcttcaacctaactgtgaaggagatggtaaaggatgtactcaaagggcagaactggctcatctatacatatg

SEQ ID NO: 158873 - DNA, 2673 bp, Artificial Sequence
  derived and/or modified sequence
atgagccagggcatcctgagccccccagctggcctgctgagtgatgatgatgtggtggtgagccccatgtttgagagcacagctgctgacctgggctctgtggtgaggaagaacctgctgagtgactgcagcgtggtgtccaccagcctggaggacaagcagcaggtgcccagtgaagattccatggagaaggtgaaggtgtacctgcgggtgcggcccctgctgcccagcgagctggagcggcaggaggaccagggctgtgtgagaattgaaaatgtggagaccctggtgctgcaggcccccaaggacagctttgccctgaagagcaatgaaagaggcatcggccaggccacccaccgcttcaccttcagccagatctttggacctgaggtgggccaggccagcttcttcaacctgactgtgaaggagatggtgaaggatgtgctgaagggccagaactggctgatctacacctatggagtgaccaacagcggcaagacccacaccatccagggcaccatcaaggatggcggcatcctgcccaggagcctggccctgatcttcaacagcctgcagggccagctgcaccccaccccagacctgaagcccctgctgagcaatgaagtcatctggctggacagcaagcagatccggcaggaggagatgaagaagctgagcctgctgaatggaggcctgcaggaggaggagctgagcaccagcctgaagaggtctgtgtacatcgagagcagaattggcaccagcaccagctttgattctggaattgctggcctgagcagcatcagccagtgcaccagcagcagccagctggatgagaccagccaccgctgggcccagcctgacacagcccccctgcctgtgcctgccaacatccgcttcagcatctggatctccttctttgagatctacaatgagctgctgtatgacctgctggagccccccagccagcagaggaagaggcagaccctgcggctgtgtgaggaccagaatggaaacccctacgtgaaggacctgaactggatccacgtgcaggatgctgaggaggcctggaagctgctgaaggtgggcaggaagaaccagagctttgccagcacccacctgaaccagaacagcagccgcagccacagcatcttcagcatccgcatcctgcacctgcagggcgagggggacatcgtgcccaagatcagcgagctgagcctgtgtgacctggccggcagcgagcgctgcaaggaccagaagagcggggagcggctgaaggaggccggcaacatcaacaccagcctgcacaccctgggccgctgcatcgccgccctgcggcagaaccagcagaacagaagcaagcagaacctggtgcccttccgggacagcaagctgaccagggtcttccagggcttcttcaccggccggggccgcagctgcatgattgtgaatgtgaacccctgtgccagcacctatgatgagaccctgcacgtggccaagttcagcgccatcgccagccagctggtgcacgccccacccatgcagctgggcttccccagcctgcacagcttcatcaaggagcacagcctgcaggtgagccccagcctggagaagggggccaaggctgacaccggcctggatgatgacattgaaaatgaagctgacatctccatgtatggcaaggaggagctgctgcaggtggtggaggccatgaagaccctgctgctgaaggagcggcaggagaagctgcagctggagatgcacctgagagatgagatctgcaatgagatggtggagcagatgcagcagcgggagcagtggtgcagcgagcacctggacacccagaaggagctgctggaggagatgtatgaggagaagctgaacatcctgaaggagagcctgaccagcttctaccaggaggagatccaggagagagatgagaagattgaggagctggaggccctgctgcaggaggcccggcagcagagcgtggcccaccagcagagcggcagcgagctggccctgcggcgcagccagaggctggccgccagcgccagcacccagcagctgcaggaggtgaaggccaagctgcagcagtgcaaggccgagctgaacagcaccacagaggagctgcacaagtaccagaagatgctggagcccccacccagcgccaagcccttcaccattgatgtggacaagaagctggaggagggccagaagaacatccggctgctgaggacagagctgcagaagctgggggagagcctgcagagcgctgagcgggcctgctgccacagcactggagctgggaagctgcggcaggccctgaccacctgtgatgacatcctgatcaagcaggaccagaccctggccgagctgcagaacaacatggtgctggtgaagctggacctgaggaagaaggccgcctgcatcgccgagcagtaccacacagtgctgaagctgcagggccaggtgtctgccaagaagaggctgggcaccaaccaggagaaccagcagcccaaccagcagcccccaggcaagaagcccttcctgaggaacctgctgcccaggacccccacctgccagagcagcacagactgcagcccctatgcccgcatcctgcggagccgccgcagccccctgctgaagagcggcccctttgggaagaagtactag

SEQ ID NO: 158874 - DNA, 678 bp, Artificial Sequence
  derived and/or modified sequence
atgagccagggcatcctgagccccccagctggcctgctgagtgatgatgatgtggtggtgagccccatgtttgagagcacagctgctgacctgggctctgtggtgaggaagaacctgctgagtgactgcagcgtggtgtccaccagcctggaggacaagcagcaggtgcccagtgaagattccatggagaaggtgaaggtgtacctgcgggtgcggcccctgctgcccagcgagctggagcggcaggaggaccagggctgtgtgagaattgaaaatgtggagaccctggtgctgcaggcccccaaggacagctttgccctgaagagcaatgaaagaggcatcggccaggccacccaccgcttcaccttcagccagatctttggacctgaggtgggccaggccagcttcttcaacctgactgtgaaggagatggtgaaggatgtgctgaagggccagaactggctgatctacacctatggagtgaccaacagcggcaagacccacaccatccagggcaccatcaaggatggcggcatcctgcccaggagcctggccctgatcttcaacagcctgcagggccagctgcaccccaccccagacctgaagcccctgctgagcaatgaagtcatctggctggacagcaagcagatccggcaggaggagatgaagaagctgtag

SEQ ID NO: 158875 - DNA, 2619 bp, Artificial Sequence
  derived and/or modified sequence
atgagccagggcatcctgagccccccagctggcctgctgagtgatgatgatgtggtggtgagccccatgtttgagagcacagctgctgacctgggctctgtggtgaggaagaacctgctgagtgactgcagcgtggtgtccaccagcctggaggacaagcagcaggtgcccagtgaagattccatggagaaggaggaccagggctgtgtgagaattgaaaatgtggagaccctggtgctgcaggcccccaaggacagctttgccctgaagagcaatgaaagaggcatcggccaggccacccaccgcttcaccttcagccagatctttggacctgaggtgggccaggccagcttcttcaacctgactgtgaaggagatggtgaaggatgtgctgaagggccagaactggctgatctacacctatggagtgaccaacagcggcaagacccacaccatccagggcaccatcaaggatggcggcatcctgcccaggagcctggccctgatcttcaacagcctgcagggccagctgcaccccaccccagacctgaagcccctgctgagcaatgaagtcatctggctggacagcaagcagatccggcaggaggagatgaagaagctgagcctgctgaatggaggcctgcaggaggaggagctgagcaccagcctgaagaggtctgtgtacatcgagagcagaattggcaccagcaccagctttgattctggaattgctggcctgagcagcatcagccagtgcaccagcagcagccagctggatgagaccagccaccgctgggcccagcctgacacagcccccctgcctgtgcctgccaacatccgcttcagcatctggatctccttctttgagatctacaatgagctgctgtatgacctgctggagccccccagccagcagaggaagaggcagaccctgcggctgtgtgaggaccagaatggaaacccctacgtgaaggacctgaactggatccacgtgcaggatgctgaggaggcctggaagctgctgaaggtgggcaggaagaaccagagctttgccagcacccacctgaaccagaacagcagccgcagccacagcatcttcagcatccgcatcctgcacctgcagggcgagggggacatcgtgcccaagatcagcgagctgagcctgtgtgacctggccggcagcgagcgctgcaaggaccagaagagcggggagcggctgaaggaggccggcaacatcaacaccagcctgcacaccctgggccgctgcatcgccgccctgcggcagaaccagcagaacagaagcaagcagaacctggtgcccttccgggacagcaagctgaccagggtcttccagggcttcttcaccggccggggccgcagctgcatgattgtgaatgtgaacccctgtgccagcacctatgatgagaccctgcacgtggccaagttcagcgccatcgccagccagctggtgcacgccccacccatgcagctgggcttccccagcctgcacagcttcatcaaggagcacagcctgcaggtgagccccagcctggagaagggggccaaggctgacaccggcctggatgatgacattgaaaatgaagctgacatctccatgtatggcaaggaggagctgctgcaggtggtggaggccatgaagaccctgctgctgaaggagcggcaggagaagctgcagctggagatgcacctgagagatgagatctgcaatgagatggtggagcagatgcagcagcgggagcagtggtgcagcgagcacctggacacccagaaggagctgctggaggagatgtatgaggagaagctgaacatcctgaaggagagcctgaccagcttctaccaggaggagatccaggagagagatgagaagattgaggagctggaggccctgctgcaggaggcccggcagcagagcgtggcccaccagcagagcggcagcgagctggccctgcggcgcagccagaggctggccgccagcgccagcacccagcagctgcaggaggtgaaggccaagctgcagcagtgcaaggccgagctgaacagcaccacagaggagctgcacaagtaccagaagatgctggagcccccacccagcgccaagcccttcaccattgatgtggacaagaagctggaggagggccagaagaacatccggctgctgaggacagagctgcagaagctgggggagagcctgcagagcgctgagcgggcctgctgccacagcactggagctgggaagctgcggcaggccctgaccacctgtgatgacatcctgatcaagcaggaccagaccctggccgagctgcagaacaacatggtgctggtgaagctggacctgaggaagaaggccgcctgcatcgccgagcagtaccacacagtgctgaagctgcagggccaggtgtctgccaagaagaggctgggcaccaaccaggagaaccagcagcccaaccagcagcccccaggcaagaagcccttcctgaggaacctgctgcccaggacccccacctgccagagcagcacagactgcagcccctatgcccgcatcctgcggagccgccgcagccccctgctgaagagcggcccctttgggaagaagtactag

SEQ ID NO: 158876 - DNA, 480 bp, Artificial Sequence
  derived and/or modified sequence
atgagccagggcatcctgagccccccagctggcctgctgagtgatgatgatgtggtggtgagccccatgtttgagagcacagctgctgacctgggctctgtggtgaggaagaacctgctgagtgactgcagcgtggtgtccaccagcctggaggacaagcagcaggtgcccagtgaagattccatggagaaggtgaaggtgtacctgcgggtgcggcccctgctgcccagcgagctggagcggcaggaggaccagggctgtgtgagaattgaaaatgtggagaccctggtgctgcaggcccccaaggacagctttgccctgaagagcaatgaaagaggcatcggccaggccacccaccgcttcaccttcagccagatctttggacctgaggtgggccaggccagcttcttcaacctgactgtgaaggagatggtgaaggatgtgctgaagggccagaactggctgatctacacctactag

SEQ ID NO: 158877 - DNA, 2673 bp, Artificial Sequence
  derived and/or modified sequence
atgagccagggcatcctgagcccccccgccggcctgctgagcgacgacgacgtggttgtgagtcctatgtttgaatcaaccgccgcggacctggggagcgtggttcgcaaaaatttgctctccgattgttccgtagttagtacatccctggaggataagcaacaggtgccctcggaggactccatggagaaggtaaaggtgtacctgagagtccgaccgcttctaccttccgagctcgaacgtcaggaggatcagggatgtgtgagaattgaaaatgtagagaccctggtgctgcaggcacctaaggattcttttgctttaaagagcaatgagcggggcataggtcaggctacacataggttcacattttcacaaatctttggccctgaagtggggcaggcttcattttttaatcttactgtcaaggagatggtgaaagacgtccttaagggtcagaattggctgatttatacctatggagtaactaatagtgggaaaacacataccatccagggcacaatcaaagatggggggattctccccaggtcactggccctgatatttaactcactgcagggacagctgcaccctacacccgacctgaaaccgctgctctccaatgaagtgatctggctcgatagcaagcagatccggcaggaagaaatgaaaaagctgagtctgctgaacggcggcctgcaggaagaagagcttagcacatccctcaagcggagcgtttacatcgagagccggatcggcacctccacttccttcgactctggcattgccggattaagtagtatatcccagtgcacatcatcttcgcaactggatgagacttcacacaggtgggcccagcccgataccgctcccctccccgttccagctaatatcaggttctctatatggatcagtttcttcgaaatttataacgagttgttgtatgacctcctggaacccccctcacaacaacggaagcgccagacacttcggctctgcgaggaccagaatggaaacccctacgtgaaagacttaaattggatccatgtgcaggacgccgaagaggcttggaagctccttaaggtgggaagaaagaaccaaagctttgcgtccacacacctgaatcagaattcaagccgatcccacagtatcttcagcatccgtatccttcacctacagggtgagggcgatatcgtgcctaaaatcagcgagcttagcctgtgcgacctggcaggatctgagaggtgcaaggaccaaaaaagtggagagcggctgaaggaagcgggaaatataaatactagcttgcatactttaggtagatgtattgccgcgttaagacagaatcagcaaaaccgctccaaacagaatctggtgccgtttcgcgattctaaactgacccgggtctttcaaggatttttcacaggccggggaaggtcgtgcatgatcgtgaatgttaacccctgtgccagcacttacgacgaaaccctccatgtggctaaattttctgcgatcgcatctcagttggtgcatgcaccacccatgcagttgggatttccgtccctacactcctttatcaaagaacactcactgcaggtaagtccgtctcttgagaaaggtgccaaggccgataccggcctggatgacgatattgagaacgaggctgatatcagcatgtatggcaaagaggagcttctgcaggtggttgaggctatgaagactctgcttctaaaggaaagacaggagaagctgcagctcgagatgcacctgagggatgaaatctgtaacgaaatggtggagcagatgcagcagagagagcagtggtgcagcgagcacttagacacccagaaggaactgcttgaagaaatgtatgaggagaagctgaatattctgaaggaatcactgacaagcttttaccaggaagagatccaggaacgggacgagaaaatagaagaactcgaggcgcttttgcaggaagctagacagcaatctgtcgctcatcagcagtctggatcagagctcgccttacgcagatcacaacggctggcagcctcagcttccacacagcagctccaggaggtgaaagccaagctgcagcagtgcaaagctgagctgaatagcaccacagaagagctacacaagtaccagaaaatgctggagccacccccctctgccaaaccgttcaccattgatgtggacaagaagctggaagaggggcaaaagaatatccgtttactgaggacagagctccagaaacttggggagtctctccagtccgcggaacgagcatgctgccactctaccggagcaggaaaactgaggcaagccttgactacttgcgatgacatcctcattaaacaggatcagacactggcagagctgcagaataacatggtgcttgtgaaacttgacctgaggaagaaagccgcgtgcatagccgaacaataccataccgttctgaagttgcagggccaggtctctgccaagaaacgcttgggcactaaccaggagaaccagcagcctaatcaacagccacctgggaaaaaaccctttctgcgcaatctcttgccgaggacccctacctgtcagagttccactgattgctcaccttacgcacggattctgaggtctcggcgctctccgctgctgaagtccggccctttcggaaaaaaatactag

SEQ ID NO: 158878 - DNA, 678 bp, Artificial Sequence
  derived and/or modified sequence
atgagccagggcatcctgagcccccccgccggcctgctgagcgacgacgatgtggttgtctctcccatgtttgaaagcactgcagccgacctaggatctgtagttcggaagaacctgctttctgactgctcagtggtaagcacatctctcgaagataagcaacaggttccctctgaagatagtatggaaaaggtcaaggtctatctgagagttagacctctcctcccctcagagctggagagacaggaggatcagggttgtgtgaggattgagaacgtcgagaccctggtcctgcaagcaccaaaagacagctttgccttgaagagcaatgagaggggtattggacaggcaacacaccgcttcaccttctctcagattttcggacctgaagtgggtcaggctagctttttcaatctgaccgtgaaagagatggttaaagacgtgctgaaggggcagaattggctcatatatacctacggagttaccaactctggaaaaactcacacaatccagggaaccatcaaagacggtgggattcttccccgatctctcgctctgatcttcaattccttgcagggccagctgcacccaacaccggatctgaagcctctgttatccaacgaggtgatttggctggatagcaaacagataagacaggaagaaatgaaaaagctgtag

SEQ ID NO: 158879 - DNA, 2619 bp, Artificial Sequence
  derived and/or modified sequence
atgagccagggcatcctgagcccccccgccggcctgctgagcgacgacgacgtagtagtctctccaatgttcgaatctactgccgccgatctggggagcgtggtccgaaagaatttgcttagtgattgctcagtggtgtcaacctcattggaagacaaacagcaggtcccaagcgaggattcaatggaaaaggaggatcaggggtgtgtgcggatcgaaaacgttgaaaccctcgtccttcaagcccctaaggactcatttgcccttaagagcaatgagcgaggaatcggacaggccacacatagattcactttttcacagatatttggtcctgaagtgggccaggcctcttttttcaatctgactgtcaaggaaatggtaaaggatgtgctgaaaggacagaactggctgatttacacatatggggtgacaaactccgggaaaacacacacaattcagggcactatcaaagatggcggtatcctgcccagatctctcgcgctgattttcaattctctgcagggtcagctccaccccactccagatcttaaacctctcctttctaacgaggttatatggctggactccaaacagatcaggcaggaagagatgaaaaaattgtctttattaaacggcggccttcaggaggaggagctgagcacttccctcaagcgcagcgtttacatcgagagtaggatcggaacttctactagtttcgattctggcatcgcagggctctcgtctatatcccagtgtacaagtagctcacagctagatgaaacatcccatcggtgggctcagccagacacagcaccactgccagtgccagctaacatccggttttcgatttggatttcattttttgaaatctataatgagctgctgtatgaccttcttgagcccccctcacaacagaggaagcgtcagaccttgaggctgtgtgaggaccagaacggaaatccctacgtgaaggacctgaactggattcacgtccaggacgccgaggaggcttggaagttgttaaaggtggggagaaaaaatcagtcctttgcttctacacacctcaaccagaactcatcaagatcccactccattttttcaatacgcatactgcatcttcagggagagggggatattgttcctaaaatcagcgaactgagcctttgcgacctggctggatcagagcgatgtaaggaccagaaatccggcgagcggctaaaagaggccggcaacatcaatacctcgctgcacactcttggaaggtgcatagccgcactgagacagaatcagcaaaaccgatctaaacagaatttggtgccctttagagactcaaagctgactagagttttccagggattctttacaggccgggggagaagctgcatgatagtgaacgtgaatccttgtgccagtacatacgacgagactcttcacgtggctaaattttccgccatcgcgagtcagttagtgcacgctcctcccatgcaacttggatttccttccctccattccttcataaaagagcacagcctgcaggtgtctccatccctggaaaaaggggccaaagcagatacggggctggatgatgatatagagaacgaggccgacatttcaatgtatggtaaagaggagctcttgcaggttgtcgaagcaatgaaaacccttctcttaaaagaaaggcaggagaagctccaactggaaatgcacttacgcgacgagatctgtaatgaaatggtggaacagatgcagcaacgcgaacaatggtgtagtgagcacttagacactcagaaagagctcctggaagagatgtacgaagagaaacttaatattcttaaggagtcacttacctccttttatcaggaggagatccaggaaagagatgaaaagattgaggaactggaagcccttttacaggaagcccgacaacagagtgttgctcaccagcagagtggatcagagctggcccttcgaagatcgcaaaggctggcagccagtgccagcacccagcagttacaagaagtcaaagcgaagttgcagcagtgcaaggctgagcttaactccacaaccgaagaactccataagtaccaaaagatgctggagcccccgcctagcgctaaacctttcaccattgacgtggataagaaattggaagaagggcagaagaatataagactacttcggactgagctgcagaaactaggcgaatcactgcaatccgccgagagagcgtgctgccactccacgggcgcgggaaaactgcgccaggccttgactacatgcgatgacatcctcatcaaacaggatcagacactggcagaacttcagaataatatggtgcttgtgaagctggatctccgtaagaaggccgcctgcattgccgagcagtatcatacggtcctgaagttacaagggcaagtgtcagccaaaaagagattgggaactaatcaggagaatcagcagcctaaccagcaacctccaggtaaaaaaccattcttaagaaacttgctgcctaggactcctacgtgccagtcatcaacagactgttctccatacgcacggatcctcagatcacggcgctcaccactgctgaagtcaggcccctttggaaagaaatactag

SEQ ID NO: 158880 - DNA, 480 bp, Artificial Sequence
  derived and/or modified sequence
atgagccagggcatcctgagcccccccgccggcctgctgagcgacgacgacgtcgtcgtaagccctatgttcgagagcactgcggccgatcttggatcagtggttcgtaagaatctattatctgactgcagtgttgtaagtacatccctcgaggataaacagcaggtgccctccgaagacagcatggagaaggtcaaggtatacctgcgtgtgcggcccttgctgccttcagaactcgaaaggcaggaggaccaggggtgcgtccggatagagaacgtggagacactggtgctgcaggctcccaaagatagctttgcccttaagagcaatgaaagaggcatcggccaggcaactcaccggtttaccttctcacagatttttggtcccgaagtgggacaggcttccttttttaacctcaccgttaaagagatggtgaaggatgtcttaaaagggcaaaattggctgatatacacttactag

SEQ ID NO: 158881 - DNA, 2673 bp, Artificial Sequence
  derived and/or modified sequence
atgagccaaggcatcctgagcccacccgctggcctgctgagtgacgatgatgtagtcgtctctcccatgtttgagtcaacggcagctgacctgggatcagtggtgcggaaaaatctgctttcggactgttccgtggtaagcaccagtctggaggacaagcagcaggtacctagcgaagacagtatggaaaaggtaaaggtgtatctccgggtgagacctctcctgcccagcgagctggagcgccaggaagaccaaggatgtgtgcggattgagaacgttgagacattagtcctgcaggctcccaaggacagcttcgcactgaagtcgaacgagagaggaataggccaagccacacatcgcttcacattcagtcagatcttcggcccagaagtgggccaggcttccttcttcaacctgacagtgaaagagatggttaaggacgttttgaaggggcagaattggctgatttacacctatggagtaacgaattcaggaaagacgcacactatacagggaacaattaaggatggaggaatccttcctcgttcgctcgccctgatctttaactcattacaaggccagctccatcctacccctgacctgaagcctctcttgtcaaacgaagttatctggttagattcaaaacaaattcgacaggaggagatgaaaaagctttcattgctaaatgggggattgcaggaagaggaactgtcaacctctctgaaacgtagcgtgtatattgagtctcggattggaacatcgaccagctttgatagtgggatcgcagggttgtcctccatctcccagtgcacatcaagttcgcagttagacgagaccagtcatcggtgggctcaacccgatacagctccccttccagtgcccgcaaacatccgattttccatctggatttcttttttcgagatatataatgagctcctgtacgaccttcttgagcccccaagccagcagaggaaaaggcagactctgcggctttgcgaagaccagaacggaaatccatatgtcaaggacctgaattggattcatgtgcaagacgccgaggaggcctggaaactgcttaaagttggaagaaagaaccaaagttttgcctcaacacacctaaatcagaattccagccgttctcacagcattttctcgattaggatcttgcacctccagggcgagggcgacattgtccccaagattagcgaactttcactgtgcgacctggcaggtagtgaacgctgcaaagaccaaaaatcgggagaaaggctaaaggaagctggaaacatcaatacatcactgcatacactggggaggtgcatcgccgcacttcgacagaatcagcagaatcggagcaagcagaatctagtgcccttcagggactctaaacttacacgcgtatttcagggattttttacaggaagagggaggtcctgtatgattgttaacgtgaacccctgcgcctccacttatgacgagacattgcacgtcgctaagtttagtgcaattgcatctcagctggtacatgcgccacctatgcagttaggtttcccgtccctgcattccttcattaaggaacactcacttcaggtgtccccaagccttgagaagggagcaaaagcggacacaggattagatgatgacatcgagaacgaggcggatatcagcatgtatggcaaagaggagttactccaggtggttgaggctatgaaaaccctcctgctgaaggaacgccaggagaagctgcagctcgaaatgcacctgcgtgacgagatttgtaacgaaatggtcgagcagatgcaacagcgggagcagtggtgctctgagcacctcgatacccagaaagagctcctcgaggagatgtacgaggaaaagcttaacatacttaaagagagcttaacttctttctaccaggaagagatccaggaacgggacgagaaaatagaggaattggaggcactcctccaggaagcccgacagcagagtgtggcacaccagcagtctggtagtgagctggccttgagaagatctcagcggctggcagcctccgcgagcactcagcagctacaagaagtgaaggcaaagctgcagcaatgtaaggcagaacttaattctaccactgaggaactccataaataccaaaagatgctcgagcccccaccctcagccaaaccattcacgatcgatgtcgataaaaagctggaggagggacaaaaaaacatccggttgctgcgaactgaattgcagaagctgggcgagtcgcttcagtccgcggagcgggcatgttgtcatagtacgggggctggtaaacttcgacaggctctgaccacctgtgacgacatcctgatcaaacaagaccagacactcgccgaactccaaaataatatggtgcttgtaaagcttgacttgcggaagaaagcagcctgcattgccgagcagtaccataccgtgcttaagctgcaaggccaagtgtccgccaaaaaaagactcgggactaatcaggagaatcagcagcccaatcagcagccgccaggcaagaagcccttcctcaggaatctcctaccgaggacaccgacttgccagagttctactgattgttccccttatgcaagaatcctccgttcccgcaggagtcctctcctcaaatccggaccttttggcaagaagtactag

SEQ ID NO: 158882 - DNA, 678 bp, Artificial Sequence
  derived and/or modified sequence
atgtctcaaggcatactgagtcctcctgcgggactgctcagcgatgacgacgtcgtcgtcagtcccatgtttgaatccactgccgcagacctaggaagcgtcgttcgcaagaatctgttgtctgattgctccgtggtgagtaccagcctagaggataagcaacaggtcccttccgaagattccatggagaaggtgaaggtctacctccgcgtgcgccctctcctgcctagtgagttggaacgacaggaagatcaaggttgcgtgcgtatcgaaaatgttgagacccttgtccttcaggccccaaaggacagcttcgcattgaagtcaaacgaaagagggattggccaggccacccacaggttcaccttttcacagatttttggtccagaggttggtcaagcttcgttcttcaaccttaccgttaaggaaatggtcaaggacgtcctgaaaggacagaactggctgatctacacctatggcgtgacaaacagcggcaaaacccacaccatccaggggactattaaggacggtgggatcctgccacgaagcttagccctgattttcaattctctgcagggtcagctccacccaacccccgatctaaagccactgctcagcaatgaggtcatctggttggactcaaagcagattagacaagaagagatgaagaagttatag

SEQ ID NO: 158883 - DNA, 2619 bp, Artificial Sequence
  derived and/or modified sequence
atgagccaaggtatcttatccccccctgcaggcctgttgtctgacgacgacgttgtggtgtcacctatgtttgagagtactgctgcagacctcgggtcggtggtcaggaagaatctcttaagcgactgctccgttgttagtaccagcctggaagataagcagcaagttccatctgaggactctatggaaaaagaagaccaaggttgcgtacgaatagaaaatgtggagacacttgttttgcaggcacccaaggattcttttgccttgaagtccaatgaacgaggtattgggcaagctacacaccgttttacattttcacagattttcggtccagaggtcggccaggcctcattcttcaacctgactgtgaaggagatggtcaaagacgtactaaaaggccagaattggttaatatacacgtacggggtgacgaattctgggaaaacccatacaatccagggaaccatcaaggatggcggtatcttaccaagatcgctggccctcatcttcaactctctgcagggccagctgcacccaaccccagacctgaagccactgctgtccaacgaggtgatttggctagattctaagcagatccgtcaagaagaaatgaaaaaactcagtctgttgaatgggggactccaggaggaggagctgtctacaagcttgaaacggtccgtgtacatcgagagccggatcggcacgagcacgagcttcgacagcggcatcgccggtctttcctccatttcacagtgcacctcaagctcccagttggacgagacttctcaccgctgggcacagcctgatactgctcccctcccagtgcccgctaacatccgtttttctatttggattagcttttttgaaatctataatgaactcttatacgacctgctagaacccccttcccagcagcgaaaaaggcaaacactgcgactatgcgaagatcagaatggcaatccgtacgtaaaggacctgaactggatccacgtgcaggacgcggaagaggcgtggaagctgttaaaggtggggagaaagaatcagagctttgcatctacccatctgaatcagaacagtagccgatcccactccattttttcaatccgcatacttcatctgcagggggaaggcgacattgttcctaagatttctgagctgtccttgtgcgatttggcgggatccgagcggtgcaaggatcagaagagtggagagaggttgaaagaggcaggcaacattaataccagtttacacaccctggggcgttgtattgcagctcttagacagaaccagcagaatcggtccaaacaaaacctggtaccatttcgcgactctaagctaacccgtgtcttccagggcttctttaccgggagaggacggagctgcatgatcgttaacgtgaacccatgtgcctcaacctatgatgagacattacatgtcgcaaagttctcggctatcgcctctcagctggtgcatgctccccctatgcagttaggatttccatccctacattcttttataaaggagcactccctgcaagtgagtcccagcttggagaagggggctaaggctgataccggacttgacgatgacatcgaaaatgaagcggatatttccatgtacgggaaggaggagcttcttcaagtcgtcgaggctatgaaaactctgcttctgaaagaacgccaggaaaagctccagctcgagatgcacttgcgagatgaaatttgtaacgagatggttgagcagatgcagcagcgggaacagtggtgcagcgagcacttggacacacaaaaggagctactcgaggagatgtacgaagaaaaactcaatattctgaaagaatcacttacatccttttaccaggaagaaatacaggagcgagacgagaagatcgaggagttagaagcactgctgcaggaagcacgccagcagagcgtggcgcatcagcagagtggttcagagctcgccctgcggaggtcacagcgcctggctgcatcggctagtactcagcaactccaggaagttaaggcaaaattgcagcagtgcaaagccgagctgaactcaactacggaggagcttcataagtatcagaaaatgttggagcccccaccgagcgcgaagcctttcacgatcgacgttgataagaagctggaagaaggacaaaagaatatccgcttactgcgtaccgagcttcagaaacttggcgagagtctgcaaagtgccgaaagagcctgttgtcacagtaccggagcagggaaactcaggcaagctcttacaacgtgtgacgacattcttataaagcaggatcagaccttggccgaattacaaaataatatggtgctcgtcaagctggatctgcggaagaaggcggcttgtatcgccgagcagtaccataccgtgctcaaactccagggccaggtgagtgccaaaaagcgtctaggaacaaatcaggagaatcaacagccgaatcagcagcctcccggtaaaaaaccgtttttacgtaacctccttccgagaacacctacatgccagagcagcaccgattgctccccatacgcgcgaatactgaggagtcgcaggtctccactactgaagagtggtccctttggcaaaaagtattag

SEQ ID NO: 158884 - DNA, 480 bp, Artificial Sequence
  derived and/or modified sequence
atgtcacaaggcatcctgtcaccgcctgccggtctactgtcagatgacgacgtagtagtgagtcctatgtttgagtccaccgctgccgacctgggtagcgtcgtgagaaaaaacctcttgagcgattgctcagtagtgagcacttctcttgaggataagcagcaggtgcctagcgaggacagtatggagaaggtaaaggtgtaccttcgggtgagacctttactgcctagcgagctcgagcggcaggaagaccagggttgtgtgcggatcgagaacgtggagaccctggtgctccaggcacctaaggactccttcgcgttgaaatccaacgagagagggatcggacaggcgacacatagatttacatttagtcagatctttggacctgaagtcggacaggcaagcttctttaatctgactgttaaggagatggttaaggacgtgctgaaagggcagaattggctaatatacacttattag

SEQ ID NO: 158885 - DNA, 2673 bp, Artificial Sequence
  derived and/or modified sequence
atgagccagggcatcctgagcccccccgccggcctgctgagcgacgacgacgtggtggtgagccccatgttcgagagcaccgccgccgacctgggcagcgtggtgagaaagaacctgctgagcgactgcagcgtggtgagcaccagcctggaggacaagcagcaggtgcccagcgaggacagcatggagaaggtgaaggtgtacctgagagtgagacccctgctgcccagcgagctggagagacaggaggaccagggctgcgtgagaatcgagaacgtggagaccctggtgctgcaggcccccaaggacagcttcgccctgaagagcaacgagagaggcatcggccaggccacccacagattcaccttcagccagatcttcggccccgaggtgggccaggccagcttcttcaacctgaccgtgaaggagatggtgaaggacgtgctgaagggccagaactggctgatctacacctacggcgtgaccaacagcggcaagacccacaccatccagggcaccatcaaggacggcggcatcctgcccagaagcctggccctgatcttcaacagcctgcagggccagctgcaccccacccccgacctgaagcccctgctgagcaacgaggtgatctggctggacagcaagcagatcagacaggaggagatgaagaagctgagcctgctgaacggcggcctgcaggaggaggagctgagcaccagcctgaagagaagcgtgtacatcgagagcagaatcggcaccagcaccagcttcgacagcggcatcgccggcctgagcagcatcagccagtgcaccagcagcagccagctggacgagaccagccacagatgggcccagcccgacaccgcccccctgcccgtgcccgccaacatcagattcagcatctggatcagcttcttcgagatctacaacgagctgctgtacgacctgctggagccccccagccagcagagaaagagacagaccctgagactgtgcgaggaccagaacggcaacccctacgtgaaggacctgaactggatccacgtgcaggacgccgaggaggcctggaagctgctgaaggtgggcagaaagaaccagagcttcgccagcacccacctgaaccagaacagcagcagaagccacagcatcttcagcatcagaatcctgcacctgcagggcgagggcgacatcgtgcccaagatcagcgagctgagcctgtgcgacctggccggcagcgagagatgcaaggaccagaagagcggcgagagactgaaggaggccggcaacatcaacaccagcctgcacaccctgggcagatgcatcgccgccctgagacagaaccagcagaacagaagcaagcagaacctggtgcccttcagagacagcaagctgaccagagtgttccagggcttcttcaccggcagaggcagaagctgcatgatcgtgaacgtgaacccctgcgccagcacctacgacgagaccctgcacgtggccaagttcagcgccatcgccagccagctggtgcacgccccccccatgcagctgggcttccccagcctgcacagcttcatcaaggagcacagcctgcaggtgagccccagcctggagaagggcgccaaggccgacaccggcctggacgacgacatcgagaacgaggccgacatcagcatgtacggcaaggaggagctgctgcaggtggtggaggccatgaagaccctgctgctgaaggagagacaggagaagctgcagctggagatgcacctgagagacgagatctgcaacgagatggtggagcagatgcagcagagagagcagtggtgcagcgagcacctggacacccagaaggagctgctggaggagatgtacgaggagaagctgaacatcctgaaggagagcctgaccagcttctaccaggaggagatccaggagagagacgagaagatcgaggagctggaggccctgctgcaggaggccagacagcagagcgtggcccaccagcagagcggcagcgagctggccctgagaagaagccagagactggccgccagcgccagcacccagcagctgcaggaggtgaaggccaagctgcagcagtgcaaggccgagctgaacagcaccaccgaggagctgcacaagtaccagaagatgctggagcccccccccagcgccaagcccttcaccatcgacgtggacaagaagctggaggagggccagaagaacatcagactgctgagaaccgagctgcagaagctgggcgagagcctgcagagcgccgagagagcctgctgccacagcaccggcgccggcaagctgagacaggccctgaccacctgcgacgacatcctgatcaagcaggaccagaccctggccgagctgcagaacaacatggtgctggtgaagctggacctgagaaagaaggccgcctgcatcgccgagcagtaccacaccgtgctgaagctgcagggccaggtgagcgccaagaagagactgggcaccaaccaggagaaccagcagcccaaccagcagccccccggcaagaagcccttcctgagaaacctgctgcccagaacccccacctgccagagcagcaccgactgcagcccctacgccagaatcctgagaagcagaagaagccccctgctgaagagcggccccttcggcaagaagtactag

SEQ ID NO: 158886 - DNA, 678 bp, Artificial Sequence
  derived and/or modified sequence
atgagccagggcatcctgagcccccccgccggcctgctgagcgacgacgacgtggtggtgagccccatgttcgagagcaccgccgccgacctgggcagcgtggtgagaaagaacctgctgagcgactgcagcgtggtgagcaccagcctggaggacaagcagcaggtgcccagcgaggacagcatggagaaggtgaaggtgtacctgagagtgagacccctgctgcccagcgagctggagagacaggaggaccagggctgcgtgagaatcgagaacgtggagaccctggtgctgcaggcccccaaggacagcttcgccctgaagagcaacgagagaggcatcggccaggccacccacagattcaccttcagccagatcttcggccccgaggtgggccaggccagcttcttcaacctgaccgtgaaggagatggtgaaggacgtgctgaagggccagaactggctgatctacacctacggcgtgaccaacagcggcaagacccacaccatccagggcaccatcaaggacggcggcatcctgcccagaagcctggccctgatcttcaacagcctgcagggccagctgcaccccacccccgacctgaagcccctgctgagcaacgaggtgatctggctggacagcaagcagatcagacaggaggagatgaagaagctgtag

SEQ ID NO: 158887 - DNA, 2619 bp, Artificial Sequence
  derived and/or modified sequence
atgagccagggcatcctgagcccccccgccggcctgctgagcgacgacgacgtggtggtgagccccatgttcgagagcaccgccgccgacctgggcagcgtggtgagaaagaacctgctgagcgactgcagcgtggtgagcaccagcctggaggacaagcagcaggtgcccagcgaggacagcatggagaaggaggaccagggctgcgtgagaatcgagaacgtggagaccctggtgctgcaggcccccaaggacagcttcgccctgaagagcaacgagagaggcatcggccaggccacccacagattcaccttcagccagatcttcggccccgaggtgggccaggccagcttcttcaacctgaccgtgaaggagatggtgaaggacgtgctgaagggccagaactggctgatctacacctacggcgtgaccaacagcggcaagacccacaccatccagggcaccatcaaggacggcggcatcctgcccagaagcctggccctgatcttcaacagcctgcagggccagctgcaccccacccccgacctgaagcccctgctgagcaacgaggtgatctggctggacagcaagcagatcagacaggaggagatgaagaagctgagcctgctgaacggcggcctgcaggaggaggagctgagcaccagcctgaagagaagcgtgtacatcgagagcagaatcggcaccagcaccagcttcgacagcggcatcgccggcctgagcagcatcagccagtgcaccagcagcagccagctggacgagaccagccacagatgggcccagcccgacaccgcccccctgcccgtgcccgccaacatcagattcagcatctggatcagcttcttcgagatctacaacgagctgctgtacgacctgctggagccccccagccagcagagaaagagacagaccctgagactgtgcgaggaccagaacggcaacccctacgtgaaggacctgaactggatccacgtgcaggacgccgaggaggcctggaagctgctgaaggtgggcagaaagaaccagagcttcgccagcacccacctgaaccagaacagcagcagaagccacagcatcttcagcatcagaatcctgcacctgcagggcgagggcgacatcgtgcccaagatcagcgagctgagcctgtgcgacctggccggcagcgagagatgcaaggaccagaagagcggcgagagactgaaggaggccggcaacatcaacaccagcctgcacaccctgggcagatgcatcgccgccctgagacagaaccagcagaacagaagcaagcagaacctggtgcccttcagagacagcaagctgaccagagtgttccagggcttcttcaccggcagaggcagaagctgcatgatcgtgaacgtgaacccctgcgccagcacctacgacgagaccctgcacgtggccaagttcagcgccatcgccagccagctggtgcacgccccccccatgcagctgggcttccccagcctgcacagcttcatcaaggagcacagcctgcaggtgagccccagcctggagaagggcgccaaggccgacaccggcctggacgacgacatcgagaacgaggccgacatcagcatgtacggcaaggaggagctgctgcaggtggtggaggccatgaagaccctgctgctgaaggagagacaggagaagctgcagctggagatgcacctgagagacgagatctgcaacgagatggtggagcagatgcagcagagagagcagtggtgcagcgagcacctggacacccagaaggagctgctggaggagatgtacgaggagaagctgaacatcctgaaggagagcctgaccagcttctaccaggaggagatccaggagagagacgagaagatcgaggagctggaggccctgctgcaggaggccagacagcagagcgtggcccaccagcagagcggcagcgagctggccctgagaagaagccagagactggccgccagcgccagcacccagcagctgcaggaggtgaaggccaagctgcagcagtgcaaggccgagctgaacagcaccaccgaggagctgcacaagtaccagaagatgctggagcccccccccagcgccaagcccttcaccatcgacgtggacaagaagctggaggagggccagaagaacatcagactgctgagaaccgagctgcagaagctgggcgagagcctgcagagcgccgagagagcctgctgccacagcaccggcgccggcaagctgagacaggccctgaccacctgcgacgacatcctgatcaagcaggaccagaccctggccgagctgcagaacaacatggtgctggtgaagctggacctgagaaagaaggccgcctgcatcgccgagcagtaccacaccgtgctgaagctgcagggccaggtgagcgccaagaagagactgggcaccaaccaggagaaccagcagcccaaccagcagccccccggcaagaagcccttcctgagaaacctgctgcccagaacccccacctgccagagcagcaccgactgcagcccctacgccagaatcctgagaagcagaagaagccccctgctgaagagcggccccttcggcaagaagtactag

SEQ ID NO: 158888 - DNA, 480 bp, Artificial Sequence
  derived and/or modified sequence
atgagccagggcatcctgagcccccccgccggcctgctgagcgacgacgacgtggtggtgagccccatgttcgagagcaccgccgccgacctgggcagcgtggtgagaaagaacctgctgagcgactgcagcgtggtgagcaccagcctggaggacaagcagcaggtgcccagcgaggacagcatggagaaggtgaaggtgtacctgagagtgagacccctgctgcccagcgagctggagagacaggaggaccagggctgcgtgagaatcgagaacgtggagaccctggtgctgcaggcccccaaggacagcttcgccctgaagagcaacgagagaggcatcggccaggccacccacagattcaccttcagccagatcttcggccccgaggtgggccaggccagcttcttcaacctgaccgtgaaggagatggtgaaggacgtgctgaagggccagaactggctgatctacacctactag

SEQ ID NO: 158889 - protein, 376 aa, Artificial Sequence
  derived and/or modified sequence
MESYDIIANQPVVIDNGSGVIKAGFAGDQIPKYCFPNYVGRPKHMRVMAGALEGDLFIGPKAEEHRGLLTIRYPMEHGVVRDWNDMERIWQYVYSKDQLQTFSEEHPVLLTEAPLNPSKNREKAAEVFFETFNVPALFISMQAVLSLYATGRTTGVVLDSGDGVTHAVPIYEGFAMPHSIMRVDIAGRDVSRYLRLLLRKEGVDFHTSAEFEVVRTIKERACYLSINPQKDEALETEKVQYTLPDGSTLDVGPARFRAPELLFQPDLVGDESEGLHEVVAFAIHKSDMDLRRTLFANIVLSGGSTLFKGFGDRLLSEVKKLAPKDIKIKISAPQERLYSTWIGGSILASLDTFKKMWVSKKEYEEDGSRAIHRKTF

SEQ ID NO: 158890 - DNA, 1131 bp, Artificial Sequence
  derived and/or modified sequence
atggagagttatgatattatcgccaatcagccagtggtcatcgataatggctccggcgtaattaaagctgggtttgctggcgatcaaatacctaaatactgtttccccaactacgtgggacggcctaagcatatgcgcgtcatggcaggcgctctcgagggcgacctttttatcgggccaaaggctgaggagcacaggggtctgctgacaattcgttacccaatggaacacggagttgttagagattggaatgacatggagagaatctggcagtacgtctattcaaaagatcagctacagactttttcagaggagcatcccgtgctgctcactgaagccccattgaacccatccaagaatagggagaaagccgccgaggtcttttttgaaacttttaacgtgccagctcttttcatttccatgcaggccgtcttaagcctctacgctaccggaagaactaccggagtcgtcttggatagcggagacggtgtgacccatgccgtgccaatctacgagggctttgcgatgcctcactcaatcatgagggttgacatcgcaggacgagacgtgtccagatacctgcgtctcctattgagaaaggagggagtggattttcacacatctgccgaatttgaggtggtgcgtaccatcaaggagcgagcatgctacttaagtatcaaccctcagaaggatgaggcgcttgaaacagagaaggtccaatacaccctccccgacggaagcaccctcgacgtcggtccagccaggttcagagcgcccgagttgctttttcagcctgacctggtgggagacgaaagtgaagggttacacgaggtggtagctttcgccatccacaagagtgatatggacctgcgccgcaccttattcgcgaatatcgtgttatctgggggatccacgcttttcaagggctttggggatcgcctgttgtctgaagtgaagaaactcgccccaaaagacataaaaataaagattagcgcccctcaagagaggctatatagtacgtggattggtgggtctatccttgcttctcttgacacgtttaagaagatgtgggtctctaaaaaagagtatgaggaggatggctcacgcgccatccacaggaagactttttag

SEQ ID NO: 158891 - DNA, 1131 bp, Artificial Sequence
  derived and/or modified sequence
atggagagctatgacatcatcgccaaccagcctgtggtgattgacaatggcagcggggtcatcaaggccggctttgctggggaccagatccccaagtactgcttccccaactacgtgggccggcccaagcacatgagggtgatggccggggccctggagggggacctcttcatcggccccaaggccgaggagcaccggggcctgctgaccatccgctaccccatggagcacggcgtggtgcgggactggaatgacatggagcgcatctggcagtatgtgtacagcaaggaccagctgcagaccttcagcgaggagcaccctgtgctgctgacagaggcccccctgaaccccagcaagaaccgggagaaggctgctgaggtgttctttgagaccttcaacgtgcctgccctcttcatctccatgcaggccgtgctgagcctgtatgccaccggccgcaccaccggggtggtgctggacagcggagatggagtgacccatgctgtgcccatctatgagggctttgccatgccccacagcatcatgagggtggacattgctggaagagatgtgagccgctacctgcggctgctgctgaggaaggagggcgtggacttccacaccagcgctgagtttgaggtggtgaggaccatcaaggagcgggcctgctacctgagcatcaacccccagaaggatgaggccctggagacagagaaggtgcagtacaccctgcctgatggcagcaccctggatgtgggccctgcccgcttccgggcccctgagctgctcttccagcctgacctggtgggagatgagagcgagggcctgcacgaggtggtggcctttgccatccacaagagtgacatggacctgcggaggaccctgtttgccaacatcgtgctgagcggcggcagcaccctcttcaagggctttggagaccggctgctgtctgaggtgaagaagctggcccccaaggacatcaagatcaagatcagcgccccccaggagcggctgtacagcacctggattggaggcagcatcctggccagcctggacaccttcaagaagatgtgggtgtccaagaaggagtatgaagaagatggcagccgggccatccacaggaagaccttctag

SEQ ID NO: 158892 - DNA, 1131 bp, Artificial Sequence
  derived and/or modified sequence
atggagagctacgacatcatcgccaaccagcccgtggtgatcgacaatggttctggggtgatcaaagctgggtttgctggtgatcaaatccctaaatattgctttcctaactatgtgggccggcctaagcacatgcgggtgatggccggcgccctggaaggcgacttatttattggtcctaaggctgaagaacatcgcggcctgttgacaattcgatacccaatggagcacggggtggtgcgggattggaatgacatggaaagaatttggcaatacgtatactctaaggaccagctacagaccttcagcgaggagcacccagtgctcctgaccgaagccccactcaatccatccaagaacagggagaaagccgcggaggtgttcttcgaaaccttcaacgtgccggcacttttcatcagcatgcaagccgtgctgtccctgtacgcaactggcagaaccactggcgtggtgctggatagtggggacggagttacacatgccgtgcctatctatgaaggattcgccatgccacactcaatcatgcgcgtggatatcgccggaagggacgtgagtaggtatctgagactcttactccgcaaggaaggcgtggatttccatacatccgccgaatttgaagttgtgagaaccattaaggagagggcttgttacctgagcattaatccacaaaaagacgaagccctggaaacggagaaggtccagtacacacttccggacggaagtactctcgatgtgggccctgcccggttcagggcacccgaactgctttttcagccagacttagtgggtgacgaaagtgaaggattgcacgaggttgtggcctttgctattcataagtctgacatggacctgagacggacactctttgccaacattgtgctgagtggtggatccaccttattcaaaggattcggagataggctgctgtccgaggtcaagaagctggctcctaaggacattaaaattaagataagcgccccgcaggaaaggctgtactccacgtggataggggggtccatccttgccagtctcgacacctttaaaaaaatgtgggtaagtaagaaagagtatgaggaggatggcagcagggcaattcaccgtaagacattttag

SEQ ID NO: 158893 - DNA, 1131 bp, Artificial Sequence
  derived and/or modified sequence
atggaatcctacgacatcatcgccaatcaacctgtggtcatagacaatggatcaggggttataaaggccggatttgctggggaccagatcccaaaatattgttttcccaactatgtgggacggccaaagcatatgagggtgatggccggagctctggaaggagacctgtttataggtcccaaggccgaagaacaccgtggtctcctcaccattcgctacccgatggagcatggtgtggtgcgggactggaatgacatggagcggatatggcagtacgtgtacagtaaggaccagttgcagactttctccgaagagcaccccgtcctgcttaccgaggccccactcaatccatcaaaaaatagagaaaaggcagccgaggtgtttttcgagacttttaacgtgccagcactgttcatatccatgcaggctgtgttgagtctgtatgctactgggcgaactaccggtgtagtccttgactccggggatggcgtgacccacgctgtcccaatttacgagggcttcgccatgccccatagtatcatgcgggtggacatagctggacgggatgtgagtaggtatctgaggcttcttctccggaaggagggggtggatttccatacgtcagccgagtttgaggttgttcggaccattaaagaacgggcttgttatctgagcattaacccacaaaaggatgaagcacttgagacagagaaggtgcagtacacactgccagatggaagcaccctcgacgttggacccgctagattcagggcccctgagctcctatttcagcccgatctagtgggcgacgagagtgaaggcttacatgaagtggtcgccttcgccattcacaagagtgacatggatctgagacgcactctgttcgcgaatatcgtgctgagcgggggttccaccctgttcaaaggatttggagaccggctgttgtccgaggtcaagaaactcgcccctaaagacattaaaatcaagatttctgcaccgcaggaaaggctgtactcgacctggatcggcggaagcatcctggcttcacttgacacattcaagaaaatgtgggtatcgaagaaggaatacgaggaagatgggtctcgagccattcatcggaaaaccttttag

SEQ ID NO: 158894 - DNA, 2238 bp, Artificial Sequence
  derived and/or modified sequence
cccgggcacctgctgtcaatcgggccaggtgggagcgatgattggccgccgggcccgccctccagaaagccccgcggggctcgcgtaggctgcaggctcggggagggagggcagcggcgccgcgtcgggagccgccgccgtcccggtcctcccgcccgcccgcccatccggtgcctcctgcagcccgcctgctgggcagggccggcgcggcccggccatggagtcctacgacatcatcgccaaccagcctgtggtcatcgacaacggttcgggggtgattaaagctggctttgcaggagaccagattcccaaatactgtttcccaaactatgtcgggcggccgaagcacatgcgggtgatggctggagccctggagggggacctcttcatcggaccaaaagcagaggagcaccgggggctgctgaccatccgctaccccatggagcacggcgtggtgcgagactggaacgacatggaacgcatctggcagtacgtctactccaaggatcagctgcagaccttctcggaggagcatcctgtgctcctcacggaggccccgctcaacccgagtaagaaccgggagaaggcggcagaggtgttctttgagaccttcaacgtgccggccctgttcatctccatgcaggctgtgctcagtctgtacgcaacaggacgcacgacaggagtggttctagactcaggggacggggtcactcatgctgtgcccatctatgagggctttgccatgcctcactccatcatgcgggtggacattgccggccgcgacgtctcccgctacctccgactcctgctgcgcaaggaaggggttgacttccatacctcggctgagtttgaggttgtccggacaatcaaagagcgagcgtgctacctgtccatcaacccacagaaggatgaggctctggagacggagaaggtgcagtacacgttgccagacggcagcacgcttgatgtggggcctgcacgattccgggcccccgagctgctgttccagccggaccttgtcggggatgagagtgaggggctccatgaggtggtggccttcgccatacacaagtccgacatggacctgcgccggacgctgttcgccaacatcgtgctctcaggtggctcaacgcttttcaaaggcttcggagaccgattactcagtgaagtgaagaagcttgccccaaaggatatcaaaatcaagatctcagccccgcaggaacggctgtactccacatggattggcggctccatcctggcctcgctggacacttttaagaagatgtgggtgtccaaaaaggagtatgaagaggatggctcccgtgctattcatcgcaaaactttctagtgcccaaggagggcggggcatgttgggagagggggagggaggggagacagagcctttaaccctttttggtcttggctcgtatactaggcttagggtcccctgcatgccctgaacccctgggtgggtggcacagcagtgcccccctgcagccttcccctctacacaggacatgcacacacaagtaacattgagctgcatggacaggagccttgagctggcgtgtgggaattgagcgccatgtcaggctgttgtgggtatccccctggcagggccagctaggcctgtggttccctgctccgactctcagggctgcctccctgagctccagggccagaatgcctggatgcctgggtagccagtttggggagtgggctgcaaggggcagccagcagctcccactggtgtgtcactgcatccattgccacctcctgttcgtgacctgacagggtgacacagcccctttcacactctgtcctcctatcttcctgggtagatgccctggtgtagggctgagtactgaatggtcttccatccccagcaagggggtgcagcccagggtcaggcccttcagagccagggcagaggatgcacggtggctagagccgctgcactatccttttcagagcacttcatccacttgctcctccctctaccctcggcaccctgggtgggaaagggttgatgctcatcatttattgaggggaagccacttaataaggagtcagacctaaaagggggtgggggacattttcttacctcacccaagaaagaggtcgtcacttttgctgtggccagggccccacctccctctctcagatatgtacaataatttaacacggttgcctgaaaaaaacttttgtaaatcattatagtaataattatggacaagg

SEQ ID NO: 158895 - DNA, 1131 bp, Artificial Sequence
  derived and/or modified sequence
atggagagctacgacatcatcgccaaccagcccgtggtgatcgacaacggcagcggcgtgatcaaggccggcttcgccggcgaccagatccccaagtactgcttccccaactacgtgggcagacccaagcacatgagagtgatggccggcgccctggagggcgacctgttcatcggccccaaggccgaggagcacagaggcctgctgaccatcagataccccatggagcacggcgtggtgagagactggaacgacatggagagaatctggcagtacgtgtacagcaaggaccagctgcagaccttcagcgaggagcaccccgtgctgctgaccgaggcccccctgaaccccagcaagaacagagagaaggccgccgaggtgttcttcgagaccttcaacgtgcccgccctgttcatcagcatgcaggccgtgctgagcctgtacgccaccggcagaaccaccggcgtggtgctggacagcggcgacggcgtgacccacgccgtgcccatctacgagggcttcgccatgccccacagcatcatgagagtggacatcgccggcagagacgtgagcagatacctgagactgctgctgagaaaggagggcgtggacttccacaccagcgccgagttcgaggtggtgagaaccatcaaggagagagcctgctacctgagcatcaacccccagaaggacgaggccctggagaccgagaaggtgcagtacaccctgcccgacggcagcaccctggacgtgggccccgccagattcagagcccccgagctgctgttccagcccgacctggtgggcgacgagagcgagggcctgcacgaggtggtggccttcgccatccacaagagcgacatggacctgagaagaaccctgttcgccaacatcgtgctgagcggcggcagcaccctgttcaagggcttcggcgacagactgctgagcgaggtgaagaagctggcccccaaggacatcaagatcaagatcagcgccccccaggagagactgtacagcacctggatcggcggcagcatcctggccagcctggacaccttcaagaagatgtgggtgagcaagaaggagtacgaggaggacggcagcagagccatccacagaaagaccttctag

SEQ ID NO: 158896 - protein, 376 aa, Artificial Sequence
  derived and/or modified sequence
MESYDVIANQPVVIDNGSGVIKAGFAGDQIPKYCFPNYVGRPKHVRVMAGALEGDIFIGPKAEEHRGLLSIRYPMEHGIVKDWNDMERIWQYVYSKDQLQTFSEEHPVLLTEAPLNPRKNRERAAEVFFETFNVPALFISMQAVLSLYATGRTTGVVLDSGDGVTHAVPIYEGFAMPHSIMRIDIAGRDVSRFLRLYLRKEGYDFHSSSEFEIVKAIKERACYLSINPQKDETLETEKAQYYLPDGSTIEIGPSRFRAPELLFRPDLIGEESEGIHEVLVFAIQKSDMDLRRTLFSNIVLSGGSTLFKGFGDRLLSEVKKLAPKDVKIRISAPQERLYSTWIGGSILASLDTFKKMWVSKKEYEEDGARSIHRKTF

SEQ ID NO: 158897 - protein, 329 aa, Artificial Sequence
  derived and/or modified sequence
MAGALEGDIFIGPKAEEHRGLLSIRYPMEHGIVKDWNDMERIWQYVYSKDQLQTFSEEHPVLLTEAPLNPRKNRERAAEVFFETFNVPALFISMQAVLSLYATGRTTGVVLDSGDGVTHAVPIYEGFAMPHSIMRIDIAGRDVSRFLRLYLRKEGYDFHSSSEFEIVKAIKERACYLSINPQKDETLETEKAQYYLPDGSTIEIGPSRFRAPELLFRPDLIGEESEGIHEVLVFAIQKSDMDLRRTLFSNIVLSGGSTLFKGFGDRLLSEVKKLAPKDVKIRISAPQERLYSTWIGGSILASLDTFKKMWVSKKEYEEDGARSIHRKTF

SEQ ID NO: 158898 - protein, 302 aa, Artificial Sequence
  derived and/or modified sequence
MEHGIVKDWNDMERIWQYVYSKDQLQTFSEEHPVLLTEAPLNPRKNRERAAEVFFETFNVPALFISMQAVLSLYATGRTTGVVLDSGDGVTHAVPIYEGFAMPHSIMRIDIAGRDVSRFLRLYLRKEGYDFHSSSEFEIVKAIKERACYLSINPQKDETLETEKAQYYLPDGSTIEIGPSRFRAPELLFRPDLIGEESEGIHEVLVFAIQKSDMDLRRTLFSNIVLSGGSTLFKGFGDRLLSEVKKLAPKDVKIRISAPQERLYSTWIGGSILASLDTFKKMWVSKKEYEEDGARSIHRKTF

SEQ ID NO: 158899 - DNA, 1131 bp, Artificial Sequence
  derived and/or modified sequence
atggagagctacgacgtgatcgccaaccagcccgtggtgatcgacaacggcagcggcgtgatcaaggccggcttcgccggcgaccagatccccaagtactgcttccccaactacgtgggcagacccaagcacgtgagagtgatggccggcgccctggagggcgacatcttcatcggccccaaggccgaggagcacagaggcctgctgagcatcagataccccatggagcacggcatcgtgaaggactggaacgacatggagagaatctggcagtacgtgtacagcaaggaccagctgcagaccttcagcgaggagcaccccgtgctgctgaccgaggcccccctgaaccccagaaagaacagagagagagccgccgaggtgttcttcgagaccttcaacgtgcccgccctgttcatcagcatgcaggccgtgctgagcctgtacgccaccggcagaaccaccggcgtggtgctggacagcggcgacggcgtgacccacgccgtgcccatctacgagggcttcgccatgccccacagcatcatgagaatcgacatcgccggcagagacgtgagcagattcctgagactgtacctgagaaaggagggctacgacttccacagcagcagcgagttcgagatcgtgaaggccatcaaggagagagcctgctacctgagcatcaacccccagaaggacgagaccctggagaccgagaaggcccagtactacctgcccgacggcagcaccatcgagatcggccccagcagattcagagcccccgagctgctgttcagacccgacctgatcggcgaggagagcgagggcatccacgaggtgctggtgttcgccatccagaagagcgacatggacctgagaagaaccctgttcagcaacatcgtgctgagcggcggcagcaccctgttcaagggcttcggcgacagactgctgagcgaggtgaagaagctggcccccaaggacgtgaagatcagaatcagcgccccccaggagagactgtacagcacctggatcggcggcagcatcctggccagcctggacaccttcaagaagatgtgggtgagcaagaaggagtacgaggaggacggcgccagaagcatccacagaaagaccttctag

SEQ ID NO: 158900 - DNA, 990 bp, Artificial Sequence
  derived and/or modified sequence
atggccggcgccctggagggcgacatcttcatcggccccaaggccgaggagcacagaggcctgctgagcatcagataccccatggagcacggcatcgtgaaggactggaacgacatggagagaatctggcagtacgtgtacagcaaggaccagctgcagaccttcagcgaggagcaccccgtgctgctgaccgaggcccccctgaaccccagaaagaacagagagagagccgccgaggtgttcttcgagaccttcaacgtgcccgccctgttcatcagcatgcaggccgtgctgagcctgtacgccaccggcagaaccaccggcgtggtgctggacagcggcgacggcgtgacccacgccgtgcccatctacgagggcttcgccatgccccacagcatcatgagaatcgacatcgccggcagagacgtgagcagattcctgagactgtacctgagaaaggagggctacgacttccacagcagcagcgagttcgagatcgtgaaggccatcaaggagagagcctgctacctgagcatcaacccccagaaggacgagaccctggagaccgagaaggcccagtactacctgcccgacggcagcaccatcgagatcggccccagcagattcagagcccccgagctgctgttcagacccgacctgatcggcgaggagagcgagggcatccacgaggtgctggtgttcgccatccagaagagcgacatggacctgagaagaaccctgttcagcaacatcgtgctgagcggcggcagcaccctgttcaagggcttcggcgacagactgctgagcgaggtgaagaagctggcccccaaggacgtgaagatcagaatcagcgccccccaggagagactgtacagcacctggatcggcggcagcatcctggccagcctggacaccttcaagaagatgtgggtgagcaagaaggagtacgaggaggacggcgccagaagcatccacagaaagaccttctag

SEQ ID NO: 158901 - DNA, 909 bp, Artificial Sequence
  derived and/or modified sequence
atggagcacggcatcgtgaaggactggaacgacatggagagaatctggcagtacgtgtacagcaaggaccagctgcagaccttcagcgaggagcaccccgtgctgctgaccgaggcccccctgaaccccagaaagaacagagagagagccgccgaggtgttcttcgagaccttcaacgtgcccgccctgttcatcagcatgcaggccgtgctgagcctgtacgccaccggcagaaccaccggcgtggtgctggacagcggcgacggcgtgacccacgccgtgcccatctacgagggcttcgccatgccccacagcatcatgagaatcgacatcgccggcagagacgtgagcagattcctgagactgtacctgagaaaggagggctacgacttccacagcagcagcgagttcgagatcgtgaaggccatcaaggagagagcctgctacctgagcatcaacccccagaaggacgagaccctggagaccgagaaggcccagtactacctgcccgacggcagcaccatcgagatcggccccagcagattcagagcccccgagctgctgttcagacccgacctgatcggcgaggagagcgagggcatccacgaggtgctggtgttcgccatccagaagagcgacatggacctgagaagaaccctgttcagcaacatcgtgctgagcggcggcagcaccctgttcaagggcttcggcgacagactgctgagcgaggtgaagaagctggcccccaaggacgtgaagatcagaatcagcgccccccaggagagactgtacagcacctggatcggcggcagcatcctggccagcctggacaccttcaagaagatgtgggtgagcaagaaggagtacgaggaggacggcgccagaagcatccacagaaagaccttctag

SEQ ID NO: 158902 - DNA, 1131 bp, Artificial Sequence
  derived and/or modified sequence
atggagagttacgatgttatagcaaaccaacccgtggtcatagataatggcagcggggtcattaaagcaggcttcgctggagatcagatcccgaagtactgcttccctaactacgtcggtaggccaaagcacgtccgggttatggccggggccctggagggggatattttcattggcccaaaagcagaggaacaccgtggattgctttctattagatatcctatggagcacggtattgtgaaagattggaacgatatggagaggatttggcaatacgtttactctaaggatcaacttcagaccttcagtgaggagcaccctgtactcttaaccgaggcaccgctgaacccgagaaaaaatcgcgaacgcgccgctgaggtgttctttgagaccttcaacgtcccagccttattcataagcatgcaggccgttctctcgctttacgccaccggcaggaccacaggtgttgttctcgactcaggagatggggtgacacacgctgtgccaatctacgaaggtttcgcgatgcctcattctattatgagaatcgatatcgcgggccgagacgtaagcagattcctgcgcctatatttgcgcaaagagggctacgactttcatagcagcagcgagttcgaaatcgtaaaggctatcaaggagcgtgcctgctatctttctattaatcctcagaaggatgagacccttgaaacggagaaggcccaatattatcttcccgacgggtccaccatcgaaatcggtcccagccggtttcgcgcccccgaacttctgtttaggccagaccttattggtgaagaatccgagggcattcacgaagtgttggtgttcgctatccaaaaatcagacatggatctaaggcgcacactgttttccaatatcgtactgtcgggcggcagtactttgttcaaaggcttcggtgataggctgctctccgaagtcaagaagctggcaccaaaggacgttaagatacgcatctctgcgccccaggaaaggctatactccacctggatcggcgggagcattcttgcatccctggacacatttaaaaagatgtgggtatctaagaaggagtatgaggaagacggagccagaagcattcaccgcaagacattttag

SEQ ID NO: 158903 - DNA, 990 bp, Artificial Sequence
  derived and/or modified sequence
atggccggagctttggaaggagacatcttcatcggacctaaggccgaagagcacagggggctcctcagcattcgctatcccatggaacacggcatagtgaaggactggaacgacatggagaggatctggcaatacgtctactccaaagatcagttgcagacttttagcgaggagcacccagttctcctaaccgaggcaccactgaacccaagaaagaatcgcgagcgggccgccgaggtattttttgaaacctttaacgtgccggctctatttatttctatgcaggccgtgttgagcttgtacgccacggggagaacgacaggcgttgtcctggattcgggcgatggagtgacccatgcagtccccatttatgaggggttcgcaatgccccacagtatcatgcgcatcgatatcgctggacgggacgtatctaggttcctacgattgtacctgcgcaaagaagggtacgattttcattcaagctcagaattcgagatcgtgaaggccattaaggagcgcgcctgctatctgtcaattaatccccagaaagacgaaacgctggagacagagaaggctcagtactatttgcccgatggctctactattgaaataggtccatcacgttttcgagccccagagttgttgttcaggccagacctcatcggggaggagtcagagggaatacacgaagttctggtgttcgccatccagaaaagcgacatggatctgaggcgcactctgttctccaacattgtgctgtctgggggctctaccctgtttaagggcttcggcgatcgtttattgagtgaggtcaagaagctggctcccaaggacgtaaaaatccgcatcagtgccccccaggaaaggctctactccacctggatcggtgggtctatactggcttccctggatactttcaagaaaatgtgggtttctaaaaaggaatacgaggaggatggtgccaggtctatccaccgaaaaactttctag

SEQ ID NO: 158904 - DNA, 2829 bp, Artificial Sequence
  derived and/or modified sequence
tcagtggcgctagcggcggacccggctgggcagttccttccccagaaggagagattcctctgccatggagtcctacgatgtgatcgccaaccagcctgtcgtgatcgacaacggatccggtgtgattaaagctggttttgctggtgatcagatccccaaatactgctttccaaactatgtgggccgacccaagcacgttcgtgtcatggcaggagcccttgaaggcgacatcttcattggccccaaagctgaggagcaccgagggctgctttcaatccgctatcccatggagcatggcatcgtcaaggattggaacgacatggaacgcatttggcaatatgtctattctaaggaccagctgcagactttctcagaggagcatcctgtgctcctgactgaggcgcctttaaacccacgaaaaaaccgggaacgagctgccgaagttttcttcgagaccttcaatgtgcccgctcttttcatctccatgcaagctgtactcagcctttacgctacaggcaggaccacaggggtggtgctggattctggggatggagtcacccatgctgtgcccatctatgagggctttgccatgccccactccatcatgcgcatcgacatcgcgggccgggacgtctctcgcttcctgcgcctctacctgcgtaaggagggctacgacttccactcatcctctgagtttgagattgtcaaggccataaaagaaagagcctgttacctatccataaacccccaaaaggatgagacgctagagacagagaaagctcagtactacctgcctgatggcagcaccattgagattggtccttcccgattccgggcccctgagttgctcttcaggccagatttgattggagaggagagtgaaggcatccacgaggtcctggtgttcgccattcagaagtcagacatggacctgcggcgcacgcttttctctaacattgtcctctcaggaggctctaccctgttcaaaggttttggtgacaggctcctgagtgaagtgaagaaactagctccaaaagatgtgaagatcaggatatctgcacctcaggagagactgtattccacgtggattgggggctccatccttgcctccctggacacctttaagaagatgtgggtctccaaaaaggaatatgaggaagacggtgcccgatccatccacagaaaaaccttctaatgtcgggacatcatcttcacctctctctgaagttaactccactttaaaactcgctttcttgagtcggagtgtttgcgaggaactgcctgtgtgtgagtgcgtgtgtggatatgagtgtgtgtgcacatgcgagtgccgtgtggccctgggaccctgggcccagaaaggacgatgaactacctgcagtggtgatggcctgaggcctggggttgaccactaactggctcctgacagggaagagcgctggcagaggctgtgctccctcctcaggtggcctctggctggctgtgggggactccgtttactaccacagggagacagagggaggtaagccatcccccgggagaccttgctgctgaccatcctaggctgggctggccccaccctcacccccacccccagggtgccctgaggccccaggcagctgctgcctccactatcgatgcctcctgactgcacactgaggactgggactggggttgagttctgtctggttttgttgccattttggtttgggaggctggaaaagcaccccaagagctattacagagactggagtcaggagagagcaggaggccctcatgttcaccagggaacaggaccacaccggccactggaggagggcaggagcagtcctcactctgaatggctgcagagttaatgttcccagcccagtcccctttcgggggccttgggagagtttaaggcacctgctggttccaggacctcgctttccatctgttcttgttgcaatgccatcttcaaaccgttttatttattgaagtgtttgttcagttaggggctggagagagggagcttgctgcctcctgccttgctacactaatgtttacagcacctaagcttagcctccagggccccacctctcccagctgatggtgagctgacagtgtccacaggttccaggaccatttgagattggaagctacactcaaagacactcccaccaggctctttctcccttttcctcttgctcactgccctggaatcaacaggctggttgctggttagattttctgaaacaggaggtaaaatttttctttggcagaggcccctaagcaagggaggggtgttggagagccagtgcccttaagactggagaaagctgcaatttaccaagttgccttttgccactgtagctgaccaggggactaggttgtagaggtgggaaggccccctctgggctgatcttgtgccattcttgaccttggacctgcttggttaaggagggagtgggccagaccagagtgccaggagctaatggagccaggcctgactcctaggagtggtccaaaggccttcagcctagatggtgcaaagctggggccagcctgtcttcaccggcaccctcacctgtgacaccaagacccaccccaatcccagacttcacacagtattctcccccacgccgtcctatgaccaaaggcccctgccaggtgtgggccacagcagcaggtatgtgtgaaagcaacgtagcgccccgcggactgcagtgcgcttaaccaactcacctcccttctcttagcccaagcctgtccctcgcacagcctcgcacaaaccacattgcctggtggggcccagtgtactgaaataaagtcgttccgatagacacgtca

SEQ ID NO: 158905 - DNA, 909 bp, Artificial Sequence
  derived and/or modified sequence
atggagcatggtattgtcaaagattggaatgatatggagaggatctggcaatacgtatactccaaagaccagttacagaccttctctgaggagcaccctgtgctcctcacagaagccccgttaaatccacgtaagaaccgcgagcgtgctgcagaggtgttcttcgagactttcaatgttccggcccttttcatatcaatgcaggcggttttgtccctctatgcgactgggcgcactactggcgtggtgcttgacagcggagatggagtgacccacgccgtgcccatttacgaaggcttcgcaatgccgcactctatcatgcggattgacatcgccggccgtgatgtttcaagatttttacgcctctacctcaggaaagagggctacgatttccacagctctagcgagtttgagatcgtgaaggcaatcaaagagcgggcttgttatctctccattaatccacagaaagacgagaccctggaaactgagaaagcgcagtattaccttcctgacgggagcacaatagagatagggcccagcagattcagagccccagagttgttgttccggcctgacttgatcggagaagaatccgagggaattcatgaggtcctggtgttcgcaatccaaaagagcgatatggatctgcgacggactcttttctccaacattgtgctctccggtgggtctaccctgttcaaggggttcggcgaccgcctgctgagcgaggtaaaaaagcttgcccccaaggacgtgaagatccgtatctcagctccccaggaaaggctctattccacatggattggcggatccatcctcgctagtctggataccttcaaaaaaatgtgggtgagtaagaaagagtatgaggaagacggagcacgaagcatccaccggaagactttttag

SEQ ID NO: 158906 - DNA, 1131 bp, Artificial Sequence
  derived and/or modified sequence
atggagagctatgatgtgattgccaaccagcctgtggtgattgacaatggcagcggggtcatcaaggccggctttgctggggaccagatccccaagtactgcttccccaactacgtgggccggcccaagcacgtgcgggtgatggccggggccctggagggggacatcttcatcggccccaaggccgaggagcaccggggcctgctgagcatccgctaccccatggagcacggcatcgtgaaggactggaatgacatggagcgcatctggcagtatgtgtacagcaaggaccagctgcagaccttcagcgaggagcaccctgtgctgctgacagaggcccccctgaaccccaggaagaaccgggagagagctgctgaggtgttctttgagaccttcaacgtgcctgccctcttcatctccatgcaggccgtgctgagcctgtatgccaccggccgcaccaccggggtggtgctggacagcggagatggagtgacccatgctgtgcccatctatgagggctttgccatgccccacagcatcatgagaattgatattgctggaagagatgtgagccgcttcctgcggctgtacctgaggaaggagggctatgacttccacagcagcagcgagtttgaaattgtgaaggccatcaaggagcgggcctgctacctgagcatcaacccccagaaggatgagaccctggagacagagaaggcccagtactacctgcctgatggcagcaccattgaaattggccccagccgcttccgggcccctgagctgctcttccggccagacctgattggagaggagagcgagggcatccacgaggtgctggtgtttgccatccagaagagtgacatggacctgcggaggaccctcttcagcaacatcgtgctgagcggcggcagcaccctcttcaagggctttggagaccggctgctgtctgaggtgaagaagctggcccccaaggatgtgaagatccgcatcagcgccccccaggagcggctgtacagcacctggattggaggcagcatcctggccagcctggacaccttcaagaagatgtgggtgtccaagaaggagtatgaagaagatggagcccggagcatccacaggaagaccttctag

SEQ ID NO: 158907 - DNA, 990 bp, Artificial Sequence
  derived and/or modified sequence
atggccggggccctggagggggacatcttcatcggccccaaggccgaggagcaccggggcctgctgagcatccgctaccccatggagcacggcatcgtgaaggactggaatgacatggagcgcatctggcagtatgtgtacagcaaggaccagctgcagaccttcagcgaggagcaccctgtgctgctgacagaggcccccctgaaccccaggaagaaccgggagagagctgctgaggtgttctttgagaccttcaacgtgcctgccctcttcatctccatgcaggccgtgctgagcctgtatgccactggaagaaccactggagtggtgctggacagcggagatggagtgacccatgctgtgcccatctatgagggctttgccatgccccacagcatcatgagaattgatattgctggaagagatgtgagccgcttcctgcggctgtacctgaggaaggagggctatgacttccacagcagcagcgagtttgagatcgtgaaggccatcaaggagcgggcctgctacctgagcatcaacccccagaaggatgagaccctggagacagagaaggcccagtactacctgcctgatggcagcaccatcgagatcggccccagccgcttccgggcccctgagctgctcttccggccagacctgattggagaggagagcgagggcatccacgaggtgctggtgtttgccatccagaagagtgacatggacctgcggaggaccctcttcagcaacatcgtgctgagcggcggcagcaccctcttcaagggctttggagaccggctgctgtctgaggtgaagaagctggcccccaaggatgtgaagatccgcatcagcgccccccaggagcggctgtacagcacctggattggaggcagcatcctggccagcctggacaccttcaagaagatgtgggtgtccaagaaggagtatgaggaggatggagcccggagcatccacaggaagaccttctag

SEQ ID NO: 158908 - DNA, 909 bp, Artificial Sequence
  derived and/or modified sequence
atggagcacggcatcgtgaaggactggaatgacatggagcgcatctggcagtatgtgtacagcaaggaccagctgcagaccttcagcgaggagcaccctgtgctgctgacagaggcccccctgaaccccaggaagaaccgggagagagctgctgaggtgttctttgagaccttcaacgtgcctgccctcttcatctccatgcaggccgtgctgagcctgtatgccaccggccgcaccaccggggtggtgctggacagcggagatggagtgacccatgctgtgcccatctatgagggctttgccatgccccacagcatcatgagaattgatattgctggaagagatgtgagccgcttcctgcggctgtacctgaggaaggagggctatgacttccacagcagcagcgagtttgaaattgtgaaggccatcaaggagcgggcctgctacctgagcatcaacccccagaaggatgagaccctggagacagagaaggcccagtactacctgcctgatggcagcaccattgaaattggccccagccgcttccgggcccctgagctgctcttccggccagacctgattggagaggagagcgagggcatccacgaggtgctggtgtttgccatccagaagagtgacatggacctgcggaggaccctcttcagcaacatcgtgctgagcggcggcagcaccctcttcaagggctttggagaccggctgctgtctgaggtgaagaagctggcccccaaggatgtgaagatccgcatcagcgccccccaggagcggctgtacagcacctggattggaggcagcatcctggccagcctggacaccttcaagaagatgtgggtgtccaagaaggagtatgaagaagatggagcccggagcatccacaggaagaccttctag

SEQ ID NO: 158909 - DNA, 1131 bp, Artificial Sequence
  derived and/or modified sequence
atggagagctacgacgtgatcgccaaccagcccgtggtgatcgacaatggcagcggagttattaaagccggatttgccggagaccagatcccaaagtactgctttcctaattatgtgggtaggccaaaacacgtgagggttatggctggggcattagaaggcgacatctttattggcccaaaggccgaagagcaccgtggcttgttgtcgatccggtatcctatggaacacggtatcgttaaagactggaacgacatggagcgtatatggcaatatgtgtattctaaggatcagctgcagacattctccgaggaacatccagtccttttgacagaggccccacttaatcctaggaaaaatcgggagagggctgccgaagtttttttcgagaccttcaacgttcctgctttgtttataagcatgcaggcagttttatctctctacgctaccggcaggactaccggtgtagttctggacagcggcgacggagtgactcatgccgttcctatctatgagggctttgccatgccccatagcatcatgcggattgacatagccgggcgggacgtgtcgcgtttcctgagactctatttacgtaaagaagggtatgactttcactctagctccgagtttgagattgtgaaggctattaaggagagggcttgctacctgagcatcaatccacagaaagacgaaacccttgagacagagaaagcccagtattacctgccggacgggagcacaattgaaattggcccctcccgatttcgggcacctgagctgctcttccgcccggatcttatcggcgaggagtctgagggaatacacgaggtcctggtattcgctatacaaaagagcgatatggacctccgcaggacacttttttcaaatatcgtccttagcggcgggtcaaccctgtttaagggcttcggcgatcgccttctgagcgaggtgaagaagctggcccctaaggatgttaagatcagaatctccgcccctcaggagcgcctgtacagcacttggataggcggaagcattcttgcgtccctggataccttcaagaagatgtgggtatccaaaaaagagtatgaggaagatggagcgcggagcatacatcgcaagaccttttag

SEQ ID NO: 158910 - DNA, 990 bp, Artificial Sequence
  derived and/or modified sequence
atggccggcgccctggagggcgacatcttcatcggccccaaggccgaggagcaccgaggcttgctgagcatacgatatcccatggagcacggcatagttaaagactggaacgacatggagcgcatctggcagtatgtctacagcaaagatcaactgcagacattttcagaagagcaccctgtgctgttgacagaagcccctcttaatccaaggaagaaccgggaaagagccgccgaggtattcttcgaaacattcaatgtccctgccctctttatctcgatgcaggccgtgttatcattgtatgctaccggccgcactaccggtgtggtccttgattctggtgacggtgtgacgcatgccgtgcccatttacgaaggcttcgctatgcctcactcaattatgaggatagacatcgccggccgcgacgtgagccgctttctccggctgtacctgcgcaaggagggctatgactttcactcaagtagtgaatttgaaattgtcaaggcaatcaaggaaagggcatgttacctctctataaatccccagaaagatgaaactctggaaaccgaaaaagctcagtattatctgccagatgggtccacaatcgaaataggcccaagccgttttcgggcaccggaactgctttttagacctgatctgattggcgaggaatccgagggaattcatgaagtgttagtttttgccatacagaagagcgacatggatctgaggaggaccctcttcagcaatattgtactcagtggggggagcacactgtttaagggatttggggacaggctgctttcagaagtcaagaagttagctcccaaggatgtcaaaattcggataagcgcgcctcaggaaagattgtactcgacatggatcggaggcagtattctcgcctctttagacacctttaagaaaatgtgggtgagcaaaaaggagtacgaggaagacggtgctcgtagcattcaccggaagacattctag

SEQ ID NO: 158911 - DNA, 909 bp, Artificial Sequence
  derived and/or modified sequence
atggagcacggcatcgtgaaggactggaacgacatggagcggatctggcagtacgtgtattctaaagaccaactgcagaccttctctgaggaacatccggttctgcttacggaggcccccctgaacccgcggaagaacagggagcgagcggcggaagtattttttgaaaccttcaacgtccccgccttgtttattagcatgcaggctgttctgtccctgtacgctaccggaaggactacaggcgtggtcctcgactctggcgatggcgttacccatgctgtacccatttatgagggattcgccatgcctcattccatcatgaggatcgacatcgctgggagggatgtgtctcgcttcctgcgcctgtatctcagaaaagagggctatgacttccactcctccagtgagtttgaaattgtgaaggcgatcaaagagcgcgcttgctatttatcaattaaccctcagaaagacgaaactctggaaacagagaaagctcagtattatctccctgacgggagtacaatcgagatcggccctagtcgtttcagagctcctgagctgttgttcagacctgatcttataggggaagagagtgagggaattcatgaggtgctggtcttcgcaatacagaaaagcgacatggacctgcgtaggaccttattttccaacatcgtgctttctggtggctcaacattattcaaaggcttcggcgacaggctgctttcagaggtgaagaaactggcaccgaaagacgttaagatcagaatcagcgccccccaggaacgcctttatagcacatggattgggggttctatcctagcctccctcgatacctttaagaagatgtgggtgtccaaaaaagaatatgaagaggacggggccaggtccattcataggaagaccttctag

SEQ ID NO: 158912 - DNA, 1131 bp, Artificial Sequence
  derived and/or modified sequence
atggagagttacgacgtcatcgccaatcagccagtcgtcattgacaacggcagcggggtaattaaggctggcttcgcaggcgaccagatcccgaagtactgcttcccaaactacgtgggacgcccaaaacacgtcagagtcatggctggcgctctggagggcgacatcttcatcggtccaaaggctgaggaacacaggggcttgctctctattcggtacccaatggagcacggcatcgtcaaggattggaatgatatggagcgcatctggcagtatgtctattctaaggaccagctgcagaccttctccgaggagcaccccgtcctgctgacggaagctccgctgaatccccgaaagaaccgtgagcgagcagctgaggtcttcttcgaaactttcaacgttccagcactgtttatttccatgcaagcagtgctctccctatatgcaacgggcagaactaccggtgtggtactggatagtggtgacggcgttacccacgcagtgccaatttacgagggcttcgcaatgccacatagtattatgcggatagatatcgcgggtcgggacgtgtctaggttccttaggctttacctacgaaaagagggatatgattttcacagcagctctgagttcgaaatagtaaaggctataaaggaaagggcttgttacctaagcattaatccacaaaaagacgagactctagagaccgagaaagcacagtattacctgcccgatggctctacaatagaaataggcccttcacgttttagagcccctgagttactcttccggcctgatctcattggggaggaatcagaagggattcatgaggtcctggtgttcgccatacaaaagtccgatatggatctgagacgaactctgttctctaatattgttctaagtggaggctcaacattatttaagggattcggcgatcgcctgctaagtgaagtcaaaaagctcgctcccaaagatgtgaagattcgcatctcagctccacaggaacggctgtattcaacctggataggcggatctatcctggccagcctggatacgttcaaaaaaatgtgggtgtctaaaaaagagtatgaagaagatggcgctcgttcaattcatcggaaaacattttag

SEQ ID NO: 158913 - DNA, 990 bp, Artificial Sequence
  derived and/or modified sequence
atggcaggcgctctggagggagatatctttattgggccaaaagccgaagaacaccgtggcctgctgagtatacgttacccgatggagcacggcatcgtcaaagactggaatgacatggaaaggatctggcagtacgtgtattctaaagaccagctgcagacattttcagaagagcatcctgtgctcctaacggaggcgccactcaaccctcgaaagaatagggagcgcgctgcagaagtgttcttcgagaccttcaatgtacccgctctcttcatctccatgcaagccgtgctgagcctgtacgctactggacgcactaccggcgtagtgcttgatagcggagacggggtgacacacgctgttcctatttatgaaggcttcgcaatgccacactccatcatgcgcatagacatcgccggaagagacgtgtccagatttcttagactctacttgcggaaggagggctatgattttcatagctcctctgaatttgagatcgtaaaagccatcaaggagagagcatgctacttgagtattaacccgcagaaggatgaaaccctcgaaacagagaaggctcagtactatttaccggatggaagcactattgaaatcgggcctagccgttttcgggctcccgagctcctattccgcccagatttaatcggcgaagagtcagaaggcatccacgaagttctggtgtttgcaatccagaaatcagacatggacctgcgcaggacactgttctccaatattgtcttatctggcggaagcaccctgttcaaaggcttcggcgacaggttattaagtgaggtcaaaaagttggcccctaaagacgtgaagatcaggatttccgctcctcaagaacggctctacagcacctggattggaggttcaatcctggcgtcattggacacgttcaagaagatgtgggtttctaagaaagaatatgaggaggatggagcaaggtccatccaccgtaagaccttctag

SEQ ID NO: 158914 - DNA, 909 bp, Artificial Sequence
  derived and/or modified sequence
atggagcacggcattgtgaaagattggaacgacatggagcgcatttggcagtacgtctattcaaaagaccaactgcagactttcagcgaggaacaccccgtgctgctgactgaggcacctcttaatccacgtaagaatcgagagcgcgcagcggaagtttttttcgagactttcaatgtgcccgcactgttcattagtatgcaggctgttttgtcactgtatgcaaccgggagaacaacgggcgtcgttcttgactctggcgacggagttacacacgctgtccccatctacgaaggtttcgctatgccacattctatcatgaggatagacattgcgggacgggacgtgtcccggttcttgagactgtacctcagaaaagaagggtacgattttcactcatcatcagagtttgaaattgtgaaggccattaaggagagagcatgttacctaagtatcaacccgcagaaggacgagaccctagaaactgagaaggcccagtattatctgcccgatgggtcaacaatcgagattgggccatccaggttcagggctcctgaattgttgttcagacccgatctcattggcgaggagtccgaaggtatccatgaagtgctggtgttcgccatccaaaagtccgacatggacttacgacgcaccttgtttagtaatatcgtactcagcggaggttccacgctttttaaggggttcggcgaccgcctgttgagcgaggtcaagaaactggcccctaaggacgtgaagattaggatcagcgccccacaggagaggctgtatagtacctggattgggggttctatcctcgcctctctggacaccttcaagaagatgtgggtttccaagaaagaatatgaggaggacggtgcaagatccattcatagaaaaactttttag

SEQ ID NO: 158915 - DNA, 1397 bp, Artificial Sequence
  derived and/or modified sequence
agtggcgctagcggcggacccggctgggcagttccttccccagaaggagagattcctctgccatggagtcctacgatgtgatcgccaaccagcctgtcgtgatcgacaactgtgggccgacccaagcacgttcgtgtcatggcaggagcccttgaaggcgacatcttcattggccccaaagctgaggagcaccgagggctgctttcaatccgctatcccatggagcatggcatcgtcaaggattggaacgacatggaacgcatttggcaatatgtctattctaaggaccagctgcagactttctcagaggagcatcctgtgctcctgactgaggcgcctttaaacccacgaaaaaaccgggaacgagctgccgaagttttcttcgagaccttcaatgtgcccgctcttttcatctccatgcaagctgtactcagcctttacgctacaggcaggaccacaggggtggtgctggattctggggatggagtcacccatgctgtgcccatctatgagggctttgccatgccccactccatcatgcgcatcgacatcgcgggccgggacgtctctcgcttcctgcgcctctacctgcgtaaggagggctacgacttccactcatcctctgagtttgagattgtcaaggccataaaagaaagagcctgttacctatccataaacccccaaaaggatgagacgctagagacagagaaagctcagtactacctgcctgatggcagcaccattgagattggtccttcccgattccgggcccctgagttgctcttcaggccagatttgattggagaggagagtgaaggcatccacgaggtcctggtgttcgccattcagaagtcagacatggacctgcggcgcacgcttttctctaacattgtcctctcaggaggctctaccctgttcaaaggttttggtgacaggctcctgagtgaagtgaagaaactagctccaaaagatgtgaagatcaggatatctgcacctcaggagagactgtattccacgtggattgggggctccatccttgcctccctggacacctttaagaagatgtgggtctccaaaaaggaatatgaggaagacggtgcccgatccatccacagaaaaaccttctaatgtcgggacatcatcttcacctctctctgaagttaactccactttaaaactcgctttcttgagtcggagtgtttgcgaggaactgcctgtgtgtgagtgcgtgtgtggatatgagtgtgtgtgcacatgcgagtgccgtgtggccctgggaccctgggcccagaaaggacgatgaactacctgcagtggtgatggcctgaggcctggggttgaccactaactggctcctgacagggaagagcgctggcagaggctgtgctccctcctca

SEQ ID NO: 158916 - DNA, 1422 bp, Artificial Sequence
  derived and/or modified sequence
actgcgcatgcgtgtcagtggcgctagcggcggacccggctgggcagttccttccccagaaggagagattcctctgccatggagtcctacgatgtgatcgccaaccagcctgtcgtgatcgacaacggatccggtgtgattaaagctggttttgctggtgatcagatccccaaatactgctttccaaactagagcaccgagggctgctttcaatccgctatcccatggagcatggcatcgtcaaggattggaacgacatggaacgcatttggcaatatgtctattctaaggaccagctgcagactttctcagaggagcatcctgtgctcctgactgaggcgcctttaaacccacgaaaaaaccgggaacgagctgccgaagttttcttcgagaccttcaatgtgcccgctcttttcatctccatgcaagctgtactcagcctttacgctacaggcaggaccacaggggtggtgctggattctggggatggagtcacccatgctgtgcccatctatgagggctttgccatgccccactccatcatgcgcatcgacatcgcgggccgggacgtctctcgcttcctgcgcctctacctgcgtaaggagggctacgacttccactcatcctctgagtttgagattgtcaaggccataaaagaaagagcctgttacctatccataaacccccaaaaggatgagacgctagagacagagaaagctcagtactacctgcctgatggcagcaccattgagattggtccttcccgattccgggcccctgagttgctcttcaggccagatttgattggagaggagagtgaaggcatccacgaggtcctggtgttcgccattcagaagtcagacatggacctgcggcgcacgcttttctctaacattgtcctctcaggaggctctaccctgttcaaaggttttggtgacaggctcctgagtgaagtgaagaaactagctccaaaagatgtgaagatcaggatatctgcacctcaggagagactgtattccacgtggattgggggctccatccttgcctccctggacacctttaagaagatgtgggtctccaaaaaggaatatgaggaagacggtgcccgatccatccacagaaaaaccttctaatgtcgggacatcatcttcacctctctctgaagttaactccactttaaaactcgctttcttgagtcggagtgtttgcgaggaactgcctgtgtgtgagtgcgtgtgtggatatgagtgtgtgtgcacatgcgagtgccgtgtggccctgggaccctgggcccagaaaggacgatgaactacctgcagtggtgatggcctgaggcctggggttgaccactaactggctcctgacagggaagagcgctggcagaggctgtgctccctcctcaggtggcctctggctggctgt

SEQ ID NO: 158917 - protein, 192 aa, Artificial Sequence
  derived and/or modified sequence
MGNISSNISAFQSLHIVMLGLDSAGKTTVLYRLKFNEFVNTVPTIGFNTEKIKLSNGTAKGISCHFWDVGGQEKLRPLWKSYSRCTDGIIYVVDSVDVDRLEEAKTELHKVTKFAENQGTPLLVIANKQDLPKSLPVAEIEKQLALHELIPATTYHVQPACAIIGEGLTEGMDKLYEMILKRRKSLKQKKKR

SEQ ID NO: 158918 - DNA, 579 bp, Artificial Sequence
  derived and/or modified sequence
atgggcaacatcagcagcaacatcagcgccttccagagcctgcacatcgtgatgctgggcctggacagcgccggcaagaccaccgtgctgtacagactgaagttcaacgagttcgtgaacaccgtgcccaccatcggcttcaacaccgagaagatcaagctgagcaacggcaccgccaagggcatcagctgccacttctgggacgtgggcggccaggagaagctgagacccctgtggaagagctacagcagatgcaccgacggcatcatctacgtggtggacagcgtggacgtggacagactggaggaggccaagaccgagctgcacaaggtgaccaagttcgccgagaaccagggcacccccctgctggtgatcgccaacaagcaggacctgcccaagagcctgcccgtggccgagatcgagaagcagctggccctgcacgagctgatccccgccaccacctaccacgtgcagcccgcctgcgccatcatcggcgagggcctgaccgagggcatggacaagctgtacgagatgatcctgaagagaagaaagagcctgaagcagaagaagaagagatag

SEQ ID NO: 158919 - DNA, 579 bp, Artificial Sequence
  derived and/or modified sequence
atggggaacatttcctccaatatttcggcctttcagtctctgcatatcgtaatgctagggctcgacagcgctggtaagacaaccgtgctctatcgtctgaagttcaatgagtttgttaacacagtgcccaccatcgggtttaatacagagaagataaaactttcaaacggcactgcaaaggggatatcctgtcacttttgggatgttgggggccaagagaagctgaggccgctttggaaaagctatagtcggtgcaccgatggcatcatttatgtcgttgattcggtggacgtcgaccgtctggaggaggctaagaccgagctccacaaagttacaaagttcgctgaaaaccaagggacgcccctgctagtcatcgcaaataagcaggacctcccaaaatcactccctgttgccgagattgaaaaacagctggcactccacgagttaatccccgcgaccacgtaccatgtccaaccagcatgcgccattattggtgagggactgactgaggggatggataagctgtatgagatgatcctaaaacgcagaaaaagcctaaaacaaaaaaagaagagatag

SEQ ID NO: 158920 - DNA, 579 bp, Artificial Sequence
  derived and/or modified sequence
atgggcaacatcagcagcaacatcagcgccttccagagcctgcacatcgtgatgctgggcctggacagcgctgggaagaccaccgtgctgtaccgcctgaagttcaatgaatttgtgaacacagtgcccaccatcggcttcaacacagagaagatcaagctgagcaatggaacagccaagggcatcagctgccacttctgggatgtgggcggccaggagaagctgcggcccctgtggaagagctacagccgctgcacagatggcatcatctacgtggtggacagcgtggatgtggaccggctggaggaggccaagacagagctgcacaaggtgaccaagtttgctgagaaccagggcacccccctgctggtgattgccaacaagcaggacctgcccaagagcctgcctgtggccgagattgagaagcagctggccctgcacgagctgatcccagccaccacctaccacgtgcagcctgcctgtgccatcatcggggagggcctgacagagggcatggacaagctgtatgagatgatcctgaagaggaggaagagcctgaagcagaagaagaagaggtag

SEQ ID NO: 158921 - DNA, 4013 bp, Artificial Sequence
  derived and/or modified sequence
gactgtgaggctgccgagcggacagcgactcccggggaagcccgcgctccgggagcgggagcgggagcaggagcaggagcagcgccgtcccaggccagaggcgagcgccgggcgccgggagagcggagagcccgggcagctgccggagcgcgggggcgcggcccgaggaaaccacagagcgagcccaggcctggggagggcgccgaacatctgaggcggcttcgcgggagacaaagccgcgcgtagagacgcgatgcccgccgatcgcgagcccggccggcgagggcgcggggactgcggcgtctgagcgcgccaagccgtgcgcccgcggggacgccgagccccggggccggtgcgggcggcggcgggcggggcccaggtgcgcccggccgcgtcgggcccgtgactgctcggggggcggcgccctcccgccgcagccgcagtggctggcgccgcagccaggagccatgggcaacatctcctctaacatctcggccttccagtccctgcatatcgtcatgttgggcttggactcggccggcaagaccacggtgctctaccggctcaagttcaacgagttcgtgaacacggtgcccaccatcggcttcaacaccgagaagatcaagctgagcaacggcacggccaagggcatcagctgccacttctgggacgtgggcggccaggagaagctgcggccgctgtggaagtcctacagccgctgcacggacggcatcatctacgtggtggactcggtggacgtggaccggctggaggaggccaagacggagctgcacaaggtgaccaagttcgccgagaaccagggcacgccgctgctggtcatcgccaacaagcaggacctgcccaagtcgctgccggtggcagagattgagaagcagctggcgctgcacgagcttatcccggccaccacctatcacgtccagccggcgtgcgccatcatcggcgagggcctcaccgagggcatggacaagctctatgagatgatcctgaaacgcaggaagtccctcaagcagaagaagaagcggtaatgcgcccggagcgaccggggagcgagcgagtgcgtcaagaaagaatgaatggatggatggatggttggatggatggatggatggatgagcgagaacccgcgcccgcgaacaaagagcgaaccaaagcgatgcttcgaatttttaaaacggaatctctgcacccaaatgcaggactggtgacttaaggagctgcgaagtctgatttaccggcctactctcgacctgccccccacccccagctcaggggaccttttgtctgaacgccagagctactgaccaggtcggggggccgcggtggggagtggaagagccggtcctgctgtccgccctcccagccccaggtggaaggctcagttgtcggaaagacaaaagcgatttcttcccactcctgcagggccagaagttcaggctgccccgcctccactgggggatcgcacctgtgaattacctgaggtatgcatttcccagaaccgtgggcgtacccaccttggggggcatgttggttctggggggaccacctctccttgcattcaggggctgtgaagctgagtaattttcggtcacagggcaggcccctgttgaaatttcatttgtcctgctctgggcccaaaggtggtggtggtttgggtcatcagaggactgcctgggacggttcagcgggcacggagcgctgtgctggcctggctggggatggccgcggaggtgcccttttcctggtgctttgtggtggctgcagaagaccagttttgttgagaactgcttttcagcctggaatcagacatcttccagatggtttggaccctgtccatgtgtaggtcattatcacacaaagagaccaataaaaataaaaaaaataaaaaaaaaaaaagacgaactattggaggtggtggccaatgatgcatttactgtttgcaggatagttaaaggtgtttaaagggtaaggcttttggtgtaaatgctggatggggtgtgtgtgtgtgtggatatagggacctccctctgtactgtgtactgtgtaatcggcattaatacctagactcatatgtatggaattttaaattctcttagcctactgattggtttggatgagcacaccagctgcaggtgtgtgctgaattgcaagatggtatttttttttttaaccaagggatgtctcttgtaatactaaccgcgtgataatgggttttcagacatgatgaaaaaaaaaaacttttacaaatgaatacttaccttagaaatattcaccttaggaaaaaagactttgctctgcccttttatattcctttatgctgcaagtggtgacatgttcagatttctaatttggttcattgtggcctatctggtttaagtctttcattaaaaatgtctcgttagagtatttgatgtcatgcaccaaaaaaataaaaccccaccttgttgcaaaagctgacctcgttgcatggaattaaaagagaaggaaaaacacaaggatgaagtctttccgaattcattcttgtgggaactggccttcggagccagccagcactttgggcaaatgcaaacaacaatgagtgcttgagataaaagaaagtgtgacgtcatggtcactggtactcaggcacttcacagtttacttgaaagaggctttggaaaatagataaagtgaaagaagaataaatacatatttttaataatgtaattttaaaaatcctttataatcaggactgagtcttggtttgcagaagctgtcacttaccctgaaacacagtatcaaaagggaaacttaaaacatactgtttgatttttttatttcctcttacaatccatgttttcaggtagaattatgactttccccccattgttacacatttctttacaaaggaggcctgtagaaattggacacgatcatgcttgagcatgtgagttagtcaaattatgagtccctgcctattgtccattacacaccgaatgttaatttaagaaccagaggcagaagttctggcttcctgcttgaaacccaattcttatatgaaattttttaaaagcagaaacctagcagcccatctgctttttctcttttgtcggtgtatttggtacccctccaatgctggtctttttgtagaaactcagtagagaaagtctagctaagcagtgttgaaaagcctgcaagatttcagtttacatatcgacagcatatccactgatttctaaatgggctggtcccatcatctgaagattctgtatagaattattaaaaaaaaaatccatctttctttattttcttcacatgcgacaatttcttaagcactttgacattttggtagttccacactattgagagaataatatatttattttgtgacattgcagatgccaaatactgtaaccttctcatgataacaatacttaggttcaagatcactgttcaaaccctgtcatgctttaaaactgatgcgagatgattttgttttttgcataatcaatacttaagggtgcaatcaactgttagtaattgtgcagtaaagtaaagccctgtggtgtatcaactactagttaagagtctcagttgatttctgtaatgtttgacctaataatagcccgtttcgtctctgacccaacagaggaagcacagatcaaatcaccttggagtggtcaccagggggacagggagccccccaccaatgtatcaatgggtgatttatgatgccttctgccctttggcgagtgaatgggtttcccataggggaagttggcctccctccgtgagctttggaaatgttttctaatagacacagggaggccagttctgtttcagagcaattatcttcccaaattctctgttctggtgttggaactgtgtgccctggtttctgttttcctttctactgctgtaattctctgtctcatcatccttctcttttgtttccatagccttttataatgcatatatgatgctgtgaacagaaataaattatttatacaatcaaa

SEQ ID NO: 158922 - DNA, 579 bp, Artificial Sequence
  derived and/or modified sequence
atgggcaacatcagcagcaacatcagcgccttccagagcctgcacattgtcatgttaggactggactctgctggcaaaaccacagtgttgtaccgtctgaagtttaacgagtttgtcaatacggtgccaacaattggctttaataccgaaaagattaaactgtctaacggaactgccaaaggcatatcttgccatttttgggacgttggcggccaggagaaactaagacccctctggaagtcctactcgagatgtacggacggaatcatctacgtggtagattcagtggatgtcgaccgcctagaggaagctaagacggaactgcataaggtgactaaattcgctgaaaaccagggcacaccacttctagtgatagctaacaaacaggatctgcccaagagcctgcccgtagccgaaatagagaaacagctggcattgcacgagttgataccggctaccacctatcacgtccagcccgcttgtgccattatcggcgaaggactgacggagggtatggacaaactgtatgagatgattcttaagagacggaagagtttgaagcaaaaaaagaagcggtag

SEQ ID NO: 158923 - DNA, 579 bp, Artificial Sequence
  derived and/or modified sequence
atggggaatattagctcaaatatatccgcttttcagtcactccatatcgtgatgctgggccttgattctgccggaaaaaccaccgtcctctatcgcctgaagttcaacgagtttgttaacaccgtcccgaccatcggtttcaatacggaaaaaataaagttgagtaatggcacagcgaaaggaatttcttgccatttttgggacgtaggtggccaggaaaagctgcgcccactgtggaaatcctacagccggtgcactgatggcattatttacgtcgtagatagcgtggacgtcgatagattagaggaggccaagaccgagctacacaaggtcaccaaattcgcggagaatcaaggaacgccccttttagtgatcgcaaacaaacaggatcttcctaagtctttaccagtcgccgaaatagagaagcagttggccctccacgagctcattccagcgacgacttaccatgtacaacccgcatgtgcaatcattggggaaggcctgacagaggggatggacaagttgtacgagatgatcttaaagcggagaaaatcactcaaacagaaaaaaaaaagatag

SEQ ID NO: 158924 - protein, 797 aa, Artificial Sequence
  derived and/or modified sequence
MGTLGKAREAPRKPSHGCRAASKARLEAKPANSPFPSHPSLAHITQFRMMVSLGHLAKGASLDDLIDSCIQSFDADGNLCRSNQLLQVMLTMHRIVISSAELLQKVITLYKDALAKNSPGLCLKICYFVRYWITEFWVMFKMDASLTDTMEEFQELVKAKGEELHCRLIDTTQINARDWSRKLTQRIKSNTSKKRKVSLLFDHLEPEELSEHLTYLEFKSFRRISFSDYQNYLVNSCVKENPTMERSIALCNGISQWVQLMVLSRPTPQLRAEVFIKFIQVAQKLHQLQNFNTLMAVIGGLCHSSISRLKETSSHVPHEINKVLGEMTELLSSSRNYDNYRRAYGECTDFKIPILGVHLKDLISLYEAMPDYLEDGKVNVHKLLALYNHISELVQLQEVAPPLEANKDLVHLLTLSLDLYYTEDEIYELSYAREPRNHRAPPLTPSKPPVVVDWASGVSPKPDPKTISKHVQRMVDSVFKNYDHDQDGYISQEEFEKIAASFPFSFCVMDKDREGLISRDEITAYFMRASSIYSKLGLGFPHNFQETTYLKPTFCDNCAGFLWGVIKQGYRCKDCGMNCHKQCKDLVVFECKKRAKNPVAPTENNTSVGPVSNLCSLGAKDLLHAPEEGPFTFPNGEAVEHGEESKDRTIMLMGVSSQKISLRLKRAVAHKATQTESQPWIGSEGPSGPFVLSSPRKTAQDTLYVLPSPTSPCPSPVLVRKRAFVKWENKDSLIKSKEELRHLRLPTYQELEQEINTLKADNDALKIQLKYAQKKIESLQLEKSNHVLAQMEQGDCS

SEQ ID NO: 158925 - protein, 749 aa, Artificial Sequence
  derived and/or modified sequence
MMVSLGHLAKGASLDDLIDSCIQSFDADGNLCRSNQLLQVMLTMHRIVISSAELLQKVITLYKDALAKNSPGLCLKICYFVRYWITEFWVMFKMDASLTDTMEEFQELVKAKGEELHCRLIDTTQINARDWSRKLTQRIKSNTSKKRKVSLLFDHLEPEELSEHLTYLEFKSFRRISFSDYQNYLVNSCVKENPTMERSIALCNGISQWVQLMVLSRPTPQLRAEVFIKFIQVAQKLHQLQNFNTLMAVIGGLCHSSISRLKETSSHVPHEINKVLGEMTELLSSSRNYDNYRRAYGECTDFKIPILGVHLKDLISLYEAMPDYLEDGKVNVHKLLALYNHISELVQLQEVAPPLEANKDLVHLLTLSLDLYYTEDEIYELSYAREPRNHRAPPLTPSKPPVVVDWASGVSPKPDPKTISKHVQRMVDSVFKNYDHDQDGYISQEEFEKIAASFPFSFCVMDKDREGLISRDEITAYFMRASSIYSKLGLGFPHNFQETTYLKPTFCDNCAGFLWGVIKQGYRCKDCGMNCHKQCKDLVVFECKKRAKNPVAPTENNTSVGPVSNLCSLGAKDLLHAPEEGPFTFPNGEAVEHGEESKDRTIMLMGVSSQKISLRLKRAVAHKATQTESQPWIGSEGPSGPFVLSSPRKTAQDTLYVLPSPTSPCPSPVLVRKRAFVKWENKDSLIKSKEELRHLRLPTYQELEQEINTLKADNDALKIQLKYAQKKIESLQLEKSNHVLAQMEQGDCS

SEQ ID NO: 158926 - DNA, 2394 bp, Artificial Sequence
  derived and/or modified sequence
atggggacactgggaaaggctagggaggccccgcggaagcctagtcacggatgccgagccgcctcgaaagccaggctggaggccaagcccgccaatagccccttcccatcccacccctcactagctcatatcacccaattccgaatgatggtttcactgggtcatctcgcaaagggcgcaagcttggatgatctcattgacagctgtattcaatccttcgacgctgatgggaatctttgtcgcagcaatcagcttttgcaggtgatgctaaccatgcatcggatcgtgatttcgtccgccgagctactccagaaggtgatcaccttgtacaaggatgccctagctaagaattcccccggcctctgtttaaagatctgctacttcgtgcgatactggattactgaattctgggtaatgtttaagatggacgcctccctgaccgatacaatggaggagtttcaagagcttgtcaaggctaagggcgaggagctgcactgccgtttgattgacaccacacagataaatgcccgcgactggtctcgcaaattgacccagcgcataaagagcaacacgtcaaagaaaaggaaggtgtctctactattcgaccatctggaacccgaggagctatcagagcacctgacctatcttgagtttaaatcgtttcggcgcataagtttcagtgattaccagaattacttggtaaactcttgcgtgaaggagaaccccaccatggagcggtcgattgctctttgtaatgggatctcacagtgggttcagttgatggtactgagtcgccccacgccccagcttagggctgaagtcttcattaaatttatacaggtggcgcagaaactgcatcagttgcagaacttcaatactttaatggctgtgatcggaggattatgtcattcctcaatcagtcgtctgaaggaaacaagtagccacgtcccacacgagatcaataaagtcttgggcgagatgaccgagctactgtcttcttcacgaaactacgacaactacaggagggcatacggagaatgcacggacttcaagatacctatcttgggtgttcatctgaaggacctgatttccctttacgaagctatgcccgattatctcgaagacggcaaggtgaatgtgcacaaacttctggccctatacaaccacatttccgagctagttcaattacaggaggtagccccccctctggaggcaaacaaggacctggtgcacttactgacccttagcctggacctttactatactgaggacgagatctacgagttgtcctacgcacgagagccgagaaatcacagagccccacctcttaccccaagcaaaccccccgtggtggtggactgggcctccggagtgagccccaagcccgatcccaagactatctccaagcacgtccagaggatggtcgacagcgtttttaagaattacgaccacgaccaagacgggtacatttctcaggaggaattcgagaaaatcgccgctagtttccccttttccttttgcgtcatggataaggacagagaaggcctcatctctagagacgaaatcactgcatactttatgcgggcatcatcgatttatagcaaactcggcctcggtttcccgcataatttccaggaaactacataccttaaaccgaccttttgcgacaactgcgctggattcctctggggggtgatcaaacagggatataggtgcaaagactgcggaatgaattgccacaagcagtgtaaggatctcgtcgtgtttgagtgtaagaaacgggccaagaacccagttgcccccaccgagaataatacatccgtgggcccagtttccaatctttgttccctaggagctaaggatttactccacgcgcctgaggaagggcctttcaccttccccaatggagaagccgtcgagcatggagaggagagtaaggacaggaccattatgctcatgggcgtgagctcccagaaaatctcactaaggctcaagcgcgcggttgcacacaaggccacacaaaccgagagccagccttggatcggaagcgagggacccagtggccctttcgttcttagctcgcccaggaagacggcgcaagatactctgtatgtccttccaagcccaacctccccatgcccaagcccagttttggtccgcaaacgcgcctttgtgaaatgggagaacaaagactctctgatcaagtcaaaggaggagctacgccatctccggctgccgacataccaggagctggagcaggagattaacacactcaaagcagacaacgatgcgttaaagatccagcttaagtacgcccagaagaagatagagtctctgcagctggagaagagcaaccatgttctcgcacaaatggagcagggagattgttcatag

SEQ ID NO: 158927 - DNA, 2250 bp, Artificial Sequence
  derived and/or modified sequence
atgatggtgtcgctcggtcacctggccaagggcgccagcctggatgatctgattgattcctgtatccagagctttgacgcagacggtaatctgtgccggagtaatcagctcttgcaagtaatgctgactatgcaccggatcgtcatctcatctgcggagcttctccagaaggttattactctttataaagacgcactcgcaaagaattctccaggattgtgcctcaaaatctgttattttgtgagatattggatcaccgagttttgggtgatgttcaagatggatgcgagtctcaccgacacgatggaggaatttcaggagctcgtgaaggcaaaaggggaggaactacattgccgcctgatcgatacgactcagattaatgccagagactggtctagaaagctcacacaacgcattaaatctaacactagtaagaagcggaaggtctctctcctctttgatcatctggagccagaagaactctctgagcacctcacctaccttgaatttaaatcgttcagaagaataagcttcagcgactatcagaactatctcgtcaatagctgtgtgaaggagaatccaaccatggagcgcagcatcgctctttgtaatggaatcagccagtgggtgcagctgatggtcctgagcaggcccacccctcagctaagggccgaagtgttcataaaattcatccaagtcgctcagaaattgcatcagttacagaatttcaatactttgatggcggtgatcgggggtctatgccactcaagcatttcaaggctcaaagaaaccagcagccatgtgcctcatgaaattaataaggtattgggtgagatgacggagctgctgagctcctctcgaaactacgataactaccgacgcgcctatggagagtgtactgacttcaagatacccatcctgggcgtccatctcaaggatcttatttcactctatgaggcaatgcccgattacctagaagacggtaaagtcaacgtacacaaactgctcgccctctataatcacatatctgaactggttcagctgcaggaggtggcaccaccgcttgaggccaacaaggatttggtccatctgctcacgctgagcctggatctgtattacacggaggatgaaatctacgaactgtcgtacgcgcgcgaaccaaggaatcaccgagccccacctctaacccctagcaagcctccagtcgtggtggactgggcttctggggtgtccccaaagcctgaccccaagacgatcagcaagcacgtgcagagaatggtcgatagcgtgttcaaaaactatgaccacgaccaggacggctacatctcccaagaagagtttgaaaagatagccgcttccttccccttttccttttgcgtcatggataaggacagggaaggcctgatctctagggatgaaatcaccgcgtatttcatgagagcttccagcatctatagtaagctaggtctcggatttccacacaactttcaagaaaccacctacttgaagcctaccttctgtgacaactgtgccggtttcctctggggagtgatcaaacagggatatagatgcaaagactgcgggatgaattgccacaaacagtgtaaagaccttgtggttttcgagtgcaagaagcgcgccaagaatccggttgcgccaactgaaaacaacacgtcagtgggtccggtttccaacttatgctccttaggcgcaaaagatctgcttcacgcccccgaggaaggcccctttacttttccaaatggggaggcagtcgagcacggtgaggagagcaaagatagaacgattatgctgatgggcgtttcaagccagaaaatctccctacggctgaagcgcgcagttgcccataaggccactcagacagaaagtcaaccatggatcggctcagagggcccttcaggaccattcgtcctgtccagtccgaggaaaacagcgcaagacaccctgtatgttttgccgtcacccacctccccctgtcccagcccagtcctcgtgcgaaagagagcgttcgttaaatgggagaataaagatagccttataaagtcaaaggaggaattaaggcacctgagacttcccacatatcaggagctggagcaggagattaatacgctgaaagccgataacgacgccctgaagatccagctcaaatatgcccaaaagaagattgaaagcctccagttagagaaatccaaccatgtccttgctcaaatggaacagggtgactgcagttag

SEQ ID NO: 158928 - DNA, 2394 bp, Artificial Sequence
  derived and/or modified sequence
atgggcaccctgggcaaggcccgggaggcccccaggaagcccagccacggctgccgggccgccagcaaggcccggctggaggccaagccagccaacagccccttccccagccaccccagcctggcccacatcacccagttcaggatgatggtgtccctgggccacctggccaagggggccagcctggatgacctgattgacagctgcatccagagctttgatgctgatggcaacctgtgccgcagcaaccagctgctgcaggtgatgctgaccatgcacagaattgtcatcagcagcgctgagctgctgcagaaggtgatcaccctgtacaaggatgccctggccaagaacagccctggcctgtgcctgaagatctgctactttgtgcgctactggatcacagagttctgggtgatgttcaagatggatgccagcctgacagacaccatggaggagttccaggagctggtgaaggccaagggggaggagctgcactgccgcctgattgacaccacccagatcaatgcccgggactggagcaggaagctgacccagaggatcaagagcaacaccagcaagaagaggaaggtgtccctgctgtttgaccacctggagcctgaggagctgtctgagcacctgacctacctggagttcaagagcttccgccgcatctccttcagtgactaccagaactacctggtgaacagctgtgtgaaggagaaccccaccatggagaggagcatcgccctgtgcaatggcatcagccagtgggtgcagctgatggtgctgagccggcccaccccccagctgcgggcagaggtgttcatcaagttcatccaggtggcccagaagctgcaccagctgcagaacttcaacaccctgatggccgtcatcggcggcctgtgccacagcagcatcagccggctgaaggagaccagcagccacgtgccccatgagatcaacaaggtgctgggggagatgacagagctgctgagcagcagcagaaattatgacaactacagaagagcctacggggagtgcacagacttcaagatccccatcctgggcgtgcacctgaaggacctgatcagcctgtatgaggccatgccagactacctggaggatggcaaggtgaatgtgcacaagctgctggccctgtacaaccacatcagcgagctggtgcagctgcaggaggtggccccacccctggaggccaacaaggacctggtgcacctgctgaccctgagcctggacctgtactacacagaagatgagatctatgagctgtcctatgcccgggagcccaggaaccaccgggccccacccctgacccccagcaagccccctgtggtggtggactgggccagcggcgtgagccccaagccagaccccaagaccatcagcaagcacgtgcagaggatggtggacagcgtcttcaagaactatgaccatgaccaggacggctacatcagccaggaggagtttgagaagattgctgccagcttccccttctccttctgtgtgatggacaaggaccgggagggcctcatcagcagagatgagatcacagcctacttcatgagggccagcagcatctacagcaagctgggcctgggcttcccccacaacttccaggagaccacctacctgaagcccaccttctgtgacaactgtgccggcttcctgtggggcgtcatcaagcagggctaccgctgcaaggactgtggcatgaactgccacaagcagtgcaaggacctggtggtgtttgagtgcaagaagagggccaagaaccctgtggcccccacagagaacaacacctctgtgggccctgtgagcaacctgtgcagcctgggcgccaaggacctgctgcacgcccctgaggagggccccttcaccttccccaatggagaggccgtggagcacggggaggagagcaaggacaggaccatcatgctgatgggcgtgagcagccagaagatcagcctgcggctgaagagagctgtggcccacaaggccacccagacagagagccagccctggattggcagcgagggccccagcggcccctttgtgctgagcagccccaggaagacagcccaggacaccctgtatgtgctgcccagccccaccagcccctgccccagccctgtgctggtgaggaagagggcctttgtgaagtgggagaacaaggacagcctcatcaagagcaaggaggagctgcggcacctgcggctgcccacctaccaggagctggagcaggagatcaacaccctgaaggctgacaatgatgccctgaagatccagctgaagtatgcccagaagaagattgagagcctgcagctggagaagagcaaccacgtgctggcccagatggagcagggcgactgcagctag

SEQ ID NO: 158929 - DNA, 2250 bp, Artificial Sequence
  derived and/or modified sequence
atgatggtgtccctgggccacctggccaagggggccagcctggatgacctgattgacagctgcatccagagctttgatgctgatggcaacctgtgccgcagcaaccagctgctgcaggtgatgctgaccatgcacagaattgtcatcagcagcgctgagctgctgcagaaggtgatcaccctgtacaaggatgccctggccaagaacagccctggcctgtgcctgaagatctgctactttgtgcgctactggatcacagagttctgggtgatgttcaagatggatgccagcctgacagacaccatggaggagttccaggagctggtgaaggccaagggggaggagctgcactgccgcctgattgacaccacccagatcaatgcccgggactggagcaggaagctgacccagaggatcaagagcaacaccagcaagaagaggaaggtgtccctgctgtttgaccacctggagcctgaggagctgtctgagcacctgacctacctggagttcaagagcttccgccgcatctccttcagtgactaccagaactacctggtgaacagctgtgtgaaggagaaccccaccatggagaggagcatcgccctgtgcaatggcatcagccagtgggtgcagctgatggtgctgagccggcccaccccccagctgcgggcagaggtgttcatcaagttcatccaggtggcccagaagctgcaccagctgcagaacttcaacaccctgatggccgtcatcggcggcctgtgccacagcagcatcagccggctgaaggagaccagcagccacgtgccccatgagatcaacaaggtgctgggggagatgacagagctgctgagcagcagcagaaattatgacaactacagaagagcctacggggagtgcacagacttcaagatccccatcctgggcgtgcacctgaaggacctgatcagcctgtatgaggccatgccagactacctggaggatggcaaggtgaatgtgcacaagctgctggccctgtacaaccacatcagcgagctggtgcagctgcaggaggtggccccacccctggaggccaacaaggacctggtgcacctgctgaccctgagcctggacctgtactacacagaagatgagatctatgagctgtcctatgcccgggagcccaggaaccaccgggccccacccctgacccccagcaagccccctgtggtggtggactgggccagcggcgtgagccccaagccagaccccaagaccatcagcaagcacgtgcagaggatggtggacagcgtcttcaagaactatgaccatgaccaggacggctacatcagccaggaggagtttgagaagattgctgccagcttccccttctccttctgtgtgatggacaaggaccgggagggcctcatcagcagagatgagatcacagcctacttcatgagggccagcagcatctacagcaagctgggcctgggcttcccccacaacttccaggagaccacctacctgaagcccaccttctgtgacaactgtgccggcttcctgtggggcgtcatcaagcagggctaccgctgcaaggactgtggcatgaactgccacaagcagtgcaaggacctggtggtgtttgagtgcaagaagagggccaagaaccctgtggcccccacagagaacaacacctctgtgggccctgtgagcaacctgtgcagcctgggcgccaaggacctgctgcacgcccctgaggagggccccttcaccttccccaatggagaggccgtggagcacggggaggagagcaaggacaggaccatcatgctgatgggcgtgagcagccagaagatcagcctgcggctgaagagagctgtggcccacaaggccacccagacagagagccagccctggattggcagcgagggccccagcggcccctttgtgctgagcagccccaggaagacagcccaggacaccctgtatgtgctgcccagccccaccagcccctgccccagccctgtgctggtgaggaagagggcctttgtgaagtgggagaacaaggacagcctcatcaagagcaaggaggagctgcggcacctgcggctgcccacctaccaggagctggagcaggagatcaacaccctgaaggctgacaatgatgccctgaagatccagctgaagtatgcccagaagaagattgagagcctgcagctggagaagagcaaccacgtgctggcccagatggagcagggcgactgcagctag

SEQ ID NO: 158930 - DNA, 2394 bp, Artificial Sequence
  derived and/or modified sequence
atgggcaccctgggcaaggcccgggaggccccccggaagcccagccatgggtgtagggctgcgtcaaaagcccggctcgaggccaagccagccaactcgccatttccgtcgcacccatcactggcccatataacgcagttcagaatgatggtgtcattgggacacctcgccaaaggagccagtctagacgatcttattgattcttgcatacagagcttcgatgcggatggaaatttgtgccggagcaatcagcttctgcaagtgatgctaacaatgcaccgtattgtgatctcaagcgcagaactgttgcagaaagtcatcaccctctacaaggatgccctggcaaagaattccccagggctctgcttgaaaatatgttactttgttcgctactggatcactgagttctgggtgatgttcaaaatggatgcatcactgacagacaccatggaagagttccaggaactggtcaaagcaaagggcgaagaactgcactgtaggctgattgatacgacccagataaacgcccgagactggagtagaaagctgacccaaagaattaagagcaatacaagtaaaaaaagaaaagtgagtttattatttgatcatctcgaaccagaagagttaagcgagcacctcacgtaccttgagtttaagagcttccggagaataagcttcagtgactaccagaactacctggtgaactcctgtgtcaaagagaatcccaccatggaacgcagcatagccttgtgcaatggtatctctcagtgggtccaacttatggtattatctcgcccaaccccacagctccgggctgaagtgttcattaagtttatccaggtggcccagaaactgcaccaactgcagaacttcaacacactgatggccgttattggtggcctgtgccatagctccatcagccgactcaaggaaacaagctcccacgtgccacacgagattaataaagtgctgggtgagatgaccgaactcctcagtagttccagaaactacgacaactataggagagcttacggcgagtgtacggatttcaaaatcccaattttgggggttcacctcaaagatttgatctccctgtatgaggcaatgccagattatcttgaagacggaaaggtgaacgtgcataagctactcgcgctatacaaccacataagtgaactggtccagctgcaagaagtggccccacctctggaggccaacaaggatctggtgcacctgctgacactgtcgctggacctctactataccgaagatgagatctatgaactgtcatatgcccgggagccccggaaccaccgggcgccccccctcacaccatctaaacctccagtggtggtagattgggcatctggcgtgtcccccaaacccgacccaaaaactatctcaaagcatgtgcagagaatggttgacagtgtgtttaaaaactatgaccacgaccaggacgggtacatctcgcaggaagagtttgagaagatcgcagcatcttttccattctctttttgcgtgatggacaaagatagggaaggtcttatttcccgcgacgagattacagcctacttcatgagggctagcagtatttacagcaagctgggcctcggcttccctcacaatttccaggaaactacttatctgaaacctaccttctgtgacaattgtgcaggcttcctttggggagtgatcaagcaaggctatcgttgcaaagactgtgggatgaactgtcacaagcagtgcaaggatttggtagtgttcgaatgcaagaagagagctaagaatcccgtggcccctactgagaataacaccagcgtggggcccgtttccaacctttgttctttaggggcaaaggacttactgcacgcgcctgaggagggtccattcaccttcccaaacggtgaagccgtggaacacggcgaggaatctaaggaccgcacaataatgctgatgggtgtctctagccagaaaatatcgttacgactaaagcgcgccgtggcccataaagcaacacagacagagtcccagccttggatcggatccgagggccccagcggccctttcgtcctatcttctccccggaagacagcacaggacacactgtacgtccttccttcacctacatccccctgtccgagcccagtgctggtaagaaaacgagcttttgtcaagtgggagaataaggattctcttatcaagtctaaggaagagctccgacatttgagactgcccacttatcaggaactcgaacaggagattaacacacttaaggcggacaatgacgctctgaaaattcagttaaaatacgcccagaagaagatcgagagtctccaacttgagaagtccaaccacgtcctggcacagatggagcaaggagactgctcatag

SEQ ID NO: 158931 - DNA, 2250 bp, Artificial Sequence
  derived and/or modified sequence
atgatggtgagcctgggccacctggccaagggcgccagcctggacgacttgatcgattcctgtatccaatccttcgacgccgatggaaacctctgtcgatcgaatcagttgctccaggttatgctcactatgcacagaatcgtgatctcgtccgccgagctcctgcaaaaagttatcactctgtacaaggatgcactggccaagaattctccaggactgtgtctcaagatctgctattttgtgcgatattggataactgagttttgggtcatgttcaagatggatgctagcctgacagacacaatggaggagttccaggaattagtgaaggctaagggggaagaactacattgcaggcttattgacactactcagattaatgcccgggattggtctcgcaaactcactcagaggatcaagtcaaatacgtctaaaaaaagaaaagtttccctgctgtttgatcatcttgagcccgaggaactttctgaacaccttacatacctggagttcaaatccttccgaagaatctccttctcagattaccagaactatctcgtgaattcttgtgtgaaggagaacccaaccatggagagatccattgccctgtgtaacggtattagccagtgggtccaactcatggtgctgtcacgccctaccccacaattgcgggcagaggtctttataaaattcatccaggtcgcccagaagttgcaccaactccaaaatttcaacaccctgatggccgtgattggcggtctctgtcatagtagcatatcaagactaaaagagaccagttcacacgtcccacacgagatcaacaaggtcctgggcgaaatgacagagctcctcagcagttctcgtaactatgacaactaccgtagagcgtacggcgagtgcaccgactttaaaatccctatactgggcgtccatctgaaagatctgatttcgctctatgaggccatgcctgattacctggaggatggtaaagtgaatgtgcataagttactcgctctttacaatcacatcagcgaacttgtacagctccaggaggtcgcgccacccctggaggctaacaaggaccttgtgcatctgctcacgctatcattggacttatactataccgaggacgagatttatgagctgtcatacgcaagagagccaagaaaccacagggccccccccttaacccccagcaagcccccagtcgtggttgactgggcctctggtgttagcccaaaacccgaccccaaaacaatttccaagcatgtccagcgaatggtcgactccgtgttcaagaactacgatcacgaccaggacggctacatttcacaggaggagtttgagaagatagctgcgagcttccccttctcattttgtgtaatggacaaggatcgggagggactgatatcccgtgatgagatcaccgcctactttatgagggccagctctatttattctaaactgggactcggcttcccgcataacttccaggagaccacctacttgaagccgacgttctgcgataattgcgccggattcctgtggggcgttataaagcagggctacaggtgcaaggattgtggcatgaattgccataagcagtgcaaagaccttgtggtgtttgagtgcaagaagagagctaagaacccagtagctccaaccgagaacaacacctccgtggggcccgtctcgaacttatgcagcctcggcgctaaggatctgctgcacgcacccgaagaaggaccgtttacattccccaacggtgaagctgtggagcacggcgaggagagtaaggacagaaccatcatgctcatgggggtatcaagccagaagatctctctccgcttaaagcgcgccgtcgcacataaagcaacacagacggagtctcagccttggatcggcagcgaagggcctagtggtcctttcgtcctttctagcccgcggaagaccgcccaggacacactgtacgttctcccctctccgacctcaccctgtccttcacccgtcctggtccgtaaaagagccttcgtcaaatgggaaaataaggattccctcataaagagtaaagaagaattgcgccacctccgacttccaacgtaccaggagctggagcaagaaataaatactcttaaggctgacaatgatgccctgaaaatccaactcaagtatgcccagaagaagatcgagtccctgcagcttgaaaaaagcaaccacgtgctcgcccagatggaacagggtgactgctcatag

SEQ ID NO: 158932 - DNA, 2394 bp, Artificial Sequence
  derived and/or modified sequence
atgggtaccctggggaaggcccgagaagcaccacgaaaaccatcacacggttgtcgcgctgccagtaaagcccgattagaggccaagcctgctaattctccctttcctagtcatcctagcctagcccacattacgcagttcagaatgatggtgagcctgggacacctggccaagggtgcgtctctggacgacctgattgatagttgcatccagagttttgatgcggacgggaatctttgtcggtccaatcagctgttgcaggtaatgctgacaatgcaccgcatcgtgatctcatcggcagagttgctgcagaaggttatcaccctgtataaagacgctctagccaaaaattcccctggcttgtgccttaaaatctgctattttgtacggtactggatcaccgaattctgggtgatgttcaaaatggacgcgtcgctcaccgataccatggaggagtttcaggaattggtgaaagctaaaggcgaagagctgcactgtaggttaatcgatacaacacaaataaatgccagagactggtcaaggaagctcacccagcggatcaagagtaacactagcaagaagaggaaagtgagcttgctctttgaccaccttgagcccgaggaactttctgagcacctcacatatctcgagttcaagtcctttaggcgtatctctttctctgattatcagaattaccttgtgaactcctgcgtgaaggagaatccgactatggaacgctccatcgcgctgtgcaacggaatctctcagtgggttcagctgatggtgcttagcaggcctacaccccagctgagggcagaagtttttatcaaatttatccaggtggcacaaaagctccatcaactgcagaactttaataccttgatggcagttatcggcggactttgccatagctctatttctcgattaaaggaaaccagcagccacgtccctcacgagattaacaaggtattgggcgagatgacagagctgctgtccagttcccggaactatgataattacaggcgggcttacggcgaatgtactgatttcaaaatcccaatactgggcgtacatttgaaagaccttattagcctttatgaagcaatgccggactatctggaagatgggaaagtgaacgtacacaagcttctggctctgtataaccacattagtgagctagtacagcttcaggaggtggccccacctctcgaggctaacaaggaccttgtccacctcctgacgctttctctggatctgtattacaccgaggacgagatatatgagctgagttacgctagagaacccagaaatcacagggctccccctcttacacctagcaagcctccagtcgtggttgattgggcaagcggagtcagccccaaacctgatccaaaaaccattagcaaacatgttcagagaatggtcgattccgttttcaaaaactacgaccatgatcaagatggctacatatcccaggaggagttcgaaaagattgccgcatcatttcccttctcattttgcgtgatggataaggaccgcgagggtctcatttctagagatgagatcaccgcttatttcatgcgggcaagcagcatctatagtaaactggggttaggctttcctcataactttcaggagactacctacctgaagccgactttttgtgacaactgcgccggtttcctatggggagttattaagcagggttataggtgcaaagattgcggcatgaactgtcataaacagtgtaaagacctggtcgtattcgaatgtaagaagcgggctaagaacccagttgcacctactgaaaacaatacctctgtcgggccagtgagtaatctgtgttcgcttggagccaaagatttgttacacgcacccgaggagggcccattcacttttccaaatggagaagccgttgagcatggggaggagtcaaaggatcggaccattatgcttatgggggtaagctcccagaaaattagcctgagactgaagcgcgcagtcgcccacaaggccacgcagacagaatcccaaccctggatcggctccgaagggcctagcggcccattcgtgctgtcatctcccagaaagaccgctcaggacacactgtacgtgctcccttcccctacctcaccgtgtcccagccccgtgcttgtgcgaaaacgtgcgtttgtgaaatgggagaacaaagacagtctaataaagagcaaggaggagctgaggcacctgcgcctgccaacctatcaggaattagagcaggagataaatactcttaaagccgataatgatgctcttaagatccagttgaagtacgcacagaaaaagattgagagtctccaattggagaagtccaatcacgtcctggcacagatggagcagggtgactgctcctag

SEQ ID NO: 158933 - DNA, 2250 bp, Artificial Sequence
  derived and/or modified sequence
atgatggtgtctctaggtcatcttgctaagggtgcttcattggatgatctgattgatagctgtatccaatcatttgatgccgacgggaatctctgtcggagcaaccaactcttacaggttatgttgaccatgcatcgtatcgtaatttcctcagccgaactactccaaaaggtgatcaccctgtacaaggacgcactggcaaaaaattcaccaggcctctgtttaaaaatctgctatttcgtaaggtactggatcacagagttctgggttatgttcaaaatggacgcatctcttactgacaccatggaagagtttcaggagctggtgaaggcaaagggggaagaattacactgtcgactaattgacacaacccagattaatgcacgcgactggtcccgtaagcttactcagcggatcaaaagcaacacatcaaagaaaaggaaggtgtctcttttgtttgaccacctggaaccagaggaactgtccgaacacctgacttacctggagtttaagtcctttaggcggatctcttttagcgactatcagaactacctggtgaatagctgtgtaaaagaaaaccccacgatggagagaagcatcgctctttgcaacggtatcagccaatgggttcagttgatggtgctgagcagacccacacctcagctacgcgctgaagtattcatcaaattcatccaggtcgctcagaaactgcatcagctccaaaatttcaacacactaatggccgtgatcgggggtctctgtcacagttcgatctctagattaaaggaaacctcttctcatgtgccacatgaaattaacaaggtgctaggtgagatgacggaactgctgtcctcctctaggaactatgacaattaccgccgtgcatatggcgagtgcactgactttaagattcccatactgggagtgcatctcaaagatttgataagtctttacgaagctatgcctgactacctggaagatggtaaagtcaatgttcacaagctcttggccctttacaaccacatcagcgaactggtccagctacaggaagtggctcccccactagaggccaacaaggacctggtgcatttgctcacactctcactcgatctgtattataccgaagacgagatttatgaactctcatacgcccgtgagcctcgaaatcacagagcccctccccttactccaagcaaacccccagttgtggtggattgggcgagcggagtgagtcccaaaccggatcctaagacaattagcaaacatgtgcagaggatggtggattccgtgttcaagaactatgatcatgaccaggatggatacatatcacaggaagaatttgaaaaaatcgccgctagcttccctttttctttttgcgtgatggataaggacagagaggggcttatctcaagggacgaaattaccgcctacttcatgagagcatcctcaatctactccaaactggggctgggattccctcacaacttccaagagacaacatacttgaagccaacgttctgtgataattgtgccggttttctgtggggtgttatcaaacaggggtatcgttgtaaagactgtggtatgaattgtcacaaacagtgcaaggacctagtagtgttcgagtgtaagaagcgggcaaagaaccctgtcgccccaaccgagaataatacctcagtgggacctgtgtcaaacctctgcagcttgggtgctaaagacctcttgcatgctcccgaagaggggcctttcacctttcctaacggcgaggcagtggagcatggagaggagagcaaggaccgaacaattatgctaatgggcgtttcaagccaaaagatttccctgagactgaaacgcgctgttgcacacaaggcaactcaaaccgaaagccagccgtggataggaagcgaggggcctagtggtccatttgtgctatcttccccacgaaagactgcacaagatacgctgtatgtgctgccctccccaaccagcccctgcccaagccctgtgttagtgcggaagcgggcatttgtgaagtgggagaacaaagattccctgatcaaatctaaggaggaacttcgccatctacgattgcctacataccaggaactcgaacaggagattaataccctcaaagccgataatgatgctcttaagatccagctaaagtatgcccagaagaaaattgagtctttgcagttagagaagtcaaaccacgtgttagctcagatggagcaaggcgactgctcttag

SEQ ID NO: 158934 - DNA, 5023 bp, Artificial Sequence
  derived and/or modified sequence
acaaagtttgtgcctgcggtgcacctcggtcgggctcgccgggctcgagggctggcgggcgccggggctacgaggcccgggggggagagagccggcaggcggcggcggtggtggcgggggcgatgcgccgcgcccggccgcgctaggtgagccggcaccgggagcgcgggccgcggccatgggcaccctgggcaaggcgagagaggctccgcggaaaccttcccatggctgcagagctgcctctaaagcaagactagaggcaaagccagccaacagccccttcccctcccatcccagcttggcccacatcacccagttccgaatgatggtgtctctgggacatttagccaaaggagccagcctggacgatctcattgacagctgcattcaatcttttgatgcagatggaaacctgtgtcgaagtaaccaactgttgcaagtcatgctgaccatgcaccgaattgtcatctcctctgcagaactgctccaaaaagttatcaccctctataaggatgctttggcaaagaattcaccaggactttgcctgaagatctgttattttgtaaggtattggataacagaattctgggtcatgtttaaaatggacgccagcttgacagacactatggaggagtttcaggaactggtgaaagctaagggtgaggagttacattgccgcctgattgacacaactcaaatcaatgcccgtgactggtccaggaaacttactcaaaggataaaatcaaataccagcaagaaacggaaagtctccctgctctttgaccatctggaaccagaagagctatccgagcacctcacctaccttgagttcaagtctttccggaggatatcgttctctgattatcagaattaccttgtaaatagctgtgtgaaggaaaaccccaccatggagcgatctattgctctgtgcaacggcatctcccagtgggtacaactgatggttctcagccgccccacgccgcagctccgagcagaagtcttcatcaagttcatccaggtggctcagaagctccaccaactacagaacttcaatacactgatggctgtgataggtgggctgtgtcacagctcaatctcgaggctcaaggagacaagttcgcatgtcccacatgaaatcaataaggttctcggtgagatgactgagctgctgtcctcctccagaaactacgacaattaccggcgagcctatggagagtgcaccgacttcaagatccccattctgggtgtgcatctcaaggacctcatctccctgtatgaagccatgcctgactatctggaggacgggaaagtgaacgtccataagctactggccctatacaatcatatcagtgaattggtccagctgcaagaggtggccccacccttggaggctaacaaggacttggtacacttgctgacgttatccctggatctttactacactgaggatgaaatctatgagctttcctatgcccgggaaccaaggaaccacagagctccaccactaacaccttcaaagccaccagtagtagtggactgggcttctggagtgtctcccaaacctgatccaaaaaccattagcaaacacgtccagaggatggtggattctgtcttcaagaactatgatcacgaccaggatggatacatttctcaggaagaatttgaaaagattgctgcgagttttccattttccttctgtgtgatggacaaagacagggaaggcctcatcagcagggatgagatcacagcctacttcatgagagccagctcaatctattccaagctgggcctgggctttcctcacaacttccaagagaccacctacctgaagcccactttttgtgacaactgtgctggatttctctggggagtgatcaaacaaggatatcgatgtaaagactgcgggatgaactgtcacaaacaatgcaaagatctggttgtgtttgagtgtaagaagcgagccaagaacccagtagctcccacagagaacaacacttctgtggggccagtgtccaacctttgctcattgggagccaaagatctgctccatgcacctgaggaaggaccttttacattccctaatggggaggctgtggaacatggtgaggagagtaaggatcggaccatcatgctgatgggagtgtcctcacagaagatttctcttcggctgaagagggctgttgcccacaaggccacccagactgaatcacagccttggattggcagtgagggcccttcaggtccctttgtgctgtcttccccaaggaagacagcccaggatactctatatgtgcttcccagtcccacctctccatgtcctagcccagtcttggtcagaaagcgggcttttgtcaagtgggagaataaagactccctcataaaatcaaaggaggagctccgtcacctcagactgcctacctaccaagaactggaacaggaaataaatactctgaaagcagataatgatgccctaaagatccaactgaaatatgcacagaagaaaatagaatccctccagcttgaaaaaagcaatcatgtcttagctcaaatggagcagggtgactgttcttagcccagaaactaagtagcacaatctgtagatgagtatagtgatctcatttcctaaactgtaatgcacagacctgaggaactttacactgaccagctttaaaacagtactttaaaaggaaaagcctgttactgtttatttacctaaaagattcctaatgtgcagcactgttttctctttcagttagttgactcaaagggggaaaactaaagaatgcaaaacttttgctattcataccactgatgttcatcaaaagtatgcgatctaaaacatgactatcatttcctgacaatggggcatctcggtggcctgcctggctgattcttccttaaaactaaaatctctggaaaatggatttgcttcttaccctgtgttttctgcaaactgacttactttgttccagccaaagcttgctaataatagaaaactacccatattccaaaagtagatttcctctgtatcccagcatactttgtgaacctggctccttcttcactacctcagatctaatcaattagtccatgtaccctccttcctcactacagtcataacacatgagcatatctacctagaagccaatttctactgatgtagccacaactttttagaggcctattaaacatgacgttatccaattgcaggtcaacttatagttgtagccttacaacttacaggcatcagaaaataagtaatcaaattaggtacctggaaacatagctattaccatctcatattactgtctaattaaaataaacataacgcaaacatgtttgtccttatatattctacagtggatagaattaggaattgatggcttaaaaaaaaaagtctatgaagagtctgtttaactcttcatgttccatctttctcttctgaagtaaactattttgaaagttctctttttgaaatgaatttgtgcttaactgtcttcactattaatactatttagaaataagctaattggatcagtggcttaaataatagctgactgtgtgtacatatgtatataatatgtatatacaatatcaggcatgcatgtggcttggaattttgtttcctccataaaatgtggaagtgaattaaacaagttttagtcatttatacaaagtcacaaatataaagttcagtttgtcacaagattaaattgctcacaaggtaaaattgtattgtttggcaaaatcacaagtaacaatcctgtgagttttctattatgaaggttaataataaatgggctcatttagttgcctgggcacctattcacaaattcatttgtcagcctctttttagttctcttaaaaaaaaaaaaatcatatgatcattttcctttttgggggtacttagcttccatgcctataaagtctggtaccagactgacttgaaattcataaacaagttgtccaattgccaagaatatgttaacaattaaaagttccaaactaaagccaatagcaccaagtcttcataagaatacaaagtatacatacagtattgcttacctggaggattcagatcatttaggaattctctttgatgaaagatcagttcccatttgagttcctccttgcactgagttttagtgatatagaactagcttgtagttagtgtttcattacattataaagaatagttttacacacgtatttaccgttttccaaatttaaactcagaaatacccaaagcaggcctgcttaagcccactacctggcatataaacttatagtaacactttgttactttctttttaataggacaagcatgagttaggacaaactctaaaaattcatattcttcactattcttgttttcctttgattgatatagaccaaagatggtgtactctaattttttaaaacagtaatggaacacaatttttttcattcttcctcctctccattcgaagtaaagatccccagttagtttttatataaataatctatagggattcaaaaggtgtcacagtccacttaattagtcaaattagcaatggctaaacagtatcaagtactgcagaatttatcactgaaatggataagaggaaatagtttagtcacaggtttttacagtccagcaagggccaaagaggtatagtatacaagttaatagtatttgtgttgagcaacatggggctagtgggatcacagaaatctggaaaaaaaaaaaaaaggctttggcttatcaagcctagtgtaaatttctgcatctcacacgactttagtttggccaggtatttatctgccaaaacaaggacaaatcttgttgtattaacagcagggtcacttctcattttctttgctgacttacctttttactgaccgttgtgaatttctgtctcaaaatgtataatatagaaatgcaagaaaaaaacaaatgtacagattgtaaagttttttgatacctaatgtaagttttctttgtgtaatatttatatgataaaagacattaggatccctacaa

SEQ ID NO: 158935 - DNA, 2574 bp, Artificial Sequence
  derived and/or modified sequence
gcgtctgggccagatatggatcacgcctgtggagcgcacctccacacaggcagccctcgtccaaggtgcagggcgcagggcacagggcacatgtctacggcccagtcctgcagacggctacctagagaccccagggcacaggaaaccttcccatggctgcagagctgcctctaaagcaagactagaggcaaagccagccaacagccccttcccctcccatcccagcttggcccacatcacccagttccgaatgatggtgtctctgggacatttagccaaaggagccagcctggacgatctcattgacagctgcattcaatcttttgatgcagatggaaacctgtgtcgaagtaaccaactgttgcaagtcatgctgaccatgcaccgaattgtcatctcctctgcagaactgctccaaaaagttatcaccctctataaggatgctttggcaaagaattcaccaggactttgcctgaagatctgttattttgtaaggtattggataacagaattctgggtcatgtttaaaatggacgccagcttgacagacactatggaggagtttcaggaactggtgaaagctaagggtgaggagttacattgccgcctgattgacacaactcaaatcaatgcccgtgactggtccaggaaacttactcaaaggataaaatcaaataccagcaagaaacggaaagtctccctgctctttgaccatctggaaccagaagagctatccgagcacctcacctaccttgagttcaagtctttccggaggatatcgttctctgattatcagaattaccttgtaaatagctgtgtgaaggaaaaccccaccatggagcgatctattgctctgtgcaacggcatctcccagtgggtacaactgatggttctcagccgccccacgccgcagctccgagcagaagtcttcatcaagttcatccaggtggctcagaagctccaccaactacagaacttcaatacactgatggctgtgataggtgggctgtgtcacagctcaatctcgaggctcaaggagacaagttcgcatgtcccacatgaaatcaataaggttctcggtgagatgactgagctgctgtcctcctccagaaactacgacaattaccggcgagcctatggagagtgcaccgacttcaagatccccattctgggtgtgcatctcaaggacctcatctccctgtatgaagccatgcctgactatctggaggacgggaaagtgaacgtccataagctactggccctatacaatcatatcagtgaattggtccagctgcaagaggtggccccacccttggaggctaacaaggacttggtacacttgctgacgttatccctggatctttactacactgaggatgaaatctatgagctttcctatgcccgggaaccaaggaaccacagagctccaccactaacaccttcaaagccaccagtagtagtggactgggcttctggagtgtctcccaaacctgatccaaaaaccattagcaaacacgtccagaggatggtggattctgtcttcaagaactatgatcacgaccaggatggatacatttctcaggaagaatttgaaaagattgctgcgagttttccattttccttctgtgtgatggacaaagacagggaaggcctcatcagcagggatgagatcacagcctacttcatgagagccagctcaatctattccaagctgggcctgggctttcctcacaacttccaagagaccacctacctgaagcccactttttgtgacaactgtgctggatttctctggggagtgatcaaacaaggatatcgatgtaaagactgcgggatgaactgtcacaaacaatgcaaagatctggttgtgtttgagtgtaagaagcgagccaagaacccagtagctcccacagagaacaacacttctgtggggccagtgtccaacctttgctcattgggagccaaagatctgctccatgcacctgaggaaggaccttttacattccctaatggggaggctgtggaacatggtgaggagagtaaggatcggaccatcatgctgatgggagtgtcctcacagaagatttctcttcggctgaagagggctgttgcccacaaggccacccagactgaatcacagccttggattggcagtgagggcccttcaggtccctttgtgctgtcttccccaaggaagacagcccaggatactctatatgtgcttcccagtcccacctctccatgtcctagcccagtcttggtcagaaagcgggcttttgtcaagtgggagaataaagactccctcataaaatcaaaggaggagctccgtcacctcagactgcctacctaccaagaactggaacaggaaataaatactctgaaagcagataatgatgccctaaagatccaactgaaatatgcacagaagaaaatagaatccctccagcttgaaaaaagcaatcatgtcttagctcaaatggagcagggtgactgttcttagcccagaaactaagtagcacaatctgtagatgagtatagtgatctcatttcctaaactgtaatgcacagacctga

SEQ ID NO: 158936 - DNA, 2394 bp, Artificial Sequence
  derived and/or modified sequence
atgggcaccctgggcaaggccagagaggcccccagaaagcccagccacggctgcagagccgccagcaaggccagactggaggccaagcccgccaacagccccttccccagccaccccagcctggcccacatcacccagttcagaatgatggtgagcctgggccacctggccaagggcgccagcctggacgacctgatcgacagctgcatccagagcttcgacgccgacggcaacctgtgcagaagcaaccagctgctgcaggtgatgctgaccatgcacagaatcgtgatcagcagcgccgagctgctgcagaaggtgatcaccctgtacaaggacgccctggccaagaacagccccggcctgtgcctgaagatctgctacttcgtgagatactggatcaccgagttctgggtgatgttcaagatggacgccagcctgaccgacaccatggaggagttccaggagctggtgaaggccaagggcgaggagctgcactgcagactgatcgacaccacccagatcaacgccagagactggagcagaaagctgacccagagaatcaagagcaacaccagcaagaagagaaaggtgagcctgctgttcgaccacctggagcccgaggagctgagcgagcacctgacctacctggagttcaagagcttcagaagaatcagcttcagcgactaccagaactacctggtgaacagctgcgtgaaggagaaccccaccatggagagaagcatcgccctgtgcaacggcatcagccagtgggtgcagctgatggtgctgagcagacccaccccccagctgagagccgaggtgttcatcaagttcatccaggtggcccagaagctgcaccagctgcagaacttcaacaccctgatggccgtgatcggcggcctgtgccacagcagcatcagcagactgaaggagaccagcagccacgtgccccacgagatcaacaaggtgctgggcgagatgaccgagctgctgagcagcagcagaaactacgacaactacagaagagcctacggcgagtgcaccgacttcaagatccccatcctgggcgtgcacctgaaggacctgatcagcctgtacgaggccatgcccgactacctggaggacggcaaggtgaacgtgcacaagctgctggccctgtacaaccacatcagcgagctggtgcagctgcaggaggtggccccccccctggaggccaacaaggacctggtgcacctgctgaccctgagcctggacctgtactacaccgaggacgagatctacgagctgagctacgccagagagcccagaaaccacagagccccccccctgacccccagcaagccccccgtggtggtggactgggccagcggcgtgagccccaagcccgaccccaagaccatcagcaagcacgtgcagagaatggtggacagcgtgttcaagaactacgaccacgaccaggacggctacatcagccaggaggagttcgagaagatcgccgccagcttccccttcagcttctgcgtgatggacaaggacagagagggcctgatcagcagagacgagatcaccgcctacttcatgagagccagcagcatctacagcaagctgggcctgggcttcccccacaacttccaggagaccacctacctgaagcccaccttctgcgacaactgcgccggcttcctgtggggcgtgatcaagcagggctacagatgcaaggactgcggcatgaactgccacaagcagtgcaaggacctggtggtgttcgagtgcaagaagagagccaagaaccccgtggcccccaccgagaacaacaccagcgtgggccccgtgagcaacctgtgcagcctgggcgccaaggacctgctgcacgcccccgaggagggccccttcaccttccccaacggcgaggccgtggagcacggcgaggagagcaaggacagaaccatcatgctgatgggcgtgagcagccagaagatcagcctgagactgaagagagccgtggcccacaaggccacccagaccgagagccagccctggatcggcagcgagggccccagcggccccttcgtgctgagcagccccagaaagaccgcccaggacaccctgtacgtgctgcccagccccaccagcccctgccccagccccgtgctggtgagaaagagagccttcgtgaagtgggagaacaaggacagcctgatcaagagcaaggaggagctgagacacctgagactgcccacctaccaggagctggagcaggagatcaacaccctgaaggccgacaacgacgccctgaagatccagctgaagtacgcccagaagaagatcgagagcctgcagctggagaagagcaaccacgtgctggcccagatggagcagggcgactgcagctag

SEQ ID NO: 158937 - DNA, 2250 bp, Artificial Sequence
  derived and/or modified sequence
atgatggtgagcctgggccacctggccaagggcgccagcctggacgacctgatcgacagctgcatccagagcttcgacgccgacggcaacctgtgcagaagcaaccagctgctgcaggtgatgctgaccatgcacagaatcgtgatcagcagcgccgagctgctgcagaaggtgatcaccctgtacaaggacgccctggccaagaacagccccggcctgtgcctgaagatctgctacttcgtgagatactggatcaccgagttctgggtgatgttcaagatggacgccagcctgaccgacaccatggaggagttccaggagctggtgaaggccaagggcgaggagctgcactgcagactgatcgacaccacccagatcaacgccagagactggagcagaaagctgacccagagaatcaagagcaacaccagcaagaagagaaaggtgagcctgctgttcgaccacctggagcccgaggagctgagcgagcacctgacctacctggagttcaagagcttcagaagaatcagcttcagcgactaccagaactacctggtgaacagctgcgtgaaggagaaccccaccatggagagaagcatcgccctgtgcaacggcatcagccagtgggtgcagctgatggtgctgagcagacccaccccccagctgagagccgaggtgttcatcaagttcatccaggtggcccagaagctgcaccagctgcagaacttcaacaccctgatggccgtgatcggcggcctgtgccacagcagcatcagcagactgaaggagaccagcagccacgtgccccacgagatcaacaaggtgctgggcgagatgaccgagctgctgagcagcagcagaaactacgacaactacagaagagcctacggcgagtgcaccgacttcaagatccccatcctgggcgtgcacctgaaggacctgatcagcctgtacgaggccatgcccgactacctggaggacggcaaggtgaacgtgcacaagctgctggccctgtacaaccacatcagcgagctggtgcagctgcaggaggtggccccccccctggaggccaacaaggacctggtgcacctgctgaccctgagcctggacctgtactacaccgaggacgagatctacgagctgagctacgccagagagcccagaaaccacagagccccccccctgacccccagcaagccccccgtggtggtggactgggccagcggcgtgagccccaagcccgaccccaagaccatcagcaagcacgtgcagagaatggtggacagcgtgttcaagaactacgaccacgaccaggacggctacatcagccaggaggagttcgagaagatcgccgccagcttccccttcagcttctgcgtgatggacaaggacagagagggcctgatcagcagagacgagatcaccgcctacttcatgagagccagcagcatctacagcaagctgggcctgggcttcccccacaacttccaggagaccacctacctgaagcccaccttctgcgacaactgcgccggcttcctgtggggcgtgatcaagcagggctacagatgcaaggactgcggcatgaactgccacaagcagtgcaaggacctggtggtgttcgagtgcaagaagagagccaagaaccccgtggcccccaccgagaacaacaccagcgtgggccccgtgagcaacctgtgcagcctgggcgccaaggacctgctgcacgcccccgaggagggccccttcaccttccccaacggcgaggccgtggagcacggcgaggagagcaaggacagaaccatcatgctgatgggcgtgagcagccagaagatcagcctgagactgaagagagccgtggcccacaaggccacccagaccgagagccagccctggatcggcagcgagggccccagcggccccttcgtgctgagcagccccagaaagaccgcccaggacaccctgtacgtgctgcccagccccaccagcccctgccccagccccgtgctggtgagaaagagagccttcgtgaagtgggagaacaaggacagcctgatcaagagcaaggaggagctgagacacctgagactgcccacctaccaggagctggagcaggagatcaacaccctgaaggccgacaacgacgccctgaagatccagctgaagtacgcccagaagaagatcgagagcctgcagctggagaagagcaaccacgtgctggcccagatggagcagggcgactgcagctag

SEQ ID NO: 158938 - protein, 683 aa, Artificial Sequence
  derived and/or modified sequence
MASGPGSQEREGLLIVKLEEDCAWSQELPPPDPGPSPEASHLRFRRFRFQEAAGPREALSRLQELCHGWLRPEMRTKEQILELLVLEQFLTILPQEIQSRVQELHPESGEEAVTLVEDMQRELGRLRQQVTNHGRGTEVLLEEPLPLETARESPSFKLEPMETERSPGPRLQELLGPSPQRDPQAVKERALSAPWLSLFPPEGNMEDKEMTGPQLPESLEDVAMYISQEEWGHQDPSKRALSRDTVQESYENVDSLESHIPSQEVPGTQVGQGGKLWDPSVQSCKEGLSPRGPAPGEEKFENLEGVPSVCSENIHPQVLLPDQARGEVPWSPELGRPHDRSQGDWAPPPEGGMEQALAGASSGRELGRPKELQPKKLHLCPLCGKNFSNNSNLIRHQRIHAAERLCMGVDCTEIFGGNPRFLSLHRAHLGEEAHKCLECGKCFSQNTHLTRHQRTHTGEKPYQCNICGKCFSCNSNLHRHQRTHTGEKPYKCPECGEIFAHSSNLLRHQRIHTGERPYKCPECGKSFSRSSHLVIHERTHERERLYPFSECGEAVSDSTPFLTNHGAHKAEKKLFECLTCGKSFRQGMHLTRHQRTHTGEKPYKCTLCGENFSHRSNLIRHQRIHTGEKPYTCHECGDSFSHSSNRIRHLRTHTGERPYKCSECGESFSRSSRLMSHQRTHTG

SEQ ID NO: 158939 - protein, 331 aa, Artificial Sequence
  derived and/or modified sequence
MEQALAGASSGRELGRPKELQPKKLHLCPLCGKNFSNNSNLIRHQRIHAAERLCMGVDCTEIFGGNPRFLSLHRAHLGEEAHKCLECGKCFSQNTHLTRHQRTHTGEKPYQCNICGKCFSCNSNLHRHQRTHTGEKPYKCPECGEIFAHSSNLLRHQRIHTGERPYKCPECGKSFSRSSHLVIHERTHERERLYPFSECGEAVSDSTPFLTNHGAHKAEKKLFECLTCGKSFRQGMHLTRHQRTHTGEKPYKCTLCGENFSHRSNLIRHQRIHTGEKPYTCHECGDSFSHSSNRIRHLRTHTGERPYKCSECGESFSRSSRLMSHQRTHTG

SEQ ID NO: 158940 - DNA, 3305 bp, Artificial Sequence
  derived and/or modified sequence
gcctaacttgcgcgctgagatttccggcgtgggagcagaggtctgagtcttgcgtgggtcctctatatagggtgagaagcgtggcgctcggttcctgcctcggggaagtcctggcgcagatgggccacggggccggcgtggcggcgcctgggaccgactgaggcctaggcgccggagccggccgcgcctgggctggagcggggctcctcggcctggactgggagcccccggccccgggctcctgctggcgccgtccaaccttacatgggttcagggcgccttcgtaggcgggcacggctggtttcgggctaaggcgctctggagacctgacgatggcgtcgggcccgggctcccaggaacgggaagggctcctgatagtgaagctggaggaggactgcgcctggagccaggagctgcccccacctgacccaggaccgagccccgaggcctcccacttgcgcttcagacggttccgcttccaagaggcagctggtccccgggaagccctcagccggctccaagagctttgccatgggtggcttcggcctgagatgcgcacgaaggagcagatcttggagctgctggtgttagagcagttcctgaccatcctgccccaggagatccagagcagggtgcaggagctgcatccggagagcggcgaagaagcggtgacccttgtggaggatatgcagagagagcttgggagactgagacaacaggtcacaaaccatgggcggggaacagaagtgcttttggaggagcctttgcctctggaaacagcacgagagtcaccgagcttcaagctggagccaatggagactgagcgaagccctggccccaggctgcaggagctgctaggccccagcccccaaagggacccccaggctgtaaaggagagggcattatctgctccctggctttctctttttcctcctgaagggaacatggaagacaaggagatgactgggccccagttgcctgagagcttagaggacgtggcaatgtacatctcccaggaggagtgggggcatcaggatcctagtaagagggccctctccagggacacggtgcaggagagttatgagaatgtggactcactggagtctcacattcccagtcaggaggtcccaggcacccaggtgggacaaggaggaaagctatgggatcccagtgtccagagctgcaaggagggcctgagccccagaggcccagctccaggagaagagaaatttgagaacctggaaggtgttccgtctgtatgctctgagaacatccaccctcaggtgctgcttcctgaccaggcccgaggggaggtgccctggagtcctgagctgggaagacctcatgaccggtcgcaaggggattgggcgcctcccccagagggtggaatggagcaggccttggcaggagcctcaagtggcagagaactggggcgaccgaaggaactgcagccaaagaaactccatttatgtcccttgtgtggcaaaaatttctctaacaactcaaacctaattaggcaccagagaatacatgcagctgaaagactgtgtatgggtgtggactgcactgaaatctttggtgggaacccacgtttcctgtcactacacagagcacacctgggagaggaggcccacaagtgccttgaatgtgggaaatgcttcagtcagaacacccatctgactcgccaccaacgcacccacacgggtgagaagccctatcagtgcaacatttgcggaaaatgtttctcctgcaactccaacctccacaggcaccagagaacgcacactggggagaagccctacaagtgccctgagtgtggggagatctttgctcacagttccaacctccttcggcaccagagaattcacactggagagcgaccttataagtgtcccgagtgtgggaaaagtttctctcggagttcacacctcgtcattcacgaaagaactcatgagagagagagactttaccccttctctgagtgtggggaagctgtgagtgacagcaccccctttcttacaaaccatggagcccataaggcagagaagaagctctttgaatgtttgacttgtgggaaaagcttccggcagggcatgcacctcaccagacatcagagaacacacacaggagagaaaccgtataaatgtaccctttgtggggaaaacttctctcatagatccaatttaatcaggcaccagagaatccacacaggagaaaaaccctatacctgtcatgagtgcggagacagcttctctcacagctccaatcggattcgccacctgagaacgcatacgggagagagaccctataaatgttctgaatgtggagaaagcttctctcggagttcccgtcttatgagtcatcagagaactcacacaggttagtaacagtggggtttctctttgccccaggtgaggtggcatattcagaggagcctgttggcaagagctggtattccctgcccagccgaccaaatgacctctgcattcttcaggtaatgggggctcattgtgagggaggtgcagaggcagcagaggattggcataaaactgaaaaggagttctgtctgcatgagaaaggatggcaagtctctgaggtgacctcagggtggaattctctgttaagtccaccctgccccagggtgctcctaccctcttggtctttttaaagccaaggtgcgatttgggcacctgactgtccagtttaccttaacaagtttgggaatccatgtgatgtttttgatacttcttcctcatttgggacattcagtaggagcatttgggcttccggggcccctgagaccaaagaagaggggccaagtaccctgggaaatcagctgaaggtcaacaaaagactggttgtgagttgcagctgtcccgaaggccccagttgggaagccatgggcagtccagatcaagccaccacgtgccctacgatggcctaacaggagtgcccattggcagattacacatgtaaatatgacctcagacaaaaaggaaccagaggcccaagggcaataataaggtggaatttgcaggtcagcccaggaattggcagaggaagtaggtgtctgataaccctttgtggagaatgagattccccccacctgtgtgagaaaaataaacagctctggagtcttgttcctgactccagaggaacgagagcattccaggaaagagagattccctggaaaattgaaaatgtgaatcctagggggaaattggggattgtgtctttccctgttgaaaatgtttggatgggaataaatatcttcaggaaacataaaaaaaaaaaaaaaaaaaaaa

SEQ ID NO: 158941 - DNA, 2052 bp, Artificial Sequence
  derived and/or modified sequence
atggccagcggccccggcagccaggagagagagggcctgctgatcgtgaagctggaggaggactgcgcctggagccaggagctgcccccccccgaccccggccccagccccgaggccagccacctgagattcagaagattcagattccaggaggccgccggccccagagaggccctgagcagactgcaggagctgtgccacggctggctgagacccgagatgagaaccaaggagcagatcctggagctgctggtgctggagcagttcctgaccatcctgccccaggagatccagagcagagtgcaggagctgcaccccgagagcggcgaggaggccgtgaccctggtggaggacatgcagagagagctgggcagactgagacagcaggtgaccaaccacggcagaggcaccgaggtgctgctggaggagcccctgcccctggagaccgccagagagagccccagcttcaagctggagcccatggagaccgagagaagccccggccccagactgcaggagctgctgggccccagcccccagagagacccccaggccgtgaaggagagagccctgagcgccccctggctgagcctgttcccccccgagggcaacatggaggacaaggagatgaccggcccccagctgcccgagagcctggaggacgtggccatgtacatcagccaggaggagtggggccaccaggaccccagcaagagagccctgagcagagacaccgtgcaggagagctacgagaacgtggacagcctggagagccacatccccagccaggaggtgcccggcacccaggtgggccagggcggcaagctgtgggaccccagcgtgcagagctgcaaggagggcctgagccccagaggccccgcccccggcgaggagaagttcgagaacctggagggcgtgcccagcgtgtgcagcgagaacatccacccccaggtgctgctgcccgaccaggccagaggcgaggtgccctggagccccgagctgggcagaccccacgacagaagccagggcgactgggcccccccccccgagggcggcatggagcaggccctggccggcgccagcagcggcagagagctgggcagacccaaggagctgcagcccaagaagctgcacctgtgccccctgtgcggcaagaacttcagcaacaacagcaacctgatcagacaccagagaatccacgccgccgagagactgtgcatgggcgtggactgcaccgagatcttcggcggcaaccccagattcctgagcctgcacagagcccacctgggcgaggaggcccacaagtgcctggagtgcggcaagtgcttcagccagaacacccacctgaccagacaccagagaacccacaccggcgagaagccctaccagtgcaacatctgcggcaagtgcttcagctgcaacagcaacctgcacagacaccagagaacccacaccggcgagaagccctacaagtgccccgagtgcggcgagatcttcgcccacagcagcaacctgctgagacaccagagaatccacaccggcgagagaccctacaagtgccccgagtgcggcaagagcttcagcagaagcagccacctggtgatccacgagagaacccacgagagagagagactgtaccccttcagcgagtgcggcgaggccgtgagcgacagcacccccttcctgaccaaccacggcgcccacaaggccgagaagaagctgttcgagtgcctgacctgcggcaagagcttcagacagggcatgcacctgaccagacaccagagaacccacaccggcgagaagccctacaagtgcaccctgtgcggcgagaacttcagccacagaagcaacctgatcagacaccagagaatccacaccggcgagaagccctacacctgccacgagtgcggcgacagcttcagccacagcagcaacagaatcagacacctgagaacccacaccggcgagagaccctacaagtgcagcgagtgcggcgagagcttcagcagaagcagcagactgatgagccaccagagaacccacaccggctag

SEQ ID NO: 158942 - DNA, 2052 bp, Artificial Sequence
  derived and/or modified sequence
atggcgtcggggcctgggtcgcaggagagagaagggctcttaattgtgaagttagaggaagactgtgcatggagccaagagctaccgcctcctgacccaggccccagtcccgaggcttctcacctgaggttccgccgtttccgcttccaggaagcagcgggaccaagagaagctctgagccggctccaagagctatgccacgggtggcttagacccgaaatgcgaacaaaagaacagattttggaattgctggtccttgagcaattcctgacgattctaccccaagaaatccaatccagggttcaggagttgcacccagagagcggagaagaggcggtgacattggtcgaggatatgcaacgagagcttggtagactgcgccagcaagtgaccaatcatggcaggggaactgaagtccttctggaggaaccactcccactggagaccgcccgggagtccccctcatttaagctggagccaatggaaacagagaggtcccctggtccaagactgcaggagctcctcggcccctctccccagcgcgatccgcaagccgttaaggagcgagcactttccgcgccctggttgagcctgtttcccccagagggcaacatggaggataaggagatgacaggaccacagcttccagaaagtctcgaagatgtcgctatgtatatctcacaggaagaatggggtcatcaagatccgtccaaacgggctctcagtagagatacagtgcaggaatcttacgagaatgtggacagcctcgaatcccacattcccagccaggaagttccaggcacacaggtgggtcaaggcggtaaactttgggatccttccgtgcaatcctgtaaagaaggcctgagcccacgtggcccagcccccggtgaggaaaagttcgaaaacctggagggggtcccatccgtgtgctccgagaacattcatccgcaggttttgctgccggatcaggcccgtggcgaagtgccttggagtcctgagctggggcgacctcatgatagatctcagggagattgggcgccaccacctgagggaggcatggagcaggctctggcaggcgccagctccgggcgagagctcgggaggccgaaggagcttcagcccaaaaagttgcatctttgtccactctgtggcaagaacttctcgaacaactccaatctgattcgacatcagaggatccatgctgcggagcgtctctgtatgggcgtggactgtacggaaattttcggtgggaaccctcgcttcctctctttgcatcgggcacacctgggagaagaggctcacaagtgtctcgaatgtggtaagtgcttttcccagaacacacacctcacgcggcaccaacgcacacacaccggcgagaaaccctaccagtgtaatatctgcggcaaatgtttctcgtgcaattcaaatctccatcgacatcaacggacccacactggagaaaagccctataagtgccccgagtgtggcgagatctttgcccattcctcaaacctactcagacatcagagaattcacaccggggaaagaccttataaatgcccggagtgtggcaagtccttctccaggtcaagccatcttgtgatacacgaacgaacgcacgaaagggaaagactctacccgttctcagagtgtggagaggctgtgagcgatagcactccgttcctcacgaaccacggagctcataaagccgagaagaagttgttcgagtgccttacatgcggaaaaagcttcagacaggggatgcaccttacacggcaccaacgtacacatacgggggagaagccttataaatgcaccctgtgtggcgagaatttctcacacagatctaatctgattcggcaccaaagaattcatactggtgagaagccatacacatgtcacgagtgtggggatagttttagccactcgtcaaaccgaattaggcatctgcgaacgcacaccggagagcgtccgtacaagtgctccgaatgcggcgaatcgttctcaagaagcagcagactcatgagtcaccaaagaacacacactggctag

SEQ ID NO: 158943 - DNA, 2052 bp, Artificial Sequence
  derived and/or modified sequence
atggccagcggccctggcagccaggagcgggagggcctgctgattgtgaagctggaggaggactgtgcctggagccaggagctgcccccaccagaccccggccccagccctgaggccagccacctgcgcttccgccgcttccgcttccaggaggccgccggcccccgggaggccctgagccggctgcaggagctgtgccacggctggctgcggcctgagatgaggaccaaggagcagatcctggagctgctggtgctggagcagttcctgaccatcctgccccaggagatccagagccgggtgcaggagctgcaccctgagagcggggaggaggccgtgaccctggtggaggacatgcagcgggagctgggccgcctgcggcagcaggtgaccaaccacggccggggcacagaggtgctgctggaggagcccctgcccctggagacagcccgggagagccccagcttcaagctggagcccatggagacagagaggagccctggcccccggctgcaggagctgctgggccccagcccccagagggacccccaggccgtgaaggagcgggccctgagcgccccctggctgagcctcttccccccagagggcaacatggaggacaaggagatgacaggcccccagctgcctgagagcctggaggatgtggccatgtacatcagccaggaggagtggggccaccaggaccccagcaagagggccctgagccgggacacagtgcaggagagctatgaaaatgtggacagcctggagagccacatccccagccaggaggtgcccggcacccaggtgggccagggcggcaagctgtgggaccccagcgtgcagagctgcaaggagggcctgagcccccggggccctgcccctggagaggagaagtttgagaacctggagggcgtgcccagcgtgtgcagcgagaacatccacccccaggtgctgctgcctgaccaggcccggggggaggtgccctggagccctgagctgggccggccccatgacaggagccagggcgactgggcccctcctcctgagggcggcatggagcaggccctggccggggccagcagcggccgggagctgggccggcccaaggagctgcagcccaagaagctgcacctgtgccccctgtgtgggaagaacttcagcaacaacagcaacctgatccgccaccagagaattcatgctgctgagcggctgtgcatgggcgtggactgcacagagatctttggaggcaacccccgcttcctgagcctgcaccgggcccacctgggggaggaggcccacaagtgcctggagtgtgggaagtgcttcagccagaacacccacctgaccaggcaccagaggacccacactggagagaagccctaccagtgcaacatctgtgggaagtgcttcagctgcaacagcaacctgcaccgccaccagaggacccacactggagagaagccctacaagtgcccagaatgtggggagatctttgcccacagcagcaacctgctgcggcaccagaggatccacactggagagcggccctacaagtgcccagaatgtgggaagagcttcagccgcagcagccacctggtgatccacgagaggacccatgagcgggagcggctgtaccccttctctgaatgtggggaggccgtgtctgacagcacccccttcctgaccaaccacggggcccacaaggccgagaagaagctgtttgagtgcctgacctgtgggaagagcttccggcagggcatgcacctgaccaggcaccagaggacccacactggagagaagccctacaagtgcaccctgtgtggggagaacttcagccacaggagcaacctgatccgccaccagaggatccacactggagagaagccctacacctgccatgaatgtggggacagcttcagccacagcagcaaccgcatccgccacctgcggacccacactggagagcggccctacaagtgcagtgaatgtggggagagcttcagccgcagcagccggctgatgagccaccagaggacccacactggatag

SEQ ID NO: 158944 - DNA, 2052 bp, Artificial Sequence
  derived and/or modified sequence
atggccagcggccccggcagccaggagcgggagggcctgctgatcgtcaagttggaagaagactgtgcgtggtcacaggaacttccacctccagatcccggtcctagtcctgaagcaagtcacttgaggtttaggcggttcaggtttcaagaagcagccggtccccgcgaggcccttagtcgactgcaggagctttgccatgggtggctgaggcctgagatgcggaccaaggaacagatcctcgaacttttagtgctggaacaattcctaacgatattgccccaagagatccaaagccgggtgcaggaactgcatcccgagtcaggagaagaggctgtcactctggttgaggatatgcagcgtgaactgggccgtctgcggcagcaggttacaaatcacggcagggggaccgaggtgctcctggaggaaccgctgcctctggaaactgccagggagagtccatccttcaagttggaacctatggagaccgagagaagtccaggccctaggctgcaggaactgctgggcccttcccctcagcgggacccccaagcagttaaggaacgggccttgtccgcgccttggctatctctcttccctccggaaggcaacatggaagataaagaaatgacaggcccgcagctccccgaatccctggaggacgtggccatgtacatctctcaggaggagtggggacaccaggatccctccaagcgcgcactgagcagagacaccgtccaggaatcctacgagaacgtcgacagtctggaatctcatatccctagccaggaagtgccaggaacccaggtgggccaggggggaaagttgtgggatcctagcgtgcagagctgcaaagagggcttgtccccacgcggccctgccccaggggaggaaaagttcgaaaacctggagggggttccctccgtgtgcagtgaaaatatacaccctcaggtgctgctgcccgatcaggcaaggggtgaggttccatggtcacctgaattgggccgtcctcatgatcggagccaaggcgattgggcgccgccccctgagggaggcatggagcaggcgctggcaggcgcctcatctggaagagagctgggcaggcctaaggagctacaaccgaagaagctgcatctgtgccccctttgtggtaagaacttcagcaataattcgaacctgatacgacaccagagaatccatgctgcagaacggctttgcatgggcgtagactgcaccgagatctttggagggaaccctcgatttctgtctctccatagagcccatctcggcgaagaggcccacaagtgtctcgaatgcggaaaatgtttttcacagaacacacacctcacacgccaccagcgtacacacactggggagaagccgtaccagtgtaatatctgtggcaaatgcttcagctgtaatagcaacctccaccgtcatcagagaacccacacaggtgagaagccttacaagtgccctgagtgtggagaaattttcgctcacagctctaatctgttacggcatcaacggatacacaccggcgagagaccctataagtgtcctgaatgcggcaagtctttctctaggagttctcatttggttatacacgaaaggacacatgaacgggaaaggttatatcctttcagtgagtgtggcgaggcagtgtcagactcaaccccttttctcaccaatcatggagcccataaagctgagaagaaactgtttgaatgcctgacatgcggcaagtcctttaggcaggggatgcacctaacccggcaccagaggactcacacaggagagaaaccgtataaatgcacgctgtgcggggagaacttctcccatcgtagcaatctgatccggcatcaacggatccacacgggagaaaaaccttacacctgtcatgagtgcggcgactctttctctcactcctccaacagaattaggcacctgcgcacccatactggagaaagaccgtacaagtgctcggaatgtggggagagtttttccagatcctcacggctcatgtcccaccaacggacacataccggctag

SEQ ID NO: 158945 - DNA, 2052 bp, Artificial Sequence
  derived and/or modified sequence
atggccagcggcccagggtcccaggagagggagggactgctgatcgtgaaactggaggaagactgtgcctggagtcaagaactgccacctcctgatcctggcccaagccccgaggcttctcatttgcggtttcggcgtttccggtttcaagaggccgctggccctagagaggcattgtcaaggttgcaagaactatgccatggatggctaagaccagagatgcgaacaaaggagcagattctggagttactggtattggagcagttcctgacaattcttcctcaggaaatccagtcacgggtgcaggaactccatcccgaaagtggcgaggaggctgttaccctggtcgaagacatgcaacgagagctcggccgactgcggcagcaggtgactaaccacggccgtggtacggaggtcctgctggaggagccactccccctcgaaactgccagggagtcaccgagtttcaagcttgagcctatggaaactgagaggtctccgggtcctaggttacaagaactgcttggaccgagtcctcagcgggatccacaggcagtcaaggaacgagctctgtccgccccttggctgagtctctttccccctgaaggaaacatggaggacaaagagatgactggtccacagctgcccgaatcgctagaagatgttgccatgtatatcagtcaagaggagtgggggcatcaagacccttccaagagggcgctgagcagagacactgtccaggaaagctatgaaaatgtagacagcctggaaagccacatcccatcccaagaggttccgggaacccaggtcggtcaggggggaaaactgtgggatcccagcgtgcagtcatgtaaggaaggactgagcccaaggggacccgcacccggagaggaaaagttcgaaaatctggaaggtgttccgtccgtttgtagcgagaatatccaccctcaggttttgctcccggaccaggcacgtggcgaagtgccttggtctcccgagctagggagaccacacgaccgaagtcagggcgattgggcccctccaccagaaggcggtatggaacaggccctcgctggtgctagttctggcagggaactgggccgacccaaggaactgcagcccaagaagctccacttgtgcccgctatgtggcaaaaacttttctaacaatagcaacttgatccgccatcaacggatccacgcagccgagagactttgtatgggggtggattgtacagagattttcgggggtaaccctcgcttcctaagcttgcaccgcgctcaccttggagaagaggcccacaaatgtctggaatgcggcaagtgtttctctcaaaacacccaccttacccgccaccagcgaacccatacgggcgaaaagccctatcagtgtaacatctgcggtaaatgcttttcctgtaattctaatctgcaccgacatcagcgaacgcacacgggggaaaaaccatacaagtgtccagagtgcggggaaatcttcgcacatagctccaatctgttgcgtcaccagcgtatccacaccggagagcgaccttataagtgtcccgagtgcgggaagagtttcagccgcagtagccatctcgtcatccacgaaagaacacacgaacgagaacggttatacccattcagcgaatgcggagaggctgtctccgactccaccccattcctgaccaatcatggcgcacataaggccgaaaagaaactgttcgaatgtctgacttgtggcaaatcctttcgccagggcatgcacctcacacgccatcagcgcacacatactggggagaaaccctacaaatgcacactttgtggggagaactttagccaccgaagcaatctgatccggcaccagcgaatacataccggagaaaagccctatacatgccatgaatgcggcgatagcttcagtcattcctcaaatcggattcgtcacctcagaactcacaccggcgagcggccttacaagtgctcggagtgcggagagagtttcagcagatcttccagattgatgtctcaccaacgaacacacactggctag

SEQ ID NO: 158946 - DNA, 3325 bp, Artificial Sequence
  derived and/or modified sequence
cggaaattggtcacgagcaggcgccgtgggcttgtggacgcctaacttgcgcgctgagatttccggcgtgggagcagaggtctgagtcttgcgtgggtcctctatatagggtgagaagcgtggcgctcggttcctgcctcggggaagtcctggcgcagatgggccacggggccggcgtggcggcgcctgggaccgactgaggcctaggcgccggagccggccgcgcctgggctggagcggggctcctcggcctggactgggagcccccggccccgggctcctgctggcgccgtccaaccttacatgggttcagggcgccttcgtaggcgggcacggctggtttcgggctaaggcgctctggagacctgacgatggcgtcgggcccgggctcccaggaacgggaagggctcctgatagtgaagctggaggaggactgcgcctggagccaggagctgcccccacctgacccaggaccgagccccgaggcctcccacttgcgcttcagacggttccgcttccaagaggcagctggtccccgggaagccctcagccggctccaagagctttgccatgggtggcttcggcctgagatgcgcacgaaggagcagatcttggagctgctggtgttagagcagttcctgaccatcctgccccaggagatccagagcagggtgcaggagctgcatccggagagcggcgaagaagcggtgacccttgtggaggatatgcagagagagcttgggagactgagacaacaggtcacaaaccatgggcggggaacagaagtgcttttggaggagcctttgcctctggaaacagcacgagagtcaccgagcttcaagctggagccaatggagactgagcgaagccctggccccaggctgcaggagctgctaggccccagcccccaaagggacccccaggctgtaaaggagagggcattatctgctccctggctttctctttttcctcctgaagggaacatggaagacaaggagatgactgggccccagttgcctgagagcttagaggacgtggcaatgtacatctcccaggaggagtgggggcatcaggatcctagtaagagggccctctccagggacacggtgcaggagagttatgagaatgtggactcactggagtctcacattcccagtcaggaggtcccaggcacccaggtgggacaaggaggaaagctatgggatcccagtgtccagagctgcaaggagggcctgagccccagaggcccagctccaggagaagagaaatttgagaacctggaaggtgttccgtctgtatgctctgagaacatccaccctcaggtgctgcttcctgaccaggcccgaggggaggtgccctggagtcctgagctgggaagacctcatgaccggtcgcaaggggattgggcgcctcccccagagggtggaatggagcaggccttggcaggagcctcaagtggcagagaactggggcgaccgaaggaactgcagccaaagaaactccatttatgtcccttgtgtggcaaaaatttctctaacaactcaaacctaattaggcaccagagaatacatgcagctgaaagactgtgtatgggtgtggactgcactgaaatctttggtgggaacccacgtttcctgtcactacacagagcacacctgggagaggaggcccacaagtgccttgaatgtgggaaatgcttcagtcagaacacccatctgactcgccaccaacgcacccacacgggtgagaagccctatcagtgcaacatttgcggaaaatgtttctcctgcaactccaacctccacaggcaccagagaacgcacactggggagaagccctacaagtgccctgagtgtggggagatctttgctcacagttccaacctccttcggcaccagagaattcacactggagagcgaccttataagtgtcccgagtgtgggaaaagtttctctcggagttcacacctcgtcattcacgaaagaactcatgagagagagagactttaccccttctctgagtgtggggaagctgtgagtgacagcaccccctttcttacaaaccatggagcccataaggcagagaagaagctctttgaatgtttgacttgtgggaaaagcttccggcagggcatgcacctcaccagacatcagagaacacacacaggagagaaaccgtataaatgtaccctttgtggggaaaacttctctcatagatccaatttaatcaggcaccagagaatccacacaggagaaaaaccctatacctgtcatgagtgcggagacagcttctctcacagctccaatcggattcgccacctgagaacgcatacgggagagagaccctataaatgttctgaatgtggagaaagcttctctcggagttcccgtcttatgagtcatcagagaactcacacaggttagtaacagtggggtttctctttgccccaggtgaggtggcatattcagaggagcctgttggcaagagctggtattccctgcccagccgaccaaatgacctctgcattcttcaggtaatgggggctcattgtgagggaggtgcagaggcagcagaggattggcataaaactgaaaaggagttctgtctgcatgagaaaggatggcaagtctctgaggtgacctcagggtggaattctctgttaagtccaccctgccccagggtgctcctaccctcttggtctttttaaagccaaggtgcgatttgggcacctgactgtccagtttaccttaacaagtttgggaatccatgtgatgtttttgatacttcttcctcatttgggacattcagtaggagcatttgggcttccggggcccctgagaccaaagaagaggggccaagtaccctgggaaatcagctgaaggtcaacaaaagactggttgtgagttgcagctgtcccgaaggccccagttgggaagccatgggcagtccagatcaagccaccacgtgccctacgatggcctaacaggagtgcccattggcagattacacatgtaaatatgacctcagacaaaaaggaaccagaggcccaagggcaataataaggtggaatttgcaggtcagcccaggaattggcagaggaagtaggtgtctgataaccctttgtggagaatgagattccccccacctgtgtgagaaaaataaacagctctggagtcttgttcctgactccagaggaacgagagcattccaggaaagagagattccctggaaaattgaaaatgtgaatcctagggggaaattggggattgtgtctttccctgttgaaaatgtttggatgggaataaatatcttcaggaaacataaa

SEQ ID NO: 158947 - protein, 440 aa, Artificial Sequence
  derived and/or modified sequence
MALLVLGLVSCTFFLAVNGLYSSSDDVIELTPSNFNREVIQSDSLWLVEFYAPWCGHCQRLTPEWKKAATALKDVVKVGAVDADKHHSLGGQYGVQGFPTIKIFGSNKNRPEDYQGGRTGEAIVDAALSALRQLVKDRLGGRSGGYSSGKQGRSDSSSKKDVIELTDDSFDKNVLDSEDVWMVEFYAPWCGHCKNLEPEWAAAASEVKEQTKGKVKLAAVDATVNQVLASRYGIRGFPTIKIFQKGESPVDYDGGRTRSDIVSRALDLFSDNAPPPELLEIINEDIAKRTCEEHQLCVVAVLPHILDTGAAGRNSYLEVLLKLADKYKKKMWGWLWTEAGAQSELETALGIGGFGYPAMAAINARKMKFALLKGSFSEQGINEFLRELSFGRGSTAPVGGGAFPTIVEREPWDGRDGELPVEDDIDLSDVELDDLGKDEL

SEQ ID NO: 158948 - DNA, 1323 bp, Artificial Sequence
  derived and/or modified sequence
atggctttgctcgtccttggactcgtgtcgtgcacgttctttctcgcggtcaatggactgtactcatcatccgacgacgttatcgagttaaccccatcaaatttcaaccgcgaggttatccagtctgatagcctgtggctggtggagttttacgccccctggtgtggacactgccagcggctgaccccagagtggaagaaggccgctacagctttaaaagacgtcgttaaggtgggagcagtggatgctgacaagcatcattctctaggtggacaatacggtgtgcaggggtttcccactatcaaaatttttggctccaacaaaaaccgccctgaggactatcagggcggtcggaccggagaggctatcgtagatgctgctctgtctgctctgagacagttagtgaaagacaggctcggtggcaggagtggcggttacagcagcggaaaacagggacgctccgatagctcttctaagaaagatgtgatcgagctcactgacgacagctttgacaagaatgtgttggactctgaagacgtctggatggttgagttctatgctccgtggtgtggccattgcaaaaatttggagcctgagtgggccgctgcagcttctgaagttaaagagcagactaaaggcaaagtcaagctagccgcggtggacgctactgttaatcaggttctggcttctcgttatggtattcgcgggtttccgacgatcaagattttccaaaagggtgagagccccgtcgattatgacggtggcaggactcgctcagacatagtttcaagagccctggacctgttttctgataacgcgccaccaccggaacttttagagattattaacgaggatatcgcaaaaagaacatgtgaagagcaccagttatgcgttgttgcggtgctgcctcatatcctggatacaggagctgctggaaggaattcatatctggaagtcctcctgaagttggcggacaagtacaagaaaaaaatgtggggatggctatggacggaagcaggggcacagtcagagctcgagaccgctctcggaatcggaggtttcgggtacccggctatggcagccattaacgcccggaagatgaagttcgcactgttaaaaggaagcttctccgaacagggcatcaatgagttcttaagggagctgtctttcggcagagggtccaccgctcccgtcggtggcggggcgttcccaacaatcgttgagcgcgagccctgggacggtagggatggcgagctacctgttgaggacgatattgatctttccgacgtggaattggacgaccttggcaaagacgagctctag

SEQ ID NO: 158949 - DNA, 1323 bp, Artificial Sequence
  derived and/or modified sequence
atggccctgctggtgctgggcctggtgtcctgcaccttcttcctggccgtgaatggcctgtacagcagcagtgatgatgtgattgagctgacccccagcaacttcaaccgggaggtgatccagagcgacagcctgtggctggtggagttctacgccccctggtgtggccactgccagaggctgaccccagagtggaagaaggccgccacagccctgaaggatgtggtgaaggtgggcgctgtggatgctgacaagcaccacagcctgggcggccagtatggagtgcagggcttccccaccatcaagatcttcggcagcaacaagaacagacctgaggactaccagggcggccgcactggagaggccatcgtggatgctgccctgagcgccctgcggcagctggtgaaggaccggctgggcggccgcagcggcggctacagcagcggcaagcagggccgcagtgacagcagcagcaagaaggatgtgattgagctgacagatgacagctttgacaagaatgtgctggacagtgaagatgtgtggatggtggagttctacgccccctggtgtggccactgcaagaacctggagcctgagtgggccgctgctgccagcgaggtgaaggagcagaccaagggcaaggtgaagctggccgctgtggatgccaccgtgaaccaggtgctggccagccgctatggcatccggggcttccccaccatcaagatcttccagaagggggagagccctgtggactatgatggcggccgcaccaggagtgacatcgtgtcccgggccctggacctcttcagtgacaatgcccctcctcctgagctgctggagatcatcaatgaagacatcgccaagaggacctgtgaggagcaccagctgtgtgtggtggccgtgctgccccacatcctggacaccggggctgctggaagaaattcctacctggaggtgctgctgaagctggccgacaagtacaagaagaagatgtggggctggctgtggacagaagctggggcccagagcgagctggagacagccctgggcattggaggcttcggctacccagccatggccgccatcaatgccaggaagatgaagtttgccctgctgaagggcagcttcagcgagcagggcatcaatgagttcctgcgggagctgagctttggccggggcagcacagcccctgtgggcggcggggccttccccaccatcgtggagcgggagccctgggatggaagagatggagagctgcctgtggaggatgacatcgacctgagtgatgtggagctggatgacctgggcaaggatgagctgtag

SEQ ID NO: 158950 - DNA, 1323 bp, Artificial Sequence
  derived and/or modified sequence
atggccctgctggtgctgggcctggtgagctgcaccttcttcctggcagtgaacggattgtacagtagctccgatgacgtcatagagctcactccttcaaatttcaatagagaggtaatccagagtgattcactgtggcttgtggaattttacgcgccatggtgcggccattgccaacgcctgacaccggaatggaaaaaggccgccactgctcttaaggatgttgttaaagtcggagccgtggatgcggataagcaccactcactgggcggccagtatggtgttcagggctttcccaccattaagatcttcggttctaacaagaaccgaccagaggattaccagggagggcgaacaggtgaagccatcgttgacgcggcactttcagcgctgaggcagctcgtgaaagaccggctggggggtcgctctggaggctacagtagcggcaagcaaggccgatctgacagtagttccaaaaaagatgtaatagagctgactgacgattctttcgacaagaacgtgctggactccgaagatgtgtggatggtagaattttatgcaccttggtgcgggcactgcaaaaatctggagccggaatgggcagcagccgcgtctgaagtgaaggaacagactaaggggaaggtgaaactcgctgccgtggacgctacggtcaaccaagttttagctagtcgatacggaatccgaggatttccgactattaaaattttccagaaaggcgaatcccctgtggactacgatggtggaagaactcgctccgacatcgtcagccgagccctcgacttattctcagacaatgccccccctcccgagctcctggagattattaatgaggatattgccaaacgaacgtgcgaggaacatcagttgtgcgtagtcgccgtgctgccccacatactagacacaggggctgctggccgaaactcctatctggaagtcctgctcaagctagcagataagtacaaaaagaaaatgtggggttggctttggacagaagccggggcacagagcgaactggaaactgctctgggcattggtggcttcgggtaccccgcaatggccgccattaacgcccgcaagatgaaattcgctctccttaaaggctccttctcagagcagggcattaacgagttcctgcgggaactaagcttcgggcgcggaagcacagcgccagtgggtggcggtgcctttccaacaatcgtcgaaagagaaccctgggatggtcgggacggagagttgccagtagaggacgacattgacctgtccgatgttgagctggacgatttgggaaaggacgagctgtag

SEQ ID NO: 158951 - DNA, 1323 bp, Artificial Sequence
  derived and/or modified sequence
atggccctgttagttctgggactggtgagttgcacctttttcctcgctgtaaacggcctatactcaagctctgacgacgtgatagagctgacaccaagtaatttcaaccgcgaggtgattcagtcggattcactttggcttgtcgagttttacgccccttggtgcggccactgccagagactcacccccgagtggaaaaaggccgctacagctctgaaggacgtggttaaggttggtgccgtcgatgcagacaagcatcatagcctgggcggacagtacggcgtacagggcttccccacgataaagatctttggcagtaacaaaaacaggccggaggattatcagggaggccgaacaggcgaagctattgtggacgcagcactgtccgcactacgccagttggttaaggaccggctggggggtagatctggcggatacagcagcggcaagcaggggcgttctgattcaagttctaagaaagacgtcatcgagctcactgacgattcattcgataaaaatgtgctcgactcagaggacgtgtggatggtggagttctacgcaccgtggtgcggacactgcaaaaacttagaaccggaatgggcggcagcagcttctgaggtaaaggagcagaccaagggcaaggtgaagctggcagccgtcgacgccaccgtgaaccaagtactggccagtcgttacggcatcagaggatttccgacaattaaaatcttccagaaaggtgaaagcccagtggactacgacggtggtaggactagaagcgatatagtctctagagcactagacctcttctccgataatgccccacctccagaactgttggagatcatcaacgaggatatcgctaagaggacttgtgaagagcaccagctgtgcgtagtcgctgtactgccgcacatcctggataccggagcagcaggccgtaatagctatcttgaagtgctgttaaagctggcagataagtataagaaaaagatgtggggctggctttggaccgaagccggtgcccaatccgaactggaaacagctctagggataggcggattcgggtaccctgctatggcagccatcaacgccaggaagatgaagtttgcactgctcaagggaagctttagtgaacagggaataaacgagtttctgcgcgagctaagtttcggacggggaagtaccgcacctgtagggggaggggcattccccactatagtagagcgtgaaccgtgggacggcagagacggagaacttccggtcgaggatgacattgatctctcggatgtggagcttgatgatctgggtaaggatgaactttag

SEQ ID NO: 158952 - DNA, 1323 bp, Artificial Sequence
  derived and/or modified sequence
atggccctgctggtgctgggcctggtgagctgcaccttcttcctggccgtgaacggcctgtacagcagcagcgacgacgtgatcgagctgacccccagcaacttcaacagagaggtgatccagagcgacagcctgtggctggtggagttctacgccccctggtgcggccactgccagagactgacccccgagtggaagaaggccgccaccgccctgaaggacgtggtgaaggtgggcgccgtggacgccgacaagcaccacagcctgggcggccagtacggcgtgcagggcttccccaccatcaagatcttcggcagcaacaagaacagacccgaggactaccagggcggcagaaccggcgaggccatcgtggacgccgccctgagcgccctgagacagctggtgaaggacagactgggcggcagaagcggcggctacagcagcggcaagcagggcagaagcgacagcagcagcaagaaggacgtgatcgagctgaccgacgacagcttcgacaagaacgtgctggacagcgaggacgtgtggatggtggagttctacgccccctggtgcggccactgcaagaacctggagcccgagtgggccgccgccgccagcgaggtgaaggagcagaccaagggcaaggtgaagctggccgccgtggacgccaccgtgaaccaggtgctggccagcagatacggcatcagaggcttccccaccatcaagatcttccagaagggcgagagccccgtggactacgacggcggcagaaccagaagcgacatcgtgagcagagccctggacctgttcagcgacaacgcccccccccccgagctgctggagatcatcaacgaggacatcgccaagagaacctgcgaggagcaccagctgtgcgtggtggccgtgctgccccacatcctggacaccggcgccgccggcagaaacagctacctggaggtgctgctgaagctggccgacaagtacaagaagaagatgtggggctggctgtggaccgaggccggcgcccagagcgagctggagaccgccctgggcatcggcggcttcggctaccccgccatggccgccatcaacgccagaaagatgaagttcgccctgctgaagggcagcttcagcgagcagggcatcaacgagttcctgagagagctgagcttcggcagaggcagcaccgcccccgtgggcggcggcgccttccccaccatcgtggagagagagccctgggacggcagagacggcgagctgcccgtggaggacgacatcgacctgagcgacgtggagctggacgacctgggcaaggacgagctgtag

SEQ ID NO: 158953 - protein, 527 aa, Artificial Sequence
  derived and/or modified sequence
LRRAASGPLAPSLPPPRPPRRHQPSNANRRSWGGAAARGAGARPASGHQPEPEREPGPRRPRPLPASASVRRAPARRAMDSDEGYNYEFVNEVIQNPATITRILLSHFNWDKEKLMERYFDGNLEKLFAECHVINPSKKSRTRQMNTRSSAQDMPCQICYLNYPNSYFTGLECGHKFCMQCWSEYLTTKIMEEGMGQTISCPAHGCDILVDDNTVMRLITDSKVKLKYQHLITNSFVECNRLLKWCPAPDCHHVVKVQYPDAKPVRCKCGRQFCFNCGENWHDPVKCKWLKKWIKKCDDDSETSNWIAANTKECPKCHVTIEKDGGCNHMVCRNQNCKAEFCWVCLGPWEPHGSAWYNCNRYNEDDAKAARDAQERSRAALQRYLFYCNRYMNHMQSLRFEHKLYAQVKQKMEEMQQHNMSWIEVQFLKKAVDVLCQCRATLMYTYVFAFYLKKNNQSIIFENNQADLENATEVLSGYLERDISQDSLQDIKQKVQDKYRYCESRRRVLLQHVHEGYEKDLWEYIED

SEQ ID NO: 158954 - protein, 557 aa, Artificial Sequence
  derived and/or modified sequence
MDSDEGYNYEFDEDEECSEEDSGAEEEEDEDDDEPDDDTLDLGEVELVEPGLGVGGERDGLLCGETGGGGGSALGPGGGGGGGGGGGGGGPGHEQEEDYRYEVLTAEQILQHMVECIREVNEVIQNPATITRILLSHFNWDKEKLMERYFDGNLEKLFAECHVINPSKKSRTRQMNTRSSAQDMPCQICYLNYPNSYFTGLECGHKFCMQCWSEYLTTKIMEEGMGQTISCPAHGCDILVDDNTVMRLITDSKVKLKYQHLITNSFVECNRLLKWCPAPDCHHVVKVQYPDAKPVRCKCGRQFCFNCGENWHDPVKCKWLKKWIKKCDDDSETSNWIAANTKECPKCHVTIEKDGGCNHMVCRNQNCKAEFCWVCLGPWEPHGSAWYNCNRYNEDDAKAARDAQERSRAALQRYLFYCNRYMNHMQSLRFEHKLYAQVKQKMEEMQQHNMSWIEVQFLKKAVDVLCQCRATLMYTYVFAFYLKKNNQSIIFENNQADLENATEVLSGYLERDISQDSLQDIKQKVQDKYRYCESRRRVLLQHVHEGYEKDLWEYIED

SEQ ID NO: 158955 - DNA, 1584 bp, Artificial Sequence
  derived and/or modified sequence
ctcaggcgggcggccagcggtcccctcgcaccgtctctcccccctcccaggcctccccgtaggcaccagcccagcaatgccaaccgcagatcctgggggggagcggccgcccgcggtgcaggggccagacctgcttccgggcatcagcctgaacctgaacgagagcccggtccccgccgtcccagaccactccctgccagcgcatccgtccgacgcgctccagctagaagagcgatggattcggacgagggctacaactatgagttcgtgaacgaggtaatccaaaacccagcgaccattactcgcattctcctgagccacttcaattgggataaggaaaaactcatggagcggtattttgatgggaatctggagaaactattcgcggaatgtcatgttatcaatccatccaagaaaagccgcactcgccagatgaacacccgcagcagcgcccaggacatgccctgccagatctgctacttaaattatccaaatagttactttacaggactggaatgtgggcacaaattctgcatgcagtgttggtccgaatacttgaccacaaagataatggaggaggggatgggccagacaatttcctgccccgcgcacggctgcgatatcttggtggacgacaacaccgtgatgcgcctgatcactgactcgaaggtgaagctgaagtaccaacaccttattaccaactcttttgtggagtgcaatcggctattgaagtggtgcccagcaccagactgccatcatgttgttaaagtacagtatcccgatgccaagcccgtgcgctgtaaatgcgggcgccagttctgctttaattgtggcgagaattggcacgatccagtgaaatgcaagtggctgaagaagtggattaagaagtgtgacgacgattcagaaacttccaactggattgcagccaacaccaaagagtgtcccaagtgtcatgttaccatagagaaggacggcggctgcaatcacatggtttgcaggaatcagaactgcaaggcagagttctgctgggtctgtctaggaccttgggagccacatggatcagcttggtacaattgtaatcggtacaacgaggatgacgcgaaagccgcccgcgatgctcaggaacggtcgcgcgccgctctgcaacggtatctcttctattgcaaccggtacatgaatcacatgcagagccttcgattcgagcataaactgtacgcgcaggtgaagcagaagatggaggagatgcagcaacacaatatgagctggattgaggtgcaattcttgaaaaaagccgtcgacgtgttgtgccagtgccgggcgactctgatgtatacatatgttttcgccttctacttgaagaaaaacaatcaatctataattttcgagaacaaccaggctgatctggaaaacgcaaccgaagtcctatccggctacctggaacgggacatttctcaagatagtctgcaggacattaagcaaaaggtacaagacaagtataggtattgcgagtcacggcgtcgggtgttactccagcatgttcatgaaggctacgaaaaggacttgtgggaatatatcgaagattag

SEQ ID NO: 158956 - DNA, 1674 bp, Artificial Sequence
  derived and/or modified sequence
atggatagtgacgagggttacaactacgaatttgacgaggatgaggagtgcagcgaggaggactctggcgccgaggaggaagaggacgaagacgacgacgagcccgatgacgatacgctggatttgggagaagtagaattggtggagcccggtttaggggtgggcggcgaacgagatggcctgctctgtggcgaaactggaggggggggagggagtgccctgggccccggcgggggtggaggggggggaggcggcggcgggggagggggtcctggccatgagcaggaggaggactacaggtacgaggttctgacagccgaacagattctgcaacatatggtggagtgtatacgcgaagtcaacgaggttatccagaaccccgctaccatcacccgaatcctcttatcccattttaattgggataaagagaaactcatggagagatactttgacgggaaccttgagaagttgtttgcagaatgtcacgtgataaatcctagtaaaaaatccagaacccgtcagatgaacacgcgctccagcgcacaggatatgccttgtcaaatttgttaccttaactacccaaactcatactttaccgggctcgagtgcggacataagttctgtatgcagtgctggtctgagtatctcactaccaaaataatggaggagggaatgggccaaactatctcgtgtcccgcccacggctgtgatatccttgtggacgataatacggtgatgcggctgatcacagattctaaggtcaagctcaaataccagcaccttatcaccaactcctttgtggagtgcaaccgcctattgaagtggtgccccgcaccagattgccatcacgtcgtgaaggtgcaataccctgacgcaaaaccagttagatgtaagtgcggacgacaattttgttttaattgtggagagaattggcacgaccccgtgaaatgtaaatggctgaaaaaatggataaaaaagtgcgatgatgacagcgaaacttccaactggatcgctgctaacacaaaggagtgtccgaaatgccacgttacaattgaaaaggacggaggctgtaatcacatggtgtgccgcaatcaaaattgcaaagccgagttctgttgggtctgcctgggaccgtgggaaccccatggatccgcatggtacaattgtaatcgctacaacgaagatgatgcaaaggccgctagggacgcacaggagagaagccgggccgccctccagcggtacttattctactgtaatcgttacatgaaccatatgcagtctctaaggtttgagcataagttatacgcgcaggtgaagcagaaaatggaagaaatgcagcaacataatatgtcatggattgaggtccagttcctgaagaaagctgtggatgtgttatgtcagtgcagagccaccctgatgtacacgtatgtcttcgctttttatctgaaaaaaaacaaccagagtattatcttcgagaataaccaggcagacctagagaatgcgacggaagttctttcgggctacctggaaagggacattagtcaggattccttacaggacataaaacaaaaggtgcaggataagtaccggtactgcgaaagtcggagaagagtgttgcttcaacacgtacatgaggggtacgagaaggatttgtgggagtatattgaagactag

SEQ ID NO: 158957 - DNA, 1584 bp, Artificial Sequence
  derived and/or modified sequence
ctgcggcgggccgccagcggccccctggcccccagcctgcccccaccccggcccccccggcggcaccagcccagcaatgccaacagaagatcctggggcggggccgccgcccggggggccggggcccggcctgccagcggccaccagcctgagcctgagcgggagcccggcccccggcggccccggcccctgcctgccagcgcctctgtgagaagagccccagcccggcgggccatggacagtgatgagggctacaactatgaatttgtgaatgaagtcatccagaacccagccaccatcacccgcatcctgctgagccacttcaactgggacaaggagaagctgatggagcgctactttgatggcaacctggagaagctgtttgctgagtgccacgtgatcaaccccagcaagaagagcaggacccggcagatgaacaccaggagcagcgcccaggacatgccctgccagatctgctacctgaactaccccaacagctacttcaccggcctggagtgtggccacaagttctgcatgcagtgctggagcgagtacctgaccaccaagatcatggaggagggcatgggccagaccatcagctgcccagcccacggctgtgacatcctggtggatgacaacacagtgatgaggctcatcacagacagcaaggtgaagctgaagtaccagcacctgatcaccaacagctttgtggagtgcaaccggctgctgaagtggtgcccagccccagactgccaccacgtggtgaaggtgcagtacccagatgccaagcctgtgcgctgcaagtgtggccggcagttctgcttcaactgtggggagaactggcatgaccctgtgaagtgcaagtggctgaagaagtggatcaagaagtgtgatgatgattctgagaccagcaactggattgctgccaacaccaaggaatgtcccaagtgccacgtgaccatcgagaaggatggcggctgcaaccacatggtgtgcaggaaccagaactgcaaggccgagttctgctgggtgtgcctgggcccctgggagccccacggcagcgcctggtacaactgcaaccgctacaatgaagatgatgccaaggccgccagagatgcccaggagaggagcagagctgccctgcagcgctacctgttctactgcaaccgctacatgaaccacatgcagagcctgcgctttgagcacaagctgtatgcccaggtgaagcagaagatggaggagatgcagcagcacaacatgtcctggattgaggtgcagttcctgaagaaggctgtggatgtgctgtgccagtgccgggccaccctgatgtacacctacgtgtttgccttctacctgaagaagaacaaccagagcatcatctttgagaacaaccaggccgacctggagaatgccacagaggtgctgagcggctacctggagcgggacatcagccaggacagcctgcaggacatcaagcagaaggtgcaggacaagtaccgctactgtgagagcagaagaagagtgctgctgcagcacgtgcatgagggctatgagaaggacctgtgggagtacatcgaggactag

SEQ ID NO: 158958 - DNA, 1674 bp, Artificial Sequence
  derived and/or modified sequence
atggacagtgatgagggctacaactatgaatttgatgaagatgaggagtgcagcgaggaggacagcggggctgaggaggaggaggatgaagatgatgatgagccagatgatgacaccctggacctgggggaggtggagctggtggagcccggcctgggcgtgggcggggagagagatggcctgctgtgtggggagaccggcggcggcggcggcagcgccctgggccctgggggcggcggcggcggcggcggcggcggcggcggcggcggccctggccacgagcaggaggaggactaccgctatgaggtgctgacagctgagcagatcctgcagcacatggtggagtgcatccgggaggtgaatgaagtcatccagaacccagccaccatcacccgcatcctgctgagccacttcaactgggacaaggagaagctgatggagcgctactttgatggcaacctggagaagctgtttgctgagtgccacgtgatcaaccccagcaagaagagcaggacccggcagatgaacaccaggagcagcgcccaggacatgccctgccagatctgctacctgaactaccccaacagctacttcaccggcctggagtgtggccacaagttctgcatgcagtgctggagcgagtacctgaccaccaagatcatggaggagggcatgggccagaccatcagctgcccagcccacggctgtgacatcctggtggatgacaacacagtgatgaggctcatcacagacagcaaggtgaagctgaagtaccagcacctgatcaccaacagctttgtggagtgcaaccggctgctgaagtggtgcccagccccagactgccaccacgtggtgaaggtgcagtacccagatgccaagcctgtgcgctgcaagtgtggccggcagttctgcttcaactgtggggagaactggcatgaccctgtgaagtgcaagtggctgaagaagtggatcaagaagtgtgatgatgattctgagaccagcaactggattgctgccaacaccaaggaatgtcccaagtgccacgtgaccatcgagaaggatggcggctgcaaccacatggtgtgcaggaaccagaactgcaaggccgagttctgctgggtgtgcctgggcccctgggagccccacggcagcgcctggtacaactgcaaccgctacaatgaagatgatgccaaggccgccagagatgcccaggagaggagcagagctgccctgcagcgctacctgttctactgcaaccgctacatgaaccacatgcagagcctgcgctttgagcacaagctgtatgcccaggtgaagcagaagatggaggagatgcagcagcacaacatgtcctggattgaggtgcagttcctgaagaaggctgtggatgtgctgtgccagtgccgggccaccctgatgtacacctacgtgtttgccttctacctgaagaagaacaaccagagcatcatctttgagaacaaccaggccgacctggagaatgccacagaggtgctgagcggctacctggagcgggacatcagccaggacagcctgcaggacatcaagcagaaggtgcaggacaagtaccgctactgtgagagcagaagaagagtgctgctgcagcacgtgcatgagggctatgagaaggacctgtgggagtacatcgaggactag

SEQ ID NO: 158959 - DNA, 1584 bp, Artificial Sequence
  derived and/or modified sequence
ctgcggcgggccgccagcggccccctggcccccagcctgccccccccaagacccccgagaaggcaccagccttctaacgccaaccgccgcagttggggaggtgcagcggcccggggcgccggagcacgccccgcgtccggacaccagccggagcccgagcgagagccgggaccgaggcgtcccaggcccctccctgcttcagctagcgttcgaagagcacccgctaggcgggcgatggattctgacgaggggtataactacgaattcgttaacgaggtcatccaaaacccagccaccatcacccgcatcctgctgtctcactttaattgggataaggagaagctcatggaacgatacttcgatgggaacctcgaaaagttgttcgctgagtgtcatgtgattaacccaagcaagaaaagtaggactcggcagatgaatactcggtcctcagcccaggatatgccatgccagatctgttacctcaactaccctaattcctacttcaccgggctagaatgcggccacaaattttgcatgcagtgctggtctgaataccttacaaccaagattatggaagagggtatggggcagacaatttcatgcccggcacacggctgcgatattctggttgacgataatacagtcatgagattaattacagactctaaggtgaaactaaagtatcagcatcttatcacaaactccttcgttgagtgcaatcgcttactcaagtggtgtccagctccagattgccaccacgtggttaaggttcagtatccagacgctaagcctgtacggtgtaagtgcggacggcaattctgcttcaactgtggcgaaaattggcacgacccagtcaaatgcaagtggttgaagaagtggataaagaagtgcgatgacgactcggaaaccagcaattggatagccgccaacactaaagagtgtcctaagtgtcacgtgactattgagaaagatggaggctgcaaccatatggtgtgcaggaaccagaactgtaaggccgagttttgctgggtgtgcttgggcccctgggagccgcatggatcagcctggtataattgtaatcgttacaacgaggatgatgcgaaggccgcccgtgacgcccaggagcgcagtagagccgcccttcagaggtacttgttctattgcaaccgatatatgaaccatatgcagtctctgcggtttgagcacaaactttacgcccaggtaaagcagaaaatggaggagatgcaacagcataacatgagctggatagaagtgcagttccttaagaaggctgtggatgtgctgtgtcagtgccgcgctacgctaatgtacacctatgtgttcgctttttatctgaagaagaacaaccagagtataatattcgaaaataaccaagccgacttagagaacgcgaccgaggtcctgtccggttacctcgaacgagacattagccaggactccctccaggatattaagcagaaagtacaggacaaatatcgctactgcgaaagtagacggcgggtgctgcttcagcacgtgcacgagggttacgaaaaggacttgtgggagtatatcgaagactag

SEQ ID NO: 158960 - DNA, 1674 bp, Artificial Sequence
  derived and/or modified sequence
atggacagcgacgagggctacaactacgagttcgacgaggacgaggagtgttccgaggaggactctggcgctgaggaagaggaagatgaagatgacgacgagccggacgacgacacactggatctgggagaggtcgaactggtcgagcccggcctgggcgtgggtggcgaaagagacggacttctgtgtggcgagactggcgggggtggaggctccgcattgggacctggcggagggggcggcgggggcggcggcggaggagggggaggacccggccacgagcaagaggaggactataggtacgaagtgctgaccgccgagcagattttacagcacatggtagaatgcattagggaggtaaacgaagtgatccagaacccggctacaatcactagaattctgcttagccactttaattgggataaggaaaagttaatggaaaggtacttcgatgggaatttggagaaactatttgccgaatgtcacgttataaatccttccaaaaagagcagaacaaggcagatgaacacgcggtcttctgcccaggatatgccatgccagatttgctacctgaactaccccaacagttacttcaccggactggaatgtggacacaaattttgcatgcagtgctggtccgagtacctcacaactaagatcatggaagaaggtatggggcagactatctcgtgcccagcccacggctgcgacatccttgtggacgataataccgtcatgcggctaattacggatagcaaggtgaaacttaaataccagcaccttatcactaattcatttgtggagtgcaaccgactgttaaaatggtgcccagcaccggactgtcaccacgtagttaaagttcagtatcccgacgccaaacctgttcgctgcaaatgtggccggcaattttgtttcaactgcggcgagaattggcatgacccagtcaagtgcaaatggctcaagaaatggattaagaagtgcgacgatgactctgaaacatctaattggatcgccgcaaatacaaaggaatgccctaagtgtcacgtaacaattgagaaagacggcggttgtaaccacatggtgtgccgtaatcagaactgtaaagccgagttttgctgggtgtgtctaggaccttgggaaccccacggatccgcatggtacaactgtaaccgttataatgaggacgacgctaaagccgcacgagacgcacaggagcgtagcagagccgctctccagaggtacttattttactgtaaccggtacatgaaccatatgcagagcttacggttcgagcacaagctttatgcccaggtaaagcagaagatggaggagatgcagcagcacaacatgtcatggatcgaggtgcagttcctgaagaaggccgttgatgtgctctgtcagtgccgcgcgacgctgatgtacacttacgtgtttgctttttatcttaaaaagaacaatcagtcaatcattttcgaaaataaccaggccgatctcgagaatgctacagaggttctgtccgggtacctggaaagggatatttctcaggatagcctgcaggacatcaagcagaaagttcaggacaagtacagatactgcgagtcgcgccgccgagtcctgctgcagcatgttcacgagggctatgagaaagatctatgggagtatattgaggactag

SEQ ID NO: 158961 - DNA, 1584 bp, Artificial Sequence
  derived and/or modified sequence
ttgagacgagcggcatcaggcccactcgctccttccctgccccctcctcgacctccaaggcgccatcagcctagcaatgccaaccggagatcctgggggggagcggctgccaggggagcaggggcaagacctgccagtggccatcagccagagccagagcgcgagccgggaccgagaaggccaagacctctgcccgcatccgcctcagtgcgtcgggctcctgcgcgaagggccatggactcagacgaggggtataattatgagttcgtgaatgaagtcattcaaaaccccgctacaatcaccaggatcttactaagccacttcaattgggacaaagaaaagctgatggaacggtacttcgacgggaacctagagaagcttttcgctgagtgtcacgtcatcaacccctctaaaaagtcacggacgcggcagatgaacactagatcttctgcacaggacatgccgtgtcagatctgctaccttaactaccctaattcctattttaccggactcgaatgcggccataaattttgtatgcagtgttggagcgagtatctgacaaccaagataatggaggagggtatgggacaaaccatctcatgccctgcccatgggtgcgatatactggtggatgacaacaccgtgatgcgattgattacagactccaaagtgaaactcaaataccagcacctgattacgaactctttcgtggaatgcaacaggctcttgaaatggtgcccagccccagattgccaccatgtggttaaagtacagtatcccgatgcaaagccagtgcgatgcaagtgtggcagacaattttgcttcaattgtggcgaaaactggcatgatcctgttaaatgcaagtggttaaagaaatggatcaaaaagtgcgatgatgatagcgaaacctctaactggatcgcggctaatacaaaagagtgtccaaaatgtcatgtgacaatcgagaaagatggaggttgtaaccacatggtgtgcagaaaccaaaattgcaaagctgagttctgctgggtctgcctgggtccatgggagcctcacggtagcgcatggtataattgcaaccgatacaacgaggacgatgctaaagctgcccgagatgcacaggaacgatcgagggcagctctgcagcgttacttattttattgcaaccgctatatgaaccatatgcagagcctacgcttcgagcataagctgtatgctcaggtaaagcagaagatggaggaaatgcaacaacacaacatgagttggatcgaagtgcagtttctgaagaaggctgtcgacgtcctatgccagtgccgggctaccctgatgtacacatacgtgtttgctttttacttaaaaaaaaataatcagtctatcatctttgaaaataatcaagcggacctcgagaacgccacggaagtgctgtcaggttacctggagcgagacatctcccaggacagtctgcaagatatcaagcagaaagtccaggataagtacagatattgcgaatcgaggcgcagggttttactgcaacatgtgcatgaagggtatgagaaggatctctgggagtacatcgaggattag

SEQ ID NO: 158962 - DNA, 1674 bp, Artificial Sequence
  derived and/or modified sequence
atggactccgatgagggctacaattatgagtttgacgaggacgaagaatgcagcgaggaggatagcggcgctgaggaagaagaggacgaggacgatgacgagcctgatgatgacacgctggacttgggcgaagtggagttagtagaacctggtctcggcgtgggaggggaacgagatggcttattatgcggggagaccgggggaggcggaggctccgctctcggaccaggaggcggaggaggtggtgggggtggcggtgggggaggcggaccagggcatgagcaggaggaagattaccgttatgaagtgttgacggctgaacagatcctccaacatatggtcgaatgcatccgggaggtcaacgaagttatccagaatccagccaccatcaccagaatccttcttagccattttaattgggacaaagagaaattgatggagcgctatttcgacgggaatctggaaaagctctttgctgagtgccacgtgattaacccatctaaaaagagcagaaccagacagatgaacacacgaagcagcgctcaggatatgccctgtcagatctgctaccttaactatcctaacagttatttcacagggctagaatgcggccacaagttttgtatgcaatgttggagtgagtatttgacaaccaagattatggaagaggggatgggacagacaatctcctgtccagctcatggatgcgatattctcgtggacgataatactgttatgcgcttgatcactgactcaaaggtcaagcttaagtaccagcacctgattaccaactcatttgtggaatgcaaccggctgctcaaatggtgcccagctccagactgccaccacgtggttaaagtgcagtaccctgatgcaaagcccgttaggtgtaaatgtggcagacaattctgtttcaactgcggggaaaactggcatgaccccgtgaaatgcaaatggctgaaaaagtggataaaaaagtgcgacgatgatagcgagacgtcgaactggattgcggcaaatacaaaagagtgtccaaagtgtcacgtgaccattgaaaaggatggcggttgcaaccatatggtgtgcagaaaccagaactgtaaagccgagttctgctgggtgtgtcttggtccatgggagccacacgggtcagcctggtacaactgcaataggtacaacgaggacgacgccaaggcagcgagggacgctcaagaaaggagccgcgctgcgttgcaacgctatctcttctactgtaaccggtacatgaaccacatgcagagtcttaggttcgagcacaagttgtacgcacaagtgaaacagaaaatggaggagatgcagcagcataacatgagctggattgaagttcagtttctgaagaaagcggttgatgtgctgtgtcagtgccgagccacgctcatgtacacatatgtgttcgccttttacctcaagaagaacaatcaatccattatttttgagaataaccaggctgacctggaaaatgccacagaagttctgtcaggatacctggaaagggacatttcacaggatagccttcaggacatcaaacaaaaagtacaggacaagtataggtactgcgagtcccgacgacgggtcctactccagcacgtgcacgaggggtatgagaaagacctctgggagtatatcgaggattag

SEQ ID NO: 158963 - DNA, 4846 bp, Artificial Sequence
  derived and/or modified sequence
ctgaggcgggcagcaagcggccccctcgctccctccctccctcctccgcgccctccccgccgccaccagccgtcaaacgccaaccgccgctcctggggaggagccgcggctcgcggggccggagccaggcctgcgtccggacatcagccggagccggagcgagagccggggcctcggcgtccccgccctctccccgcctcggccagcgtccgccgggcccccgcgcgtcgcgccatggactcggacgagggctacaactacgagttcgtcaacgaggtcatccagaatccagcaactatcacaagaatactccttagccacttcaattgggataaagagaagctaatggaaaggtactttgatggaaacctggagaagctctttgctgagtgtcatgtaattaatccaagtaaaaagtctcgaacacgccagatgaatacaaggtcatcagcacaggatatgccttgtcagatctgctacttgaactaccctaactcgtatttcactggccttgaatgtggacataagttttgtatgcagtgctggagtgaatatttaactaccaaaataatggaagaaggcatgggtcagactatttcgtgtcctgctcatggttgtgatatcttagtggatgacaacacagttatgcgcctgatcacagattcaaaagttaaattaaagtatcagcatttaataacaaatagctttgtagagtgcaatcgactgttaaagtggtgtcctgccccagattgccaccatgttgttaaagtccaatatcctgatgctaaacctgttcgctgcaaatgtgggcgccaattttgctttaactgtggagaaaattggcatgatcctgttaaatgtaagtggttaaagaaatggattaaaaagtgtgatgatgacagtgaaacctccaattggattgcagccaacacaaaggaatgtcccaaatgccatgtcacaattgagaaggatggtggttgtaatcacatggtctgtcgtaaccagaattgtaaagcagagttttgctgggtgtgtcttggcccatgggaaccacatggatctgcctggtacaactgtaaccgctataatgaggatgatgcaaaggcagcaagagatgcacaggagcgatctagggcagccctgcagaggtacctgttctactgtaatcgctatatgaaccacatgcagagcctgcgctttgagcacaaactatatgctcaggtgaaacagaaaatggaggagatgcagcagcacaacatgtcctggattgaggtgcagttcctgaagaaggcagttgatgtcctctgccagtgtcgtgccacactcatgtacacttatgtcttcgctttctacctcaaaaagaataaccagtccattatctttgagaataaccaagcagatctagagaatgccacagaggtgctctcgggctaccttgaacgagatatttcccaagattctctgcaggatataaagcagaaagtacaagacaagtacagatactgtgagagtcgacgaagggttttgttacagcatgtgcatgaaggctatgaaaaagatctgtgggagtacattgaggactgagaatggccctgcataaaatgaactctgaaaactttaccatctagagtgctcatgcaattaaaacaaaacaaacacaaacaaggaggcactaagcctattctgacaccactggtctgtagtaccagaattgttttgttaatggaaagtttaagtaaattatattgtaataaaaaggtagataaaccattgtacaacagtattctaggccaccaacaaaagtgtgacagacacactaaaagccctccaactttaacttgtaacgtagcttcattctcaaagctgactccttttttttctttttccttttcctgagtgtagtacagttaaaatttcaaacagctccttgacactgcttttcatgttcaaaccagccattttgttgtactttggtaaaggacctcttccccttcctcccctacacatacagatacacccacacacagactgactctctttctctcataccccaaggtcatgagtgaatgatgcttagttccttgtaaagaaaatcttgggatggggaaaggggtaggcagcaagaggattcaacaaacgaaaaacataaaaactttgtatatgacttttaaaacaagaggacaacacagtatttttcaaaattgtatatagcgcatatgcatggacaaagcaagcgtggcacgtgtttgcataatgtttaattacaaaaaaatatttattctttaaaaatcttcaagattatgtctatttgctgtgcattttctttcagtttgcttatctttcccgggttggggttgggataaaggtgtgtcggtttagcacctctggaagacctatctagagctctttcactttcctgaggttattttgccctttctggtgttggtatgtctgttgccggccatgggcctcatgccttgaattcctgctcttgatcagggacaagggaggtcaagctctgactaatgccatgacctgattaaggggtacagcagggagttttgttgctacagctcatgaattaacctgtcccaacctaatccccctccatggcatcatgcctctacccaagcctttgtgtgcccatgttatgcacacagctgtaggcattcttaagtcccctgtcgcatccagtggaagcattttaaaatttcttttactttttggttttcccttaattgctgcttttcagattttagttatggctcgtctgctcaccccttctctacattagggtgtcaaagagaatgttttgctttaaatataaatagccattcatttagtctcagattgtgaatttaaaatggtggataccgaaattgcttgtgtgtgttgctgtgggtttggtttgaaggcaaacacccctagaacatgatattcccatctagtgcatttaaatagaaatcactgagtttgctgcttttttattgtcagcagataggagaattaataatgcattttagctgtgatgtccatttttatgaaattcctactaagagctatgttaaaagtaaaggatggtggtggttgtattaactatatacctgtttaggccattctggctgtggtatttttcaataggtcagcatctgtaaatctgtcagttttatacaggagtgcagagtgaactaggcaactagattaagaggtctaaatatgaaataccagttgaggctgaggacctcttcgtcttcctttaaatgtcttttgcctagggagtgtttaccatttgtgaggcagctttgtctgctcttacactgtacatcctattactccattgggaagtaggttcactttcctctggccttttgcctaagttaggctttgctgaatcaaccctacttttccttttagaaaaggttgttacaggagatttactggcaactgttcttttcccatcaaaaatcagtgaatgtttgctgagtataaatgctgcttccttaaaccacttgtcgctttaggatcaactttacctgtaccttttctcctttcctcccttgccacctcaggtgcaaatctgaactcagtgtctgcttcttccattttctcgtctctctcccctcttcccccattatccatatgacattattttacttcaaatgacagcatcaatcttaaaaagatatacattaaaactaaggagtttttttaaagaaagcctgaataagttcctttccctggtaactttgaaaagcagtcagagttgctatatagatatatgtggctcctttaaaatgctttgtgtatgtgtggtgtttaaaaaaaaaaaatcttaccagttaactttgcagtgtctaggtttgagtgtcataaatccacgtgttcctgttgcaacaaatacccaaaaattgtgtgtgcacttcctaataccagtcttcacccatggaggaacagtgctttttagagatgctttctatttcaatgttggcatactgcctgagggtattgcagttgtgggtgcattccctaatttgtatgatcaagatgaactggcccttttctacttccaagcttttaacagataccaccatatttgacagaattcccagagtgaattgcttgtgttattagtagattcagtgcccccagctgggataggcaagccatgacagcttccctgtttcacctacagaagtcttatctgagggatctattcacagtaagcaccaaggtctccatgtcttgaggtcagtttcattgtcttttgaaaagtgcatgcttcatttgaacaattcattcagcagcagatggactttcagtgatttaaaataaaattttgatccaaagctcaggacacaaaccacagtggtaaaattgagtagcatataatatcagactaaattatctgtaattttccacaacccagattgtatgtgttttatgtgtgtttaaataaatatgttagatacacgtgtatacatacacccatatacaacagatccaagactggctgacttcatttgaaatggttgaatctgctgtgtaataaagtggttcaaccatgattaggaactgaaatttagtagaagagggaaaaggagttaatgtaacaaattattttagctacaaaccccggtaatagagcacttgggggatgggatggggtgggttggtgagacaatcagaatggtaaattgattaaatgctcctaaccctgtaattttgtgcatagagcaccctatgctgtggaaataactgttcttagatttcattgtaactggactgttcaggttgcccagagggaaagaacattcctaattctaataaaataaacttttattttgtt

SEQ ID NO: 158964 - DNA, 6047 bp, Artificial Sequence
  derived and/or modified sequence
gctcagtagcgatagcagcggccgtggaggtggcgttggggactgttttctctcggaggccggagcggagccgcgtctgactgaggcgggcagcaagcggccccctcgctccctccctccctcctccgcgccctccccgccgccaccagccgtcaaacgccaaccgccgctcctggggaggagccgcggctcgcggggccggagccaggcctgcgtccggacatcagccggagccggagcgagagccggggcctcggcgtccccgccctctccccgcctcggccagcgtccgccgggcccccgcgcgtcgcgccatggactcggacgagggctacaactacgagttcgacgaggacgaggagtgcagtgaggaggacagcggcgccgaggaggaggaggacgaagacgacgacgagccggacgatgataccctggatctgggcgaggtggagctggtggagcccgggctgggcgtcggcggggagcgggacggactgctgtgcggggagacgggcggtggcggcggcagcgctctggggcccggcggtggcggcggcggcggcggcggcggtggtggtggcgggccggggcatgagcaggaggaggattaccgctacgaggtgctcacggccgagcagattctacaacacatggtggaatgtatccgggaggtcaacgaggtcatccagaatccagcaactatcacaagaatactccttagccacttcaattgggataaagagaagctaatggaaaggtactttgatggaaacctggagaagctctttgctgagtgtcatgtaattaatccaagtaaaaagtctcgaacacgccagatgaatacaaggtcatcagcacaggatatgccttgtcagatctgctacttgaactaccctaactcgtatttcactggccttgaatgtggacataagttttgtatgcagtgctggagtgaatatttaactaccaaaataatggaagaaggcatgggtcagactatttcgtgtcctgctcatggttgtgatatcttagtggatgacaacacagttatgcgcctgatcacagattcaaaagttaaattaaagtatcagcatttaataacaaatagctttgtagagtgcaatcgactgttaaagtggtgtcctgccccagattgccaccatgttgttaaagtccaatatcctgatgctaaacctgttcgctgcaaatgtgggcgccaattttgctttaactgtggagaaaattggcatgatcctgttaaatgtaagtggttaaagaaatggattaaaaagtgtgatgatgacagtgaaacctccaattggattgcagccaacacaaaggaatgtcccaaatgccatgtcacaattgagaaggatggtggttgtaatcacatggtctgtcgtaaccagaattgtaaagcagagttttgctgggtgtgtcttggcccatgggaaccacatggatctgcctggtacaactgtaaccgctataatgaggatgatgcaaaggcagcaagagatgcacaggagcgatctagggcagccctgcagaggtacctgttctactgtaatcgctatatgaaccacatgcagagcctgcgctttgagcacaaactatatgctcaggtgaaacagaaaatggaggagatgcagcagcacaacatgtcctggattgaggtgcagttcctgaagaaggcagttgatgtcctctgccagtgtcgtgccacactcatgtacacttatgtcttcgctttctacctcaaaaagaataaccagtccattatctttgagaataaccaagcagatctagagaatgccacagaggtgctctcgggctaccttgaacgagatatttcccaagattctctgcaggatataaagcagaaagtacaagacaagtacagatactgtgagagtcgacgaagggttttgttacagcatgtgcatgaaggctatgaaaaagatctgtgggagtacattgaggactgagaatggccctgcataaaatgaactctgaaaactttaccatctagagtgctcatgcaattaaaacaaaacaaacacaaacaaggaggcactaagcctattctgacaccactggtctgtagtaccagaattgttttgttaatggaaagtttaagtaaattatattgtaataaaaaggtagataaaccattgtacaacagtattctaggccaccaacaaaagtgtgacagacacactaaaagccctccaactttaacttgtaacgtagcttcattctcaaagctgactccttttttttctttttccttttcctgagtgtagtacagttaaaatttcaaacagctccttgacactgcttttcatgttcaaaccagccattttgttgtactttggtaaaggacctcttccccttcctcccctacacatacagatacacccacacacagactgactctctttctctcataccccaaggtcatgagtgaatgatgcttagttccttgtaaagaaaatcttgggatggggaaaggggtaggcagcaagaggattcaacaaacgaaaaacataaaaactttgtatatgacttttaaaacaagaggacaacacagtatttttcaaaattgtatatagcgcatatgcatggacaaagcaagcgtggcacgtgtttgcataatgtttaattacaaaaaaatatttattctttaaaaatcttcaagattatgtctatttgctgtgcattttctttcagtttgcttatctttcccgggttggggttgggataaaggtgtgtcggtttagcacctctggaagacctatctagagctctttcactttcctgaggttattttgccctttctggtgttggtatgtctgttgccggccatgggcctcatgccttgaattcctgctcttgatcagggacaagggaggtcaagctctgactaatgccatgacctgattaaggggtacagcagggagttttgttgctacagctcatgaattaacctgtcccaacctaatccccctccatggcatcatgcctctacccaagcctttgtgtgcccatgttatgcacacagctgtaggcattcttaagtcccctgtcgcatccagtggaagcattttaaaatttcttttactttttggttttcccttaattgctgcttttcagattttagttatggctcgtctgctcaccccttctctacattagggtgtcaaagagaatgttttgctttaaatataaatagccattcatttagtctcagattgtgaatttaaaatggtggataccgaaattgcttgtgtgtgttgctgtgggtttggtttgaaggcaaacacccctagaacatgatattcccatctagtgcatttaaatagaaatcactgagtttgctgcttttttattgtcagcagataggagaattaataatgcattttagctgtgatgtccatttttatgaaattcctactaagagctatgttaaaagtaaaggatggtggtggttgtattaactatatacctgtttaggccattctggctgtggtatttttcaataggtcagcatctgtaaatctgtcagttttatacaggagtgcagagtgaactaggcaactagattaagaggtctaaatatgaaataccagttgaggctgaggacctcttcgtcttcctttaaatgtcttttgcctagggagtgtttaccatttgtgaggcagctttgtctgctcttacactgtacatcctattactccattgggaagtaggttcactttcctctggccttttgcctaagttaggctttgctgaatcaaccctacttttccttttagaaaaggttgttacaggagatttactggcaactgttcttttcccatcaaaaatcagtgaatgtttgctgagtataaatgctgcttccttaaaccacttgtcgctttaggatcaactttacctgtaccttttctcctttcctcccttgccacctcaggtgcaaatctgaactcagtgtctgcttcttccattttctcgtctctctcccctcttcccccattatccatatgacattattttacttcaaatgacagcatcaatcttaaaaagatatacattaaaactaaggagtttttttaaagaaagcctgaataagttcctttccctggtaactttgaaaagcagtcagagttgctatatagatatatgtggctcctttaaaatgctttgtgtatgtgtggtgtttaaaaaaaaaaaatcttaccagttaactttgcagtgtctaggtttgagtgtcataaatccacgtgttcctgttgcaacaaatacccaaaaattgtgtgtgcacttcctaataccagtcttcacccatggaggaacagtgctttttagagatgctttctatttcaatgttggcatactgcctgagggtattgcagttgtgggtgcattccctaatttgtatgatcaagatgaactggcccttttctacttccaagcttttaacagataccaccatatttgacagaattcccagagtgaattgcttgtgttattagtagattcagtgcccccagctgggataggcaagccatgacagcttccctgtttcacctacagaagtcttatctgagggatctattcacagtaagcaccaaggtctccatgtcttgaggtcagtttcattgtcttttgaaaagtgcatgcttcatttgaacaattcattcagcagcagatggactttcagtgatttaaaataaaattttgatccaaagctcaggacacaaaccacagtggtaaaattgagtagcatataatatcagactaaattatctgtaattttccacaacccagattgtatgtgttttatgtgtgtttaaataaatatgttagatacacgtgtatacatacacccatatacaacagatccaagactggctgacttcatttgaaatggttgaatctgctgtgtaataaagtggttcaaccatgattaggaactgaaatttagtagaagagggaaaaggagttaatgtaacaaattattttagctacaaaccccggtaatagagcacttgggggatgggatggggtgggttggtgagacaatcagaatggtaaattgattaaatgctcctaaccctgtaattttgtgcatagagcaccctatgctgtggaaataactgttcttagatttcattgtaactggactgttcaggttgcccagagggaaagaacattcctaattctaataaaataaacttttattttgttattccattagttacttatgtttatttttatagttaaaaaatgactaaaggtggctaatagccacccgtattatgtgccttattcactgttcccacttaatataaaatgtcaaaaattggttgtttctttgcagggaactgtgaatgagcccattcccccaacatttaacttggttaatgaagctttcagagcattttctgaaagatttccaatttctgcatctcagatattgaatttaaattgtttgtgttgtaacagtgatacaaaaatgttcaatagctctttgaatgccactttttttaaagaaaatactttaaaagtcattcttagctaacctcaaaactcctttacattactttcattttagctcactcttaaagctgatactgttatatagggatgaagggagagttttcttaaagaaggtcccaaagttgaagatcgtttgtcattgatactctggccaagtccaggttttaggacaatttaatttactcttatttggatctgtaattatgggagtttatcacttttcctcttcaaagcacttcaacttactgtctaaaacaagtggagaagaaattgccattttttataaaggaggaagataaggctcactgaggttaaataactccctcaatttttcatttccttctacctgaaacttaacatcatgctacctctttgtatcatattttgttattctggtcacagaatgacctagtattctgtaccagggaaggtagttcttaactatattgtacttttaaaccacattaaagactattataaatgcc

SEQ ID NO: 158965 - DNA, 1584 bp, Artificial Sequence
  derived and/or modified sequence
ctgagaagagccgccagcggccccctggcccccagcctgcccccccccagaccccccagaagacaccagcccagcaacgccaacagaagaagctggggcggcgccgccgccagaggcgccggcgccagacccgccagcggccaccagcccgagcccgagagagagcccggccccagaagacccagacccctgcccgccagcgccagcgtgagaagagcccccgccagaagagccatggacagcgacgagggctacaactacgagttcgtgaacgaggtgatccagaaccccgccaccatcaccagaatcctgctgagccacttcaactgggacaaggagaagctgatggagagatacttcgacggcaacctggagaagctgttcgccgagtgccacgtgatcaaccccagcaagaagagcagaaccagacagatgaacaccagaagcagcgcccaggacatgccctgccagatctgctacctgaactaccccaacagctacttcaccggcctggagtgcggccacaagttctgcatgcagtgctggagcgagtacctgaccaccaagatcatggaggagggcatgggccagaccatcagctgccccgcccacggctgcgacatcctggtggacgacaacaccgtgatgagactgatcaccgacagcaaggtgaagctgaagtaccagcacctgatcaccaacagcttcgtggagtgcaacagactgctgaagtggtgccccgcccccgactgccaccacgtggtgaaggtgcagtaccccgacgccaagcccgtgagatgcaagtgcggcagacagttctgcttcaactgcggcgagaactggcacgaccccgtgaagtgcaagtggctgaagaagtggatcaagaagtgcgacgacgacagcgagaccagcaactggatcgccgccaacaccaaggagtgccccaagtgccacgtgaccatcgagaaggacggcggctgcaaccacatggtgtgcagaaaccagaactgcaaggccgagttctgctgggtgtgcctgggcccctgggagccccacggcagcgcctggtacaactgcaacagatacaacgaggacgacgccaaggccgccagagacgcccaggagagaagcagagccgccctgcagagatacctgttctactgcaacagatacatgaaccacatgcagagcctgagattcgagcacaagctgtacgcccaggtgaagcagaagatggaggagatgcagcagcacaacatgagctggatcgaggtgcagttcctgaagaaggccgtggacgtgctgtgccagtgcagagccaccctgatgtacacctacgtgttcgccttctacctgaagaagaacaaccagagcatcatcttcgagaacaaccaggccgacctggagaacgccaccgaggtgctgagcggctacctggagagagacatcagccaggacagcctgcaggacatcaagcagaaggtgcaggacaagtacagatactgcgagagcagaagaagagtgctgctgcagcacgtgcacgagggctacgagaaggacctgtgggagtacatcgaggactag

SEQ ID NO: 158966 - DNA, 1674 bp, Artificial Sequence
  derived and/or modified sequence
atggacagcgacgagggctacaactacgagttcgacgaggacgaggagtgcagcgaggaggacagcggcgccgaggaggaggaggacgaggacgacgacgagcccgacgacgacaccctggacctgggcgaggtggagctggtggagcccggcctgggcgtgggcggcgagagagacggcctgctgtgcggcgagaccggcggcggcggcggcagcgccctgggccccggcggcggcggcggcggcggcggcggcggcggcggcggcggccccggccacgagcaggaggaggactacagatacgaggtgctgaccgccgagcagatcctgcagcacatggtggagtgcatcagagaggtgaacgaggtgatccagaaccccgccaccatcaccagaatcctgctgagccacttcaactgggacaaggagaagctgatggagagatacttcgacggcaacctggagaagctgttcgccgagtgccacgtgatcaaccccagcaagaagagcagaaccagacagatgaacaccagaagcagcgcccaggacatgccctgccagatctgctacctgaactaccccaacagctacttcaccggcctggagtgcggccacaagttctgcatgcagtgctggagcgagtacctgaccaccaagatcatggaggagggcatgggccagaccatcagctgccccgcccacggctgcgacatcctggtggacgacaacaccgtgatgagactgatcaccgacagcaaggtgaagctgaagtaccagcacctgatcaccaacagcttcgtggagtgcaacagactgctgaagtggtgccccgcccccgactgccaccacgtggtgaaggtgcagtaccccgacgccaagcccgtgagatgcaagtgcggcagacagttctgcttcaactgcggcgagaactggcacgaccccgtgaagtgcaagtggctgaagaagtggatcaagaagtgcgacgacgacagcgagaccagcaactggatcgccgccaacaccaaggagtgccccaagtgccacgtgaccatcgagaaggacggcggctgcaaccacatggtgtgcagaaaccagaactgcaaggccgagttctgctgggtgtgcctgggcccctgggagccccacggcagcgcctggtacaactgcaacagatacaacgaggacgacgccaaggccgccagagacgcccaggagagaagcagagccgccctgcagagatacctgttctactgcaacagatacatgaaccacatgcagagcctgagattcgagcacaagctgtacgcccaggtgaagcagaagatggaggagatgcagcagcacaacatgagctggatcgaggtgcagttcctgaagaaggccgtggacgtgctgtgccagtgcagagccaccctgatgtacacctacgtgttcgccttctacctgaagaagaacaaccagagcatcatcttcgagaacaaccaggccgacctggagaacgccaccgaggtgctgagcggctacctggagagagacatcagccaggacagcctgcaggacatcaagcagaaggtgcaggacaagtacagatactgcgagagcagaagaagagtgctgctgcagcacgtgcacgagggctacgagaaggacctgtgggagtacatcgaggactag

SEQ ID NO: 158967 - protein, 3907 aa, Artificial Sequence
  derived and/or modified sequence
MEDEERQKKLEAGKAKLAQFRQRKAQSDGQSPSKKQKKKRKTSSSKHDVSAHHDLNIDQSQCNEMYINSSQRVESTVIPESTIMRTLHSGEITSHEQGFSVELESEISTTADDCSSEVNGCSFVMRTGKPTNLLREEEFGVDDSYSEQGAQDSPTHLEMMESELAGKQHEIEELNRELEEMRVTYGTEGLQQLQEFEAAIKQRDGIITQLTANLQQARREKDETMREFLELTEQSQKLQIQFQQLQASETLRNSTHSSTAADLLQAKQQILTHQQQLEEQDHLLEDYQKKKEDFTMQISFLQEKIKVYEMEQDKKVENSNKEEIQEKETIIEELNTKIIEEEKKTLELKDKLTTADKLLGELQEQIVQKNQEIKNMKLELTNSKQKERQSSEEIKQLMGTVEELQKRNHKDSQFETDIVQRMEQETQRKLEQLRAELDEMYGQQIVQMKQELIRQHMAQMEEMKTRHKGEMENALRSYSNITVNEDQIKLMNVAINELNIKLQDTNSQKEKLKEELGLILEEKCALQRQLEDLVEELSFSREQIQRARQTIAEQESKLNEAHKSLSTVEDLKAEIVSASESRKELELKHEAEVTNYKIKLEMLEKEKNAVLDRMAESQEAELERLRTQLLFSHEEELSKLKEDLEIEHRINIEKLKDNLGIHYKQQIDGLQNEMSQKIETMQFEKDNLITKQNQLILEISKLKDLQQSLVNSKSEEMTLQINELQKEIEILRQEEKEKGTLEQEVQELQLKTELLEKQMKEKENDLQEKFAQLEAENSILKDEKKTLEDMLKIHTPVSQEERLIFLDSIKSKSKDSVWEKEIEILIEENEDLKQQCIQLNEEIEKQRNTFSFAEKNFEVNYQELQEEYACLLKVKDDLEDSKNKQELEYKSKLKALNEELHLQRINPTTVKMKSSVFDEDKTFVAETLEMGEVVEKDTTELMEKLEVTKREKLELSQRLSDLSEQLKQKHGEISFLNEEVKSLKQEKEQVSLRCRELEIIINHNRAENVQSCDTQVSSLLDGVVTMTSRGAEGSVSKVNKSFGEESKIMVEDKVSFENMTVGEESKQEQLILDHLPSVTKESSLRATQPSENDKLQKELNVLKSEQNDLRLQMEAQRICLSLVYSTHVDQVREYMENEKDKALCSLKEELIFAQEEKIKELQKIHQLELQTMKTQETGDEGKPLHLLIGKLQKAVSEECSYFLQTLCSVLGEYYTPALKCEVNAEDKENSGDYISENEDPELQDYRYEVQDFQENMHTLLNKVTEEYNKLLVLQTRLSKIWGQQTDGMKLEFGEENLPKEETEFLSIHSQMTNLEDIDVNHKSKLSSLQDLEKTKLEEQVQELESLISSLQQQLKETEQNYEAEIHCLQKRLQAVSESTVPPSLPVDSVVITESDAQRTMYPGSCVKKNIDGTIEFSGEFGVKEETNIVKLLEKQYQEQLEEEVAKVIVSMSIAFAQQTELSRISGGKENTASSKQAHAVCQQEQHYFNEMKLSQDQIGFQTFETVDVKFKEEFKPLSKELGEHGKEILLSNSDPHDIPESKDCVLTISEEMFSKDKTFIVRQSIHDEISVSSMDASRQLMLNEEQLEDMRQELVRQYQEHQQATELLRQAHMRQMERQREDQEQLQEEIKRLNRQLAQRSSIDNENLVSERERVLLEELEALKQLSLAGREKLCCELRNSSTQTQNGNENQGEVEEQTFKEKELDRKPEDVPPEILSNERYALQKANNRLLKILLEVVKTTAAVEETIGRHVLGILDRSSKSQSSASLIWRSEAEASVKSCVHEEHTRVTDESIPSYSGSDMPRNDINMWSKVTEEGTELSQRLVRSGFAGTEIDPENEELMLNISSRLQAAVEKLLEAISETSSQLEHAKVTQTELMRESFRQKQEATESLKCQEELRERLHEESRAREQLAVELSKAEGVIDGYADEKTLFERQIQEKTDIIDRLEQELLCASNRLQELEAEQQQIQEERELLSRQKEAMKAEAGPVEQQLLQETEKLMKEKLEVQCQAEKVRDDLQKQVKALEIDVEEQVSRFIELEQEKNTELMDLRQQNQALEKQLEKMRKFLDEQAIDREHERDVFQQEIQKLEQQLKVVPRFQPISEHQTREVEQLANHLKEKTDKCSELLLSKEQLQRDIQERNEEIEKLEFRVRELEQALLVSADTFQKVEDRKHFGAVEAKPELSLEVQLQAERDAIDRKEKEITNLEEQLEQFREELENKNEEVQQLHMQLEIQKKESTTRLQELEQENKLFKDDMEKLGLAIKESDAMSTQDQHVLFGKFAQIIQEKEVEIDQLNEQVTKLQQQLKITTDNKVIEEKNELIRDLETQIECLMSDQECVKRNREEEIEQLNEVIEKLQQELANIGQKTSMNAHSLSEEADSLKHQLDVVIAEKLALEQQVETANEEMTFMKNVLKETNFKMNQLTQELFSLKRERESVEKIQSIPENSVNVAIDHLSKDKPELEVVLTEDALKSLENQTYFKSFEENGKGSIINLETRLLQLESTVSAKDLELTQCYKQIKDMQEQGQFETEMLQKKIVNLQKIVEEKVAAALVSQIQLEAVQEYAKFCQDNQTISSEPERTNIQNLNQLREDELGSDISALTLRISELESQVVEMHTSLILEKEQVEIAEKNVLEKEKKLLELQKLLEGNEKKQREKEKKRSPQDVEVLKTTTELFHSNEESGFFNELEALRAESVATKAELASYKEKAEKLQEELLVKETNMTSLQKDLSQVRDHLAEAKEKLSILEKEDETEVQESKKACMFEPLPIKLSKSIASQTDGTLKISSSNQTPQILVKNAGIQINLQSECSSEEVTEIISQFTEKIEKMQELHAAEILDMESRHISETETLKREHYVAVQLLKEECGTLKAVIQCLRSKEGSSIPELAHSDAYQTREICSSDSGSDWGQGIYLTHSQGFDIASEGRGEESESATDSFPKKIKGLLRAVHNEGMQVLSLTESPYSDGEDHSIQQVSEPWLEERKAYINTISSLKDLITKMQLQREAEVYDSSQSHESFSDWRGELLLALQQVFLEERSVLLAAFRTELTALGTTDAVGLLNCLEQRIQEQGVEYQAAMECLQKADRRSLLSEIQALHAQMNGRKITLKREQESEKPSQELLEYNIQQKQSQMLEMQVELSSMKDRATELQEQLSSEKMVVAELKSELAQTKLELETTLKAQHKHLKELEAFRLEVKDKTDEVHLLNDTLASEQKKSRELQWALEKEKAKLGRSEERDKEELEDLKFSLESQKQRNLQLNLLLEQQKQLLNESQQKIESQRMLYDAQLSEEQGRNLELQVLLESEKVRIREMSSTLDRERELHAQLQSSDGTGQSRPPLPSEDLLKELQKQLEEKHSRIVELLNETEKYKLDSLQTRQQMEKDRQVHRKTLQTEQEANTEGQKKMHELQSKVEDLQRQLEEKRQQVYKLDLEGQRLQGIMQEFQKQELEREEKRESRRILYQNLNEPTTWSLTSDRTRNWVLQQKIEGETKESNYAKLIEMNGGGTGCNHELEMIRQKLQCVASKLQVLPQKASERLQFETADDEDFIWVQENIDEIILQLQKLTGQQGEEPSLVSPSTSCGSLTERLLRQNAELTGHISQLTEEKNDLRNMVMKLEEQIRWYRQTGAGRDNSSRFSLNGGANIEAIIASEKEVWNREKLTLQKSLKRAEAEVYKLKAELRNDSLLQTLSPDSEHVTLKRIYGKYLRAESFRKALIYQKKYLLLLLGGFQECEDATLALLARMGGQPAFTDLEVITNRPKGFTRFRSAVRVSIAISRMKFLVRRWHRVTGSVSININRDGFGLNQGAEKTDSFYHSSGGLELYGEPRHTTYRSRSDLDYIRSPLPFQNRYPGTPADFNPGSLACSQLQNYDPDRALTDYITRLEALQRRLGTIQSGSTTQFHAGMRR

SEQ ID NO: 158968 - DNA, 11724 bp, Artificial Sequence
  derived and/or modified sequence
atggaggacgaggagagacagaaaaagctggaagcaggaaaagctaagctggcccagttccgtcagagaaaagcacagagcgacggacagagccctagcaaaaagcagaagaagaaaagaaaaacgtcaagcagcaagcatgatgtgagtgcccatcacgatctgaatatcgatcaatcacagtgtaatgaaatgtatataaactcctcccaacgcgtggagagtacggtcatacccgagagcaccatcatgaggacgttacacagtggtgagattacctcgcacgaacagggtttcagcgtggagctcgagtccgagatttctactaccgccgacgactgctcctccgaggtaaacgggtgttctttcgtgatgagaaccggcaagccgacaaacttattgcgggaagaggagttcggagtggatgacagctattccgagcagggtgcgcaagactcacccacacacctcgaaatgatggagtcggagttggccggcaaacagcatgagattgaggagttgaatcgggaactggaggaaatgcgcgtcacatatgggaccgagggcctccagcagctccaggagtttgaggcagcgataaagcagcgggatggcattataacacaactgactgccaaccttcagcaggctcgaagagagaaggacgagacaatgcgagaatttctggagctgactgaacagtcccaaaaactgcagatccaatttcaacagctgcaagccagtgaaacacttcggaactccacgcacagctcaactgcagcagacctattgcaagcaaaacaacaaattctgacacatcaacagcagctggaggagcaagaccacttgctcgaagattaccagaaaaagaaggaggactttactatgcagatttcctttctccaggagaagataaaggtctatgaaatggagcaggataaaaaagtggaaaacagcaataaggaagagatccaggagaaggagaccatcatcgaagaactcaataccaagatcatagaggaggagaaaaaaactctcgaacttaaggacaaactaactacagccgataaactcctcggggagctgcaagagcagatcgtccagaagaaccaggaaatcaagaatatgaaacttgagttgaccaacagtaaacagaaggagagacaatcttcggaggaaattaagcaacttatggggacggtcgaggagctacagaagagaaaccataaagactctcagtttgagactgacatcgtacagcgcatggagcaggagacgcaacgaaaattagaacagttgcgggcagagctcgacgaaatgtatggacagcagattgtccaaatgaagcaagagttgattcggcagcatatggcacagatggaagaaatgaaaacacgtcataagggcgagatggaaaatgcacttagaagctattcaaacattacagttaacgaggaccagattaagcttatgaatgtggctatcaacgaactgaacatcaagctacaggatactaacagccagaaggaaaaactgaaggaagagttggggctcatactcgaggagaagtgcgcgttgcagaggcagctcgaggacctcgtggaggagctgtccttttcaagagagcagattcaacgcgctagacaaacaatcgctgaacaggagagcaaactgaacgaggcccataaatcactctccactgttgaggatctgaaagccgagatcgtttcagcttcagagtcgcgtaaagaattggaactaaagcacgaggccgaggtaaccaactacaagatcaaacttgagatgctcgagaaggaaaagaacgccgtgctggatcggatggcggagtcgcaggaggccgagttggaaagacttcggacgcaactgctcttttcccatgaggaagagctgtccaagctaaaagaggatttagagattgaacacaggattaatatagagaagctgaaagataacttgggtatccattacaagcaacagattgacggactgcagaacgagatgtcacagaagattgaaacgatgcagttcgaaaaggataacctgatcacaaagcagaaccaattaatactggagatttctaaactcaaagacctgcagcagtccctggtgaacagcaaatccgaggaaatgaccttgcagatcaatgagcttcagaaagagatcgagatactgaggcaggaagagaaagaaaaaggcaccctggaacaggaggtacaggaactgcagctgaaaaccgagcttcttgagaagcaaatgaaggagaaggagaacgatctacaggagaaatttgctcagctggaggcagagaattcgatcttaaaggatgagaagaaaacactggaagacatgttgaaaattcacacccctgtgagccaggaagagcgactgatctttcttgactctataaagtccaagtcgaaagacagcgtttgggagaaggaaatcgagattctcattgaagagaatgaggatcttaagcagcagtgcatacagctgaacgaagagatcgagaagcaacgaaatactttcagctttgccgagaaaaactttgaggtaaactaccaggagctacaggaagagtacgcttgtttgctaaaagttaaagacgatctggaagattccaagaacaagcaagagctagaatataagtctaagctcaaggcactgaatgaagagcttcacctccagcgtattaatccaactaccgtcaagatgaagagctctgtgttcgatgaagacaaaacattcgtggccgagacactggaaatgggcgaggtcgtcgagaaggacactactgaactgatggaaaaactagaagtcacgaagagagagaagctcgagctttcccagaggctgtcggacctatctgaacaactcaaacaaaaacatggagagatcagttttctgaatgaggaagttaaatccttaaagcaagagaaagagcaggtctcacttcggtgccgagagctcgagatcattattaatcacaatcgggccgagaacgtgcaatcttgtgacacacaggtaagctctttgctcgacggggttgtgactatgaccagcaggggcgctgaaggaagcgtgagtaaagtgaataagtcattcggtgaagagagcaaaatcatggtggaagacaaagtctcatttgagaacatgacagtgggtgaagaatcaaaacaggaacaattgatcctggatcacctcccctctgtgacaaaagagtcttctttgagggctacacaacctagcgagaatgataaactgcagaaggagctaaacgtgctgaagtccgaacagaacgaccttcggctgcagatggaagcacaacggatctgtctgagtctggtctactccacacacgtcgatcaggttcgagaatacatggagaacgaaaaggacaaagccctgtgctccttgaaagaggaacttatctttgcccaagaagaaaagataaaggagctgcagaagatacatcagctggagctgcaaactatgaagacacaggaaaccggagatgaagggaagcccctgcatttgctgatcgggaagcttcaaaaagccgtatctgaagagtgcagttacttcctgcagactttgtgttccgtcctcggtgagtactacactcccgccctgaagtgtgaggtcaatgcggaagacaaggagaatagtggcgattatatttctgagaacgaggacccagaactgcaggattacaggtacgaggtgcaggattttcaggaaaacatgcatactcttttaaacaaggtgacggaagaatacaacaagctactggttctccagacacgactcagtaaaatctggggacagcagaccgatggcatgaagttggagtttggagaggagaatctgcctaaggaggagaccgagttcctgagcatacattctcagatgaccaacctggaagacattgatgtaaaccacaaaagtaaactgtcctccttgcaggacctggagaagactaaactggaggaacaggttcaggagctcgagtcgttaatatcatctctccagcagcagctgaaggagacagagcagaattacgaagccgaaattcactgtctgcagaagagactgcaggcagtcagcgagtccactgtcccaccatctctgcctgtggactcagtggtaataaccgagtcagacgcccagagaaccatgtatcctggatcctgcgtgaagaagaacatcgatgggaccattgagtttagtggtgaattcggggtcaaggaagagaccaatatcgtgaagttgctggaaaagcaataccaagaacagctggaggaggaagtggctaaagtgatagtgagtatgtctatagcattcgcacaacagactgagctttccagaatcagcggaggtaaggagaataccgcctccagcaaacaggcccacgccgtttgccagcaggaacaacactacttcaacgagatgaagttgagccaggaccagattggtttccagacttttgagacagtggatgtgaagttcaaggaggaattcaaaccgctgtcaaaggagcttggggaacatggcaaggagatcctgctgagcaactccgatcctcacgacattcccgagtccaaggactgtgtgctcactatttcggaagagatgttttcaaaggacaagacttttattgtgagacaaagcattcatgacgaaatttcagtctcttcaatggatgcctcccggcagctcatgctgaatgaggagcagctggaggacatgagacaggagctagttagacaataccaggaacatcaacaggccactgaactcctgaggcaggctcacatgcgacagatggagcggcagagagaagatcaggagcagctgcaggaagagataaagcgactcaaccgccagctggcacagcgaagtagcatcgataatgagaatctagttagcgagcgagagagggtactgctagaggaacttgaggctctgaaacagctgtccctagctggcagggaaaaactgtgttgcgagctgcgtaacagctccacgcagacacagaacggcaacgaaaaccagggtgaggttgaggagcaaactttcaaagagaaagaactggaccgcaagccagaggatgtgccgcccgaaatccttagcaacgagcgttatgcattgcagaaagccaataacaggcttctcaaaatactcttggaagttgtgaaaactactgcggccgtcgaggaaactatcggcagacatgtcctgggcatactggacagaagttctaagtctcaatcttcagccagtctaatctggcggagcgaggccgaagccagcgttaaaagctgcgtacacgaggagcatactcgcgtgacagatgaatcaatcccatcttacagtggttccgatatgccacgaaacgatatcaatatgtggtcaaaggttacagaggaagggaccgaactctctcaacgtcttgtgcgatctgggttcgccgggacagaaatcgatcctgagaatgaggaactgatgttgaatatctccagccgtctgcaggctgcagtggaaaaactgttagaggctatcagcgaaacaagctcacagctggagcatgccaaggtgacccagacagagcttatgagggagtcttttcggcaaaagcaggaggcgactgagagtctgaaatgccaggaggagttgagagaacgtctgcacgaggagtcccgcgcacgagagcaactagctgtggaactgagcaaggctgaaggcgtgatcgacgggtacgcagatgagaagacgcttttcgagcggcagatacaggagaagaccgacattatcgaccggttagaacaggagctgctgtgcgcatccaatagattgcaggaactggaagctgaacagcagcaaatacaggaggaacgcgagttgttatcacgccagaaggaggctatgaaggccgaagcaggaccggtagagcagcagctccttcaagagactgaaaagctgatgaaagaaaaactcgaggtgcaatgccaagccgaaaaggtcagggatgacctgcagaaacaagttaaagccctggagatcgacgtcgaggagcaagtgtcaagatttatcgaactggaacaggagaagaacactgagctgatggatcttcgtcagcagaatcaggccttagagaaacagctggaaaagatgaggaagtttctggatgagcaggcgatcgatagggagcacgagcgtgatgtgttccagcaggagatacagaagttagaacagcagcttaaagtggtccccaggttccagcctatcagcgagcaccagacccgagaagttgagcagttggccaatcatctcaaggagaagactgacaagtgcagcgaactgctgctgagcaaggagcagctgcagcgggacatccaggagaggaacgaggaaattgaaaaattggaatttagagtgagagaactggagcaggccctcctcgtgtctgccgacacctttcagaaggtggaagaccgcaaacacttcggcgcagtggaagccaagcccgaactgtcattagaggtacagctgcaagccgagagagatgccatcgaccgcaaagagaaggaaattaccaacctggaagaacaactcgaacagtttcgggaagagcttgaaaacaagaatgaggaggtccagcagctgcatatgcagctcgagatccaaaaaaaggaaagtactacccggttgcaggaactggaacaagaaaacaagctgtttaaagatgacatggaaaaactgggacttgctatcaaagaaagcgacgcaatgtctacccaagaccagcacgtgttatttgggaagtttgcacaaataatacaggagaaggaggtggaaattgaccaactaaacgaacaagttactaagttgcaacagcagcttaaaattactaccgacaataaggtcatcgaggagaagaatgaactcatacgggatcttgagactcagatcgagtgcctcatgtctgaccaggagtgcgtcaagcgcaatagagaggaggagatcgagcagctgaatgaagttatagaaaaactgcaacaggagctcgctaacattgggcagaagacatccatgaacgcacactctcttagcgaggaggctgacagtctgaagcatcagctggacgttgtgattgcagagaaactagcactcgaacagcaggtcgaaacggctaacgaagaaatgactttcatgaagaatgtgctaaaagagactaattttaaaatgaatcagttgacacaagagctcttcagtttgaaacgtgaaagggagagcgtggaaaaaatccagagtatcccagagaacagcgtaaacgtggctattgaccacctgtccaaggataaacccgagctcgaggtggtgctgaccgaggacgcgttgaaatcactggaaaatcagacgtactttaagtcattcgaggaaaatgggaagggctcaatcattaatctggagactcgcttactccagttggaaagcacagtcagcgctaaggacctggaactgacccaatgctacaaacagatcaaggatatgcaagaacagggccagtttgaaaccgagatgcttcagaagaaaatcgtgaatcttcagaagatcgtggaggaaaaggtagccgccgctttggttagccaaattcaactggaagcagtgcaggagtacgcaaagttctgtcaagataatcagaccataagctctgagcctgaacggacaaatattcagaacttgaaccagctgcgtgaagacgagctcggtagcgacatcagtgcgctgactctccggatttccgagttggaaagtcaggtggttgaaatgcatacatcactcatcctggaaaaggagcaggtggaaattgccgaaaaaaacgtcctcgagaaagaaaagaaactgttagagctccaaaagctgctggaggggaacgaaaaaaagcagagagagaaggaaaagaagaggtcaccacaggacgtggaggttcttaagacgacgactgaattgttccactccaatgaagaatctggcttcttcaacgagctggaagccctgcgggcagaaagtgtcgcgactaaggcagaactcgcctcctacaaagaaaaggctgagaagcttcaggaggaactgcttgtaaaagagaccaatatgacaagcctacagaaggatctctcacaggtgagggatcacctggccgaggccaaggagaagctgtctatccttgagaaagaagacgaaaccgaggtgcaggagagcaagaaggcctgcatgtttgagcctcttccgatcaagctctctaagtcaatcgcctctcagacagacgggacactgaagatatcctccagcaaccagaccccacaaattttggtgaagaatgcgggaatccagatcaatctgcagtcagaatgcagtagtgaagaggtcacggagatcatatcccagttcaccgagaaaattgaaaagatgcaagagctgcacgcggcagagatcttggacatggaatccagacacattagcgagactgagacgctgaagcgcgagcactacgtcgctgtccagctgctgaaggaggagtgtggtaccttgaaagccgtgatccaatgcctgcgctcaaaagaggggtccagcattccagagctggcccactctgacgcgtaccaaacaagggagatttgcagctccgacagcggcagcgactgggggcagggaatctatctgacccatagtcagggattcgatattgctagtgaagggaggggagaggaatcagaaagcgccacggacagtttccctaaaaagatcaaggggctactacgggctgttcataacgagggcatgcaggtgctgtccctaacagagagtccctactcggacggggaggaccactccattcagcaagtgtcagaaccatggttggaggagcggaaggcatacattaacactatttcctcgctgaaagacctgatcacgaagatgcagctccagcgggaggccgaggtgtacgatagtagtcagagccatgagtctttttcggactggaggggcgagcttctgcttgcactgcagcaggttttcctcgaggaacggtctgttctacttgccgccttcagaacagagctgaccgccttgggaacaaccgacgccgttggactgttgaactgcctcgagcagcggatccaggaacagggcgtggaataccaggctgccatggaatgcttacagaaggctgataggcggtcccttcttagtgagatccaggctctgcacgcccaaatgaacgggaggaagattacccttaaacgagaacaggagtctgagaaaccctcccaggagcttctagaatacaatattcaacagaaacagagtcagatgctggaaatgcaggtggagctgagcagtatgaaagaccgggccacagagctccaagagcagctcagtagcgaaaaaatggtcgttgctgagttgaagagcgagctcgcccaaacaaaactggagctggagaccacacttaaggcgcagcacaagcacctgaaggagctggaagccttcagactggaagtgaaggacaagaccgacgaggtgcacctcctgaacgacacactcgcttctgaacagaaaaaaagccgcgagcttcagtgggctctggaaaaggagaaagctaagctgggaagaagcgaggagcgcgataaggaggagttggaagatctgaaattcagtttggagagtcaaaagcagaggaatctgcagttgaatctccttcttgagcagcagaaacagttgctcaatgaaagtcagcagaagattgaaagccagagaatgctgtatgacgcacagctgtccgaagagcaagggcggaacctggaacttcaggttctcctagagtcagaaaaggtgcgtatccgggagatgtcatccaccttggaccgcgagagagagctgcacgcccagttgcagtcctccgacggtacaggtcaatccaggcccccattgcccagtgaggaccttctcaaggaactgcagaagcagctcgaggagaaacattcgcgaattgtggaactattgaatgagactgagaaatataaactggactcacttcagaccaggcagcagatggagaaggaccgccaggtgcacaggaaaaccctccagactgagcaggaagctaataccgaaggccagaaaaaaatgcacgaactgcagtccaaagtcgaagatctgcagcggcagctggaagagaaacgacagcaggtgtataagctggacttagaagggcagcgtctgcagggaattatgcaagagtttcagaaacaggagctcgagagagaggaaaaacgggaaagccgaagaattctgtaccaaaaccttaacgagcccaccacgtggagcctgacatccgatcgaacaagaaactgggtcctccagcagaagatagagggcgagactaaggagagcaattacgccaaactgatagaaatgaacggaggcggcacaggatgtaaccatgaactcgagatgattcggcagaaactccagtgcgtggcaagtaaattgcaagtcctgccacagaaagcgtccgagagactgcagttcgaaacagcagacgacgaagacttcatctgggtgcaggagaacattgatgagattatcctacaactgcagaaactgacagggcagcagggagaggaacccagccttgtgagccctagcacctcatgtgggagtctgactgagagattactaagacagaacgcagaattaaccggacacatttctcagctcacggaggaaaagaacgacctccggaatatggttatgaaactggaagagcaaatcaggtggtataggcaaactggcgcaggccgtgacaattctagccggttttctttgaacggcggcgccaacattgaggccatcattgcctctgaaaaggaggtctggaatcgagagaagcttacgctgcaaaaatctcttaagagggcggaggcagaggtctataagctgaaggcagagctcaggaacgattctctgctgcagaccttgtcccccgattcggagcacgtcactctgaagcgtatttatggtaagtatttacgcgctgagtccttccgtaaggcgctaatttatcagaaaaaatacctcctgctcctgctcggaggctttcaggagtgcgaggatgcaactttggcacttctcgctagaatgggaggtcagcccgctttcactgatctggaggtcattactaaccggcctaagggttttacacgatttcggtctgccgtgcgggtgtctattgccattagtaggatgaaattccttgtgcgcagatggcacagagttactggctcagtgtctatcaatatcaacagagacggatttggtctcaatcaaggtgccgaaaagaccgatagtttctaccatagtagcggaggcctcgagctctacggcgagccccgtcacaccacctatagaagtcggtctgacctagattacatccggtcaccattgccattccagaatcggtatcccgggaccccagcggacttcaatcccggatccctcgcttgtagtcagttgcagaactatgatcctgacagagccttaaccgactatattaccaggctcgaggcgctgcaaagacgattaggcactatccaatcgggaagtacaacgcagtttcatgcgggaatgcggagatag

SEQ ID NO: 158969 - DNA, 11724 bp, Artificial Sequence
  derived and/or modified sequence
atggaggatgaggagcggcagaagaagctggaggccggcaaggccaagctggcccagttccggcagaggaaggcccagagtgatggccagagccccagcaagaagcagaagaagaagaggaagaccagcagcagcaagcatgatgtgtctgcccaccacgacctgaacatcgaccagagccagtgcaatgagatgtacatcaacagcagccagagggtggagagcaccgtcatccctgagagcaccatcatgaggaccctgcacagcggggagatcaccagccatgagcagggcttctctgtggagctggagagcgagatcagcaccacagcagatgactgcagcagcgaggtgaatggctgcagctttgtgatgaggacaggcaagcccaccaacctgctgcgggaggaggagtttggagtggatgacagctacagcgagcagggcgcccaggacagccccacccacctggagatgatggagagcgagctggccggcaagcagcatgaaattgaggagctgaaccgggagctggaggagatgagggtgacctatggaacagagggcctgcagcagctgcaggagtttgaggccgccatcaagcagagagatggcatcatcacccagctgacagccaacctgcagcaggcccggcgggagaaggatgagaccatgagggagttcctggagctgacagagcagagccagaagctgcagatccagttccagcagctgcaggccagcgagaccctgaggaacagcacccacagcagcacagctgctgacctgctgcaggccaagcagcagatcctgacccaccagcagcagctggaggagcaggaccacctgctggaggactaccagaagaagaaggaggacttcaccatgcagatctccttcctgcaggagaagatcaaggtgtatgagatggagcaggacaagaaggtggagaacagcaacaaggaggagatccaggagaaggagaccatcatcgaggagctgaacaccaagatcatcgaggaggagaagaagaccctggagctgaaggacaagctgaccacagctgacaagctgctgggggagctgcaggagcagatcgtgcagaagaaccaggagatcaagaacatgaagctggagctgaccaacagcaagcagaaggagcggcagagcagcgaggagatcaagcagctgatgggcaccgtggaggagctgcagaagaggaaccacaaggacagccagtttgaaacagacatcgtgcagaggatggagcaggagacccagaggaagctggagcagctgcgggcagagctggatgagatgtatggccagcagatcgtgcagatgaagcaggagctgatccggcagcacatggcccagatggaggagatgaagaccaggcacaagggggagatggagaatgccctgcggagctacagcaacatcaccgtgaatgaagaccagatcaagctgatgaatgtggccatcaatgagctgaacatcaagctgcaggacaccaacagccagaaggagaagctgaaggaggagctgggcctcatcctggaggagaagtgtgccctgcagaggcagctggaggacctggtggaggagctgtccttcagccgggagcagatccagagggcccggcagaccatcgccgagcaggagagcaagctgaatgaggcccacaagagcctgagcacagtggaggacctgaaggccgagatcgtgtctgccagcgagagcaggaaggagctggagctgaagcatgaagctgaggtgaccaactacaagatcaagctggagatgctggagaaggagaagaatgctgtgctggacaggatggccgagagccaggaggccgagctggagcggctgcggacccagctgctcttcagccatgaggaggagctgagcaagctgaaggaggacctggagattgagcaccgcatcaacatcgagaagctgaaggacaacctgggcatccactacaagcagcagattgatggcctgcagaatgagatgagccagaagattgagaccatgcagtttgagaaggacaacctgatcaccaagcagaaccagctgatcctggagatcagcaagctgaaggacctgcagcagagcctggtgaacagcaagtctgaggagatgaccctgcagatcaatgagctgcagaaggagattgagatcctgcggcaggaggagaaggagaagggcaccctggagcaggaggtgcaggagctgcagctgaagacagagctgctggagaagcagatgaaggagaaggaaaatgacctgcaggagaagtttgcccagctggaggccgagaacagcatcctgaaggatgagaagaagaccctggaggacatgctgaagatccacacccctgtgtcccaggaggagcggctcatcttcctggacagcatcaagagcaagagcaaggacagcgtgtgggagaaggagattgagatcctgattgaggagaatgaagacctgaagcagcagtgcatccagctgaatgaggagattgagaagcagaggaacaccttctcctttgctgagaagaactttgaggtgaactaccaggagctgcaggaggagtatgcctgcctgctgaaggtgaaggatgacctggaggacagcaagaacaagcaggagctggagtacaagagcaagctgaaggccctgaatgaggagctgcacctgcagaggatcaaccccaccaccgtgaagatgaagagctctgtgtttgatgaggacaagacctttgtggccgagaccctggagatgggagaggtggtggagaaggacaccacagagctgatggagaagctggaggtgaccaagcgggagaagctggagctgagccagaggctgagtgacctgtctgagcagctgaagcagaagcacggggagatctccttcctgaatgaggaggtgaagagcctgaagcaggagaaggagcaggtgtccctgcgctgccgggagctggagatcatcatcaaccacaacagagcagaaaatgtgcagagctgtgacacccaggtgagcagcctgctggatggagtggtgaccatgaccagcagaggagctgagggctctgtgtccaaggtgaacaagagctttggagaggagagcaagatcatggtggaggacaaggtgtcctttgagaacatgacagtgggggaggagagcaagcaggagcagctgatcctggaccacctgcccagcgtgaccaaggagagcagcctgcgggccacccagcccagtgaaaatgacaagctgcagaaggagctgaatgtgctgaagtctgagcagaatgacctgcggctgcagatggaggcccagaggatctgcctgagcctggtgtacagcacccacgtggaccaggtgcgggagtacatggagaatgagaaggacaaggccctgtgcagcctgaaggaggagctgatctttgcccaggaggagaagatcaaggagctgcagaagatccaccagctggagctgcagaccatgaagacccaggagactggagatgagggcaagcccctgcacctgctgattggcaagctgcagaaggctgtgtctgaggagtgcagctacttcctgcagaccctgtgcagcgtgctgggggagtactacaccccagccctgaagtgtgaggtgaatgctgaggacaaggagaacagcggggactacatcagtgaaaatgaagatcctgagctgcaggactaccgctatgaggtgcaggacttccaggagaacatgcacaccctgctgaacaaggtgacagaggagtacaacaagctgctggtgctgcagacccggctgagcaagatctggggccagcagacagatggcatgaagctggagtttggagaggagaacctgcccaaggaggagacagagttcctgagcatccacagccagatgaccaacctggaggacattgatgtgaaccacaagagcaagctgagcagcctgcaggacctggagaagaccaagctggaggagcaggtgcaggagctggagagcctcatcagcagcctgcagcagcagctgaaggagacagagcagaactatgaagctgagatccactgcctgcagaagaggctgcaggccgtgtctgagagcacagtgccccccagcctgcctgtggacagcgtggtgatcacagaaagtgatgcccagaggaccatgtacccaggcagctgtgtgaagaagaacattgatggcaccatcgagttctctggagaatttggagtgaaggaggagaccaacatcgtgaagctgctggagaagcagtaccaggagcagctggaggaggaggtggccaaggtgattgtgtccatgagcatcgcctttgcccagcagacagagctgagccgcatcagcggcggcaaggaaaatacagccagcagcaagcaggcccatgctgtgtgccagcaggagcagcactacttcaatgagatgaagctgagccaggaccagatcggcttccagacctttgaaacagtggatgtgaagttcaaggaggagttcaagcccctgagcaaggagctgggggagcacggcaaggagatcctgctgagcaacagcgacccccatgacatccctgagagcaaggactgtgtgctgaccatcagcgaggagatgttcagcaaggacaagaccttcatcgtgcggcagagcatccatgatgagatctctgtgtcctccatggatgccagccggcagctgatgctgaatgaggagcagctggaggacatgaggcaggagctggtgcggcagtaccaggagcaccagcaggccacagagctgctgcggcaggcccacatgaggcagatggagcggcagcgggaggaccaggagcagctgcaggaggagatcaagaggctgaaccggcagctggcccagaggagcagcattgacaatgaaaacctggtgtctgagcgggagcgggtgctgctggaggagctggaggccctgaagcagctgagcctggccggccgggagaagctgtgctgtgagctgaggaacagcagcacccagacccagaatggaaatgaaaaccagggcgaggtggaggagcagaccttcaaggagaaggagctggacaggaagccagaagatgtgcccccagagatcctgagcaatgaaagatatgccctgcagaaggccaacaaccggctgctgaagatcctgctggaggtggtgaagaccacagctgctgtggaggagaccatcggccgccacgtgctgggcatcctggacaggagcagcaagagccagagcagcgccagcctcatctggaggtctgaggccgaggcctctgtgaagagctgtgtgcatgaggagcacaccagggtgacagatgagagcatccccagctacagcggcagtgacatgcccagaaatgacatcaacatgtggagcaaggtgacagaggagggcacagagctgagccagaggctggtgcgcagcggctttgctggaacagaaattgatcctgaaaatgaggagctgatgctgaacatcagcagccggctgcaggccgctgtggagaagctgctggaggccatcagcgagaccagcagccagctggagcacgccaaggtgacccagacagagctgatgagggagagcttccggcagaagcaggaggccacagagagcctgaagtgccaggaggagctgcgggagcggctgcacgaggagagccgggcccgggagcagctggccgtggagctgagcaaggccgagggcgtgattgatggctatgcagatgagaagaccctgtttgagcggcagatccaggagaagacagacatcatcgaccggctggagcaggagctgctgtgtgccagcaaccggctgcaggagctggaggccgagcagcagcagatccaggaggagcgggagctgctgagccggcagaaggaggccatgaaggccgaggccggccctgtggagcagcagctgctgcaggagacagagaagctgatgaaggagaagctggaggtgcagtgccaggccgagaaggtgagagatgacctgcagaagcaggtgaaggccctggagattgatgtggaggagcaggtgagccgcttcatcgagctggagcaggagaagaacacagagctgatggacctgcggcagcagaaccaggccctggagaagcagctggagaagatgaggaagttcctggatgagcaggccatcgaccgggagcacgagagagatgtgttccagcaggagatccagaagctggagcagcagctgaaggtggtgccccgcttccagcccatcagcgagcaccagacccgggaggtggagcagctggccaaccacctgaaggagaagacagacaagtgcagcgagctgctgctgagcaaggagcagctgcagagggacatccaggagagaaatgaggagattgagaagctggagttccgggtgcgggagctggagcaggccctgctggtgtctgctgacaccttccagaaggtggaggacaggaagcactttggagctgtggaggccaagccagagctgagcctggaggtgcagctgcaggccgagagagatgccatcgacaggaaggagaaggagatcaccaacctggaggagcagctggagcagttccgggaggagctggagaacaagaatgaggaggtgcagcagctgcacatgcagctggagatccagaagaaggagagcaccacccggctgcaggagctggagcaggagaacaagctgttcaaggatgacatggagaagctgggcctggccatcaaggagagtgatgccatgagcacccaggaccagcacgtgctgtttgggaagtttgcccagatcatccaggagaaggaggtggagattgaccagctgaatgagcaggtgaccaagctgcagcagcagctgaagatcaccacagacaacaaggtgattgaggagaagaatgaactcatccgggacctggagacccagatcgagtgcctgatgtctgaccaggagtgtgtgaagaggaaccgggaggaggagattgagcagctgaatgaagtcatcgagaagctgcagcaggagctggccaacatcggccagaagacctccatgaatgcccacagcctgtctgaggaggccgacagcctgaagcaccagctggatgtggtgattgctgagaagctggccctggagcagcaggtggagacagccaatgaggagatgaccttcatgaagaatgtgctgaaggagaccaacttcaagatgaaccagctgacccaggagctgttcagcctgaagcgggagcgggagagcgtggagaagatccagagcatccctgagaacagcgtgaatgtggccatcgaccacctgagcaaggacaagccagagctggaggtggtgctgacagaagatgccctgaagagcctggagaaccagacctacttcaagagctttgaggagaatggcaagggcagcatcatcaacctggagacccggctgctgcagctggagagcacagtgtctgccaaggacctggagctgacccagtgctacaagcagatcaaggacatgcaggagcagggccagtttgaaacagagatgctgcagaagaagatcgtgaacctgcagaagatcgtggaggagaaggtggccgccgccctggtgtcccagatccagctggaggccgtgcaggagtatgccaagttctgccaggacaaccagaccatcagcagcgagcctgagaggaccaacatccagaacctgaaccagctgcgggaggatgagctgggcagtgacatcagcgccctgaccctgcgcatcagcgagctggagagccaggtggtggagatgcacaccagcctcatcctggagaaggagcaggtggagattgctgagaagaatgtgctggagaaggagaagaagctgctggagctgcagaagctgctggagggcaatgagaagaagcagcgggagaaggagaagaagaggagcccccaggatgtggaggtgctgaagaccaccacagagctgttccacagcaatgaggagagcggcttcttcaatgagctggaggccctgcgggcagagagcgtggccaccaaggccgagctggccagctacaaggagaaggccgagaagctgcaggaggagctgctggtgaaggagaccaacatgaccagcctgcagaaggacctgagccaggtgcgggaccacctggccgaggccaaggagaagctgagcatcctggagaaggaggatgaaacagaggtgcaggagagcaagaaggcctgcatgtttgagcccctgcccatcaagctgagcaagagcatcgccagccagacagatggcaccctgaagatcagcagcagcaaccagaccccccagatcctggtgaagaatgccggcatccagatcaacctgcagagtgaatgtagcagcgaggaggtgacagagatcatcagccagttcacagagaagattgagaagatgcaggagctgcacgccgctgagatcctggacatggagagccgccacatcagcgagacagagaccctgaagcgggagcactacgtggccgtgcagctgctgaaggaggagtgtggcaccctgaaggctgtgatccagtgcctgcggagcaaggagggcagcagcatccctgagctggcccacagtgatgcctaccagacccgggagatctgcagcagtgacagcggcagtgactggggccagggcatctacctgacccacagccagggctttgatattgccagcgagggccgcggggaggagagcgagagcgccacagacagcttccccaagaagatcaagggcctgctgcgggctgtgcacaatgaaggcatgcaggtgctgagcctgacagagagcccctacagtgatggagaggaccacagcatccagcaggtgtctgagccctggctggaggagaggaaggcctacatcaacaccatcagcagcctgaaggacctgatcaccaagatgcagctgcagcgggaggccgaggtgtatgacagcagccagagccatgagagcttcagtgactggagaggagagctgctgctggccctgcagcaggtgttcctggaggagaggtctgtgctgctggccgccttcagaacagagctgacagccctgggcaccacagatgctgtgggcctgctgaactgcctggagcagaggatccaggagcagggcgtggagtaccaggccgccatggagtgcctgcagaaggctgacagaagaagcctgctgtctgagatccaggccctgcacgcccagatgaatggaaggaagatcaccctgaagcgggagcaggagagcgagaagcccagccaggagctgctggagtacaacatccagcagaagcagagccagatgctggagatgcaggtggagctgagctccatgaaggaccgggccacagagctgcaggagcagctgagcagcgagaagatggtggtggccgagctgaagtctgagctggcccagaccaagctggagctggagaccaccctgaaggcccagcacaagcacctgaaggagctggaggccttccggctggaggtgaaggacaagacagatgaggtgcacctgctgaatgacaccctggccagcgagcagaagaagagccgggagctgcagtgggccctggagaaggagaaggccaagctgggccgctctgaggagcgggacaaggaggagctggaggacctgaagttcagcctggagagccagaagcagaggaacctgcagctgaacctgctgctggagcagcagaagcagctgctgaatgaaagccagcagaagattgagagccagaggatgctgtatgatgcccagctgtctgaggagcagggcaggaacctggagctgcaggtgctgctggagagcgagaaggtgcgcatccgggagatgagcagcaccctggaccgggagcgggagctgcacgcccagctgcagagcagtgatggcaccggccagagcaggcctcccctgcccagcgaggacctgctgaaggagctgcagaagcagctggaggagaagcacagcagaattgtggagctgctgaatgaaacagagaagtacaagctggacagcctgcagacccggcagcagatggagaaggaccggcaggtgcacaggaagaccctgcagacagagcaggaggccaacacagagggccagaagaagatgcatgagctgcagagcaaggtggaggacctgcagaggcagctggaggagaagaggcagcaggtgtacaagctggacctggagggccagaggctgcagggcatcatgcaggagttccagaagcaggagctggagcgggaggagaagcgggagagccgccgcatcctgtaccagaacctgaatgagcccaccacctggagcctgaccagtgacaggaccaggaactgggtgctgcagcagaagattgaaggagagaccaaggagagcaactatgccaagctgattgagatgaatggaggcggcaccggctgcaaccacgagctggagatgatccggcagaagctgcagtgtgtggccagcaagctgcaggtgctgccccagaaggccagcgagcggctgcagtttgaaacagcagatgatgaggacttcatctgggtgcaggagaacattgatgagatcatcctgcagctgcagaagctgaccggccagcagggcgaggagcccagcctggtgagccccagcaccagctgtggcagcctgacagagcggctgctgcggcagaatgctgagctgaccggccacatcagccagctgacagaggagaagaatgacctgaggaacatggtgatgaagctggaggagcagatccgctggtaccggcagacaggagctggccgggacaacagcagccgcttcagcctgaatggaggagccaacatcgaggccatcatcgccagcgagaaggaggtgtggaaccgggagaagctgaccctgcagaagagcctgaagagagctgaggccgaggtgtacaagctgaaggccgagctgagaaatgacagcctgctgcagaccctgagcccagattctgaacatgtgaccctgaagaggatctacggcaagtacctgcgggcagagagcttcaggaaggccctgatctaccagaagaagtacctgctgctgctgctgggcggcttccaggagtgtgaagatgccaccctggccctgctggccaggatgggcggccagcctgccttcacagacctggaggtgatcaccaaccggcccaagggcttcacccgcttccgctctgctgtgcgggtgtccatcgccatcagcaggatgaagttcctggtgcggcgctggcaccgggtgactggatctgtgtccatcaacatcaacagagatggcttcggcctgaaccagggcgctgagaagacagacagcttctaccacagcagcggcggcctggagctgtatggagagcccaggcacaccacctaccgcagcagaagtgacctggactacatccgcagccccctgcccttccagaaccgctacccaggcaccccagctgacttcaaccctggcagcctggcctgcagccagctgcagaactatgaccctgaccgggccctgacagactacatcacccggctggaggccctgcagaggcggctgggcaccatccagagcggcagcaccacccagttccacgccggcatgagaagatag

SEQ ID NO: 158970 - DNA, 11724 bp, Artificial Sequence
  derived and/or modified sequence
atggaggacgaggagcggcagaagaagctggaggccggcaaggccaagttggcccagtttagacaacggaaggctcagagcgacggccagtcccctagcaaaaagcagaaaaagaaacggaagacctcctcttcaaagcatgacgtctccgcccatcatgatctaaacatcgatcagtcccaatgtaacgaaatgtacatcaatagtagccaacgagttgagtcaacagtaatccccgaatctactatcatgcgtacccttcattccggcgagatcaccagtcacgagcagggtttctccgtcgaacttgaatctgaaatatctacaacggctgatgactgctcttcagaagtcaacggatgttcatttgtgatgagaacaggtaagcccacaaacctgctgagggaagaggaattcggtgtggacgatagttactccgagcaaggagcacaggattcacctactcacttggagatgatggaatcggagctcgcagggaaacagcatgaaattgaggaactcaatcgggaactcgaagagatgcgagtgacatatgggacggagggcttgcaacagctccaggagtttgaagccgctatcaagcaacgcgacggaatcatcacacaacttaccgcgaacttacaacaggctcgacgggagaaagacgagactatgagagagttcctcgaattaaccgaacaatcccagaaattacaaattcagttccagcagctccaggccagcgaaactttgagaaattctactcacagtagcacagcagccgacttactgcaggcgaagcagcagatcctaacacaccagcaacagctagaagaacaagatcacttgctggaggactaccaaaaaaaaaaggaggatttcacaatgcaaataagttttttgcaggagaagatcaaagtatacgagatggaacaagataaaaaggtcgagaactcaaacaaagaagaaatccaagagaaggagactatcattgaggaactcaacacgaagattatcgaggaagagaagaagactctcgagcttaaagacaaattaaccaccgccgataagctgctcggcgaattgcaagagcaaattgtgcagaagaaccaggagatcaagaatatgaagctggagttaactaacagcaagcagaaggagcgccagagtagcgaagagataaagcagctgatggggactgtggaagagttgcaaaaacgcaaccacaaggatagtcagtttgagactgatattgtgcagcggatggaacaagaaacacagcgaaaattggaacaactcagagctgagttggacgaaatgtatggacagcaaattgtgcagatgaaacaggaactgattcgccaacacatggctcagatggaggagatgaagactcggcacaaaggagagatggaaaatgcacttcggagctactcaaacataaccgtaaacgaggaccagatcaagctcatgaacgttgctattaatgagctgaacataaaactccaggacactaacagccaaaaagagaagctcaaagaggagctcggcctgatcctcgaggaaaagtgcgctctgcagcggcagttagaggacctcgtagaggagctgtcattcagccgcgaacagatccagagagcgagacagactattgcagagcaggaaagtaagctgaacgaggcccataaaagtctatcgaccgtggaagatctgaaggccgaaatcgtctcagcaagcgagagcaggaaggagctggagctcaagcacgaggctgaggttacgaattataagattaagttggagatgctcgagaaagagaaaaatgccgttctggacagaatggcggagagtcaggaggccgagctcgagcgcttgcgaacacaactgctattcagccacgaggaagaactatctaagctgaaggaggatttggagatagagcacaggatcaatatagaaaaattaaaggacaatctggggatccactacaaacagcagatcgatggcctgcagaacgaaatgtcccagaaaatagagaccatgcagtttgagaaggataacctcattacaaagcagaatcagctgatcctagaaattagtaaactgaaggacctccagcagagtctcgtcaattccaagtcggaggagatgaccctgcagatcaatgagctacaaaaagagatcgagatcctgcgccaggaggaaaaggagaaaggaactctggaacaggaggtccaagagctccagttgaagaccgagctgctggagaaacaaatgaaagagaaagagaacgaccttcaggaaaagtttgcccaactagaagcagagaacagcattctgaaggacgagaagaaaactctggaggacatgctgaagatccatacaccagttagccaggaagaacggttgatctttctggactctataaagtcaaagtcaaaagactccgtttgggagaaagaaatcgaaatccttatcgaggaaaatgaggatctgaagcaacagtgcattcagctgaatgaggagattgaaaaacagagaaacactttctcctttgcagaaaagaactttgaagtcaactaccaagaactgcaggaggaatacgcctgccttctgaaagttaaggatgacctcgaggattccaagaataagcaggagctggaatataaatcaaaacttaaagccctgaacgaggaactgcacctgcagcgtatcaacccaacaaccgttaagatgaagtccagtgtctttgatgaagataagacctttgtggcggagaccctggagatgggcgaggtggtcgagaaggacacaaccgagctgatggaaaagctggaggtgaccaagcgggaaaaactggaactgtctcagaggctttccgacctgagcgagcaattgaaacagaaacatggcgagatctctttcctcaacgaagaagtgaagtctctcaaacaggaaaaggaacaagtttctcttaggtgtcgagaactggagatcatcataaatcataacagagctgaaaacgtacagtcatgtgacacacaggtgagcagcctgctagacggagtggtcactatgaccagccgcggtgctgagggctcggtgagcaaggttaacaagagctttggggaagagtctaagattatggtcgaggataaggtgagtttcgaaaatatgaccgttggagaggaaagtaagcaggagcagttaatactggaccatttacctagtgtcactaaagagtcctctctccgcgctacccaacccagtgaaaatgacaaactgcagaaagaactcaatgtgctgaagtctgagcaaaatgacctcagactacagatggaagcccagcgaatctgcctctctctagtttatagcacacacgtggatcaggtccgtgaatacatggaaaatgagaaggacaaggcattatgcagcttgaaggaagagctgatcttcgcccaggaagaaaagataaaggagctgcagaaaatacaccagctcgagctgcagaccatgaaaacccaggaaacaggcgacgagggcaagccccttcatctccttatcgggaagttacagaaagctgtttctgaagagtgttcatactttctccagaccttgtgctctgtcctcggcgaatactacacccccgctcttaaatgcgaggtgaacgctgaggacaaagagaattcgggtgactacatctctgaaaatgaagacccagagctacaagactatcgctacgaagtccaggactttcaagaaaacatgcacacattgctgaacaaagtgactgaggaatataacaaactattggtccttcagacacgcctcagtaaaatttggggacagcagaccgacggcatgaagcttgagtttggcgaagaaaatttgcccaaagaagagacagagtttctgagcatccactctcagatgactaaccttgaagacattgacgtaaaccataaatccaagctgtcgagcctgcaggacttggaaaagacgaagttggaggaacaggtccaagaactcgaaagtctaatctctagtctgcaacagcagctgaaggagactgagcagaactacgaggcggaaatacattgcctgcagaagcgcttgcaggccgtcagtgagtccactgtgcccccatcattgccggtggatagtgttgtgatcactgaatccgacgcccagaggacgatgtatccaggatcatgcgtgaagaagaatattgatggcaccatcgagttcagcggcgagttcggagtgaaggaggaaacaaatatcgttaagttactggagaaacagtatcaagagcaacttgaagaggaagtagccaaagttatcgtgtctatgtcaatcgcctttgcccagcagaccgaactgagtagaatttccggtggaaaagagaatactgcttcctctaagcaggcacacgcagtctgccagcaggaacaacattactttaacgagatgaagctctcccaggaccagatcggatttcaaacgttcgagaccgttgatgttaaattcaaggaggaatttaagcccctatcgaaggaactcggagagcacggcaaagagattctgctgtcaaactccgatccccatgacataccggagagtaaagattgtgtgctgaccatatcggaggaaatgtttagtaaggacaagacgttcatcgttcgacagtccatccacgacgaaatctcagttagttctatggacgcctctagacagttgatgctgaacgaggagcagttggaggatatgcggcaggagctggtgcgccagtatcaagaacaccaacaggccactgaattgctgaggcaagcccacatgcgacaaatggagcggcaacgggaggatcaggagcaattacaagaggaaattaagaggcttaaccgccaactcgctcagagatcttcaattgacaatgaaaatcttgtctccgagagagagcgagtcctgctcgaagaattggaggcgttgaaacagctgtccctggctggaagggagaagttgtgctgtgagctgcgcaattcttctactcagacgcagaatggcaacgagaatcagggtgaagtggaagagcagactttcaaagagaaggagctcgatagaaaaccagaggatgtgcctcccgaaattctgtctaatgagcggtatgcactccagaaggcgaacaatcgactcttgaaaattttactagaagtggttaagactactgcggccgtcgaggagactataggccgccatgtactcgggattctagaccggagctcaaagagccaaagctctgcatccctcatttggcggagtgaagctgaggcttccgtaaaatcttgtgttcatgaggagcacacaagagtcactgatgagtctatcccttcttactccggatctgatatgccacgcaatgacattaatatgtggtccaaggtcacagaagaaggaaccgaactgtcccaaagactggtcagatctggcttcgctgggaccgagattgatccggaaaatgaggagcttatgttgaacatctcgagccggctgcaagccgctgtcgagaagctcctggaggccattagtgaaaccagctcgcagctggagcacgcgaaggtgacccagaccgagctcatgcgggagagtttcaggcagaagcaagaagccaccgaaagtctgaagtgccaggaagaacttcgggagagactccacgaagaatcgagggcacgggaacagctggctgtcgaactgagtaaggcggaaggcgtgatcgacggttatgcagatgagaagacgctttttgagcggcagatccaggagaagactgacattattgatcgactcgagcaggaacttctgtgtgccagcaatcggctacaggagctcgaggcagagcagcagcagattcaagaagaacgggaactcctttctcgtcagaaagaggctatgaaagccgaagctggtcccgtagaacaacagctgctacaggagaccgagaaactgatgaaggagaaattagaggttcagtgccaagcagagaaagttagggacgacctgcagaagcaggtgaaggctctcgaaatcgatgtcgaagaacaggtgtccagattcattgagctggagcaggagaagaacacggaacttatggatctgagacagcaaaatcaggctctggaaaaacagctggagaaaatgcggaaatttttggacgaacaggccattgatcgggagcatgagagggacgtattccagcaggaaattcagaagcttgagcaacagctgaaagtagtcccacgtttccaacccatttctgagcaccaaacaagggaagtcgagcaactagcaaaccacttaaaggaaaagactgataaatgctctgagctgcttctgtccaaggagcagctccaaagagacatccaagagaggaatgaggagatagaaaagctcgagtttcgagtcagggagctggagcaggcgcttttggtctctgctgatacattccagaaggtggaagatagaaagcacttcggcgctgtcgaagcgaaacccgagttgtccttggaggtgcagttgcaggcagagcgggacgcaattgacagaaaagaaaaagagataactaacctcgaagaacagttggaacagttccgagaggaattggaaaataaaaacgaagaagttcagcagctgcacatgcagctggaaattcagaaaaaggagtctactaccaggctgcaggaactggaacaggaaaacaaattatttaaggatgacatggagaagttaggccttgccatcaaggaatcagacgcaatgagcactcaggaccagcatgtcctcttcggcaaatttgcacagatcattcaagagaaagaggtcgagatcgaccagctgaacgagcaagttacaaagctccagcaacaattaaaaatcacaaccgacaacaaggtgatcgaagaaaaaaacgaattgattagggacttggaaacacagatcgagtgcctaatgtccgatcaggagtgcgttaagagaaaccgagaggaggagattgagcaactgaacgaagttatcgagaagctgcaacaggagttggcgaatatcggacaaaagacgtccatgaatgcccatagcctcagcgaggaggcagattcgctgaagcatcagctggatgtagtcatcgccgagaagttggccttagagcagcaagtggagactgcgaatgaggaaatgaccttcatgaagaatgtcttgaaggagactaacttcaagatgaatcagctgactcaggagctcttttctcttaagagagaacgcgaaagtgtggagaagattcagagcattcctgaaaattcggtcaacgtggccatagaccacttgtccaaagataagcctgagctcgaggtcgtacttacagaagacgccctaaagagcttagaaaatcagacatatttcaagagctttgaggaaaacggaaaaggatctataatcaacctggaaacccggttgttgcagctggaatctacagtcagcgcaaaggatctagagctcacccagtgctacaaacaaataaaagacatgcaagaacagggccagtttgaaaccgagatgcttcagaaaaagatagtcaatcttcagaaaatcgtcgaggaaaaggtggcagccgctctggtgagtcagatccagctggaggcggtacaagagtacgctaaattctgccaggacaatcagactatctcctccgagccagaacgcacaaacatacagaaccttaatcaactccgcgaagatgagcttggttctgacataagcgcactaacactacggattagtgagctggagtcacaggtggtcgaaatgcacacaagcttgatcctcgagaaagagcaggttgaaattgccgagaagaacgttttagagaaggaaaagaagctgctggagttgcaaaaactgcttgagggcaacgagaagaagcagagagagaaggagaaaaaacgcagcccacaagatgttgaagttttaaaaaccacgactgaactgttccactctaatgaggagtcaggatttttcaacgagctggaagctttgagggcggaatcagtcgccactaaagctgaattggccagctataaggaaaaagctgagaaactacaagaggaactcctggtcaaggagaccaacatgactagtctccagaaagacctcagccaggtgcgtgatcatctggccgaggccaaggaaaagctcagcatcctagagaaggaggatgagactgaggttcaagaaagcaaaaaggcttgcatgttcgagcctcttcctatcaaactgtctaaatccatcgcctcacagaccgatggcacactcaaaatttcctcttccaatcagactccccagattctcgtcaagaacgccggaattcaaatcaacctgcagagcgagtgcagctccgaggaggtaactgagatcatctcccagtttacagagaagattgaaaagatgcaggagttgcacgccgccgagatcttagatatggagagtcgccatatctcggaaaccgagactctgaagagagagcactatgttgctgtccagcttctaaaagaggagtgcggtaccctcaaagcagtcatacaatgtctccgcagtaaggagggcagcagtatccccgagctggctcattcagacgcctatcagacacgtgagatatgctcctccgattcaggctcagactggggacaagggatttacctgacccattctcagggctttgacatcgcttctgaaggacggggggaggagtcagagagcgctacagattcattccccaagaaaattaaaggtctgctaagggcagttcacaacgaggggatgcaggtgctgtcgcttactgaatctccctactcagacggcgaagatcacagtatccagcaggtgtcagagccttggctggaagagcgaaaggcatatatcaacaccatttcctccctgaaagacctcataactaaaatgcaacttcagagagaagccgaagtctatgattcgagccaaagccacgaatctttctcagattggaggggtgagctgctgttggcattgcagcaggtgtttctcgaggaaagatcagtactgctcgctgcgtttcgaaccgagctcacagccttggggacaactgatgctgtgggattgctgaactgcttggagcaacggatacaagagcaaggcgtggaataccaggccgctatggaatgtctccaaaaggccgatcgccggtccctcctttctgagattcaggccctacacgcacagatgaatggacggaagatcactctgaagagggagcaggagagcgagaagccttctcaggagctcctagaatacaatatccagcagaagcaatcccagatgcttgaaatgcaagtggaactttctagtatgaaagacagggcaaccgagctccaggagcagctgagctccgagaagatggtggtcgccgagctcaagtccgaactcgcacaaacaaaactggagttggaaacaaccctaaaggctcagcataagcacttgaaggaattagaggctttccgcctggaagttaaggacaagacggatgaagtccacctgctgaacgacactctcgcctccgagcagaagaagtctcgggagctgcagtgggcattagaaaaagaaaaggctaagctcggacggagtgaagagcgagacaaggaggagctggaagatcttaaatttagcctggaatcccagaaacagaggaacttgcagctcaacctgctgctcgagcagcaaaaacagcttttgaatgaatcccagcagaaaattgagagtcagcgaatgctgtatgatgcacagctgtccgaggagcagggacgaaatctggaactccaggttttgttggagagtgagaaggtccggatcagagaaatgagcagtacactcgaccgggaacgagagcttcacgcgcagctgcagtctagcgacggaaccggacagtcccgacctcccttgccctcagaagatctgctgaaagagttgcagaaacagctggaggagaagcacagccggattgtagaactgctcaatgaaacagaaaagtacaagctcgacagtctgcaaactcggcaacagatggaaaaggacaggcaggttcataggaagaccttgcagactgaacaagaagctaatactgaaggccagaaaaaaatgcatgaattgcagagcaaagtcgaagaccttcaacgccagctggaagaaaagaggcaacaagtctacaaactggacctagaggggcagcgcctgcagggaattatgcaggagtttcagaagcaggagctagaacgcgaagagaaaagggaatcacgcaggattttgtaccagaacctgaatgaacccaccacctggtctctcacaagcgacaggacaagaaactgggtcctacagcagaagatcgaaggtgagacgaaggaaagcaactatgccaaactgattgagatgaacggcgggggtactggctgcaaccacgaattagaaatgatccgccagaaactgcagtgtgtcgcctccaaactgcaagttttgccccagaaggcatccgagagattgcaatttgagaccgccgatgacgaagatttcatttgggttcaagagaacattgatgagatcatactgcagttgcagaaactgacgggtcaacagggtgaagaaccatcattagtgagtcccagtacttcctgcggatcccttacagaacggctccttcgccagaacgcggagcttaccggccacataagccaacttacagaagagaaaaacgatctgcgtaatatggtaatgaagcttgaggagcaaataagatggtataggcaaaccggggccggcagggataattccagtaggttttcacttaacggaggagcaaacatagaagcaatcatcgcgagcgagaaggaagtgtggaatcgggaaaaactcaccctccagaaatccctgaagagagctgaagccgaagtctacaaactgaaagcagagttacggaacgactcgctgctgcagactctttcacctgatagcgaacatgttaccctcaagcgaatctacggcaaatacctaagagccgagagcttccgcaaagctttgatctatcaaaaaaagtacctgcttctactgttagggggatttcaggaatgtgaggatgcgacgctggctctcctcgccagaatgggaggtcaaccagcgtttactgatctcgaggtgattaccaatcgacctaagggtttcaccaggttcagatccgccgtccgggtgtcaattgctatttctcgtatgaagtttttggttcgaaggtggcatagggtaacggggtccgtgtctatcaatataaaccgcgatggttttggactgaatcaaggagccgaaaagaccgactccttctatcactcttctggtggtctagagctgtacggcgagccgcgccacactacctataggtcgagaagtgacctggattatatacgatcaccattgccctttcagaataggtacccggggacgcctgccgactttaatcccgggagcctggcctgttctcagctacagaactacgatcccgaccgagcactgaccgactacataacacgactagaggccctacaacgcaggttggggaccatccagtccggctctaccacacagtttcacgcaggcatgcgaagatag

SEQ ID NO: 158971 - DNA, 11724 bp, Artificial Sequence
  derived and/or modified sequence
atggaggacgaggaaagacaaaaaaagctggaggccggaaaagctaaactggcccagtttcggcaacgcaaggcacagtctgacggacagtctccctcaaagaaacaaaagaaaaagaggaagacatcatcatcaaaacacgatgtaagcgcacaccacgacctgaacatcgaccagtcacaatgcaacgagatgtacataaattctagccagagggtcgaaagcaccgttatcccggagtccacgatcatgcgtacactgcattcgggtgagattacaagccatgaacagggcttttccgtcgaactcgaatccgaaatcagcacaactgccgatgattgcagtagtgaagtcaacgggtgctcatttgtgatgagaaccgggaaacctactaatctcctgagagaggaggaatttggagtggatgactcgtattcggaacagggagcccaggacagccccacccatctggaaatgatggagtctgagcttgctggtaagcagcacgagattgaagaacttaatcgagaactggaggagatgcgtgtgacctacggtacagagggtctgcagcaactccaggaattcgaggcagcaattaagcagagagacggaataattactcaattgacagccaacctgcagcaggcacggcgagagaaggacgaaaccatgagggagttcttggagttgaccgagcaatcccagaaactgcagattcaatttcagcaactgcaggcatccgaaacgctgcgcaacagtacacactcttccaccgctgcggatttgctccaggccaaacagcagatactgacccaccagcaacaactggaggaacaggaccatcttttggaagactatcagaaaaagaaggaggacttcaccatgcagatctctttcctccaggaaaaaataaaggtgtacgagatggagcaagataagaaagtggagaacagcaataaggaggaaattcaggagaaggagacaatcattgaggagcttaatactaaaatcattgaggaagagaagaagacattggaactcaaggacaaactcactactgcagataagctcctcggcgagctccaggagcagatcgtgcaaaaaaatcaggagataaagaacatgaaactggaactgactaattccaaacagaaggaaagacagagcagtgaagagattaagcagctcatggggacggtcgaggaattgcaaaagcgcaaccacaaggactcacagttcgagacagacattgtacaaaggatggagcaggagacacagcgaaaactggagcagctcagggcagaactagacgaaatgtacggacaacagatagtccaaatgaagcaggagctgattcgacaacatatggcgcaaatggaggagatgaaaacccgccataagggtgaaatggagaatgcactgcgctcctactctaacataaccgtcaatgaggatcagatcaaactcatgaacgtcgcaattaatgaacttaatatcaaactccaggatactaattcacagaaagagaagctgaaagaggagcttggcctgatcctcgaggagaagtgtgcactccagagacagctagaagatctagtggaggagctgagcttctcccgcgagcagatccaacgcgctcgacagacaatagccgagcaagaaagtaaactgaatgaagctcacaaatctctcagcacagtagaggatttgaaggcagagattgtgagcgcctcggagagcagaaaagagctggagctgaaacacgaagccgaagtgacgaactataagataaaattggagatgctggaaaaagaaaaaaatgctgtgctggaccggatggctgagtcgcaggaggccgaactggagagactgcgtacacagctgctgtttagtcatgaggaagaactctcaaagctgaaagaggacctcgaaattgaacacaggattaacattgagaaattaaaggacaatttgggaatccattataaacaacagattgatggactgcaaaacgaaatgtcccagaagatcgaaaccatgcagtttgaaaaggacaacctcattactaagcaaaaccagctcattcttgagataagtaagcttaaagacctacagcagtctctggtgaactccaaaagcgaggagatgacactgcagatcaacgagctgcagaaggagattgagatcttgagacaagaagagaaggagaaaggcaccctcgaacaggaagtgcaggagcttcaactcaagaccgaactgctcgagaaacaaatgaaagagaaagagaacgatttgcaagaaaagttcgctcagcttgaagctgagaattcaattctgaaggatgaaaaaaaaacactcgaagatatgctcaagattcacacgccagtctcccaagaggagcgacttatttttctggattcgatcaagtctaagtccaaggattctgtctgggaaaaggagatcgagatcctgattgaagagaacgaagacctgaagcagcaatgcatccagttgaacgaggaaatcgaaaagcaaagaaatactttcagcttcgctgaaaagaatttcgaagtgaattaccaggaactccaggaggaatacgcttgtctcctgaaagttaaagacgatcttgaggactcaaagaataagcaggagctggaatataaatcaaaattgaaggctctgaatgaggaattgcacttacagagaattaacccaaccaccgtgaaaatgaaatcgtccgtgttcgacgaggacaagaccttcgtggccgagaccttggaaatgggggaagtcgtggagaaggataccacagagctcatggagaagttggaagtaactaagcgcgaaaagctggagcttagtcagaggcttagtgacttgagcgaacagctgaagcagaaacatggagaaatttcatttctgaatgaagaagtaaagtctctgaagcaagaaaaggagcaggtcagcctccgatgccgagagctcgaaatcattattaaccataacagagccgagaacgtgcaaagttgcgatactcaggtgtcatctcttctcgatggtgtagtgacaatgacttccaggggcgcagaaggttccgtgagcaaggtgaacaaaagcttcggcgaagaatccaagattatggtggaggataaagtatcctttgaaaatatgacagtcggtgaagagtcaaaacaagagcagctcatcctggaccacctgcccagcgtaacaaaagaatcgtctttgcgggcaactcagccttctgagaatgacaaactgcagaaagagctcaatgtcctgaaatctgaacagaatgatctacgtctccagatggaagcccaaaggatctgcctgagcttagtctactccacgcacgttgaccaggtgcgggagtacatggaaaatgaaaaagataaagccctttgttccctgaaagaagaactcatatttgcccaagaggagaaaataaaggaactccaaaagattcaccagctcgagcttcaaaccatgaagacccaggaaaccggggacgaaggaaagcctcttcatttgttaatcggtaagctccagaaagccgtgagtgaagagtgtagctactttctacaaacactatgcagcgtgctgggcgaatactacacgcctgccctgaaatgtgaggtcaacgcggaggacaaagagaatagtggagactacatcagtgaaaacgaagacccagagttacaagactataggtacgaagtgcaagattttcaggaaaatatgcacaccctcctaaataaagtcactgaagaatataataagctactagttttacagacaagactttccaaaatttggggccagcaaaccgatggtatgaaactagagtttggcgaggaaaacctgcccaaagaggaaaccgagtttttgtctatccattcccagatgacaaacttagaagatatcgatgtcaaccataagagcaaactatccagcctccaggacctggagaaaaccaaattagaggaacaggtgcaggagctggaaagtctcattagttcccttcagcagcagcttaaggaaactgagcagaattatgaggcagagatccactgtctgcagaaaagactacaggctgttagtgaatcaacagtgcccccttctcttcctgtggattctgtcgtgatcaccgaaagcgatgcacaacggaccatgtaccctgggtcttgtgtgaaaaaaaacatagatggaacgatcgaattttcaggcgaatttggcgtcaaggaggagaccaacattgtgaagcttctggagaaacaataccaggagcaactggaggaagaagttgcaaaggtgattgttagtatgtcgatcgctttcgctcagcagaccgagctatcccgcatctcaggtggcaaggagaacactgctagctccaagcaggcccacgccgtgtgtcaacaggagcaacactattttaacgagatgaagttaagtcaggaccagattggcttccagacatttgaaacagtggatgtgaaattcaaagaggaattcaaaccattgagcaaggagcttggcgagcacggtaaggaaattcttttatctaacagtgacccccacgacatcccggaaagcaaggattgtgtgctcaccatctccgaagaaatgttcagtaaggataagacttttattgtgaggcagtctatacacgacgagatatctgtgagcagcatggacgcctcccggcagttaatgctgaatgaggagcagctggaagacatgcggcaggagctcgtgcgccagtatcaagaacaccaacaggcaaccgagctgctgcggcaggcccacatgcggcagatggagcgccagcgggaagatcaggaacagcttcaggaagagattaaaagactcaatcgccagctcgcccagcgctctagcatcgataatgaaaacttggtgtcagaaagagagagggtcctgctggaggaacttgaggctctcaaacaactgtccctggcagggagggaaaagctgtgctgcgagctcagaaattcctccacccagactcagaacggcaacgaaaatcaaggtgaggtcgaggaacaaacatttaaggaaaaggaactcgatcgcaagccagaggacgttccccctgaaattctgtctaacgaacgctatgctttgcagaaggccaacaacagactgctgaaaatccttctcgaggtggtgaaaactaccgctgccgtcgaggaaaccatcgggaggcatgtcctgggtattttggacagatcttcaaagtcacagtccagtgcatcgctgatttggcggagcgaagcagaagcgtccgtcaagagctgcgtgcatgaagaacacacacgcgtcactgatgagtccatcccaagttactctgggtccgatatgcctcgtaatgacattaatatgtggagtaaggtcacggaagaaggtaccgagctgagccagaggttggtgaggtccggattcgccggtaccgagatcgaccccgagaatgaggaactgatgctcaatatatcttcacggctccaggccgctgtcgagaaactgctggaagccatctctgagacctcttcccagttagagcatgccaaggttacccaaactgaactgatgcgtgagtctttccgtcagaagcaggaagcaactgagagcctgaagtgccaagaggagctaagggaacggttgcacgaggagtcccgtgccagggagcagcttgctgttgagctctcaaaagccgagggtgttatcgatggctatgctgacgagaagactctgtttgagcggcaaatacaggagaaaactgacatcattgatcgcttagaacaggagctactttgcgcctctaatcgactgcaggaactcgaggctgagcagcagcagatacaagaagaacgcgagctcctgagtagacagaaggaagcgatgaaagcagaggcaggaccggttgagcagcagctgctgcaggagaccgaaaagctgatgaaagagaagttggaggtccagtgtcaggctgaaaaggtgagagacgatcttcagaagcaggttaaagctttggagatcgacgtggaggaacaggtaagtcgcttcattgaattagaacaggagaaaaacactgagctgatggaccttaggcagcagaatcaggcactcgagaaacagctggagaaaatgcgcaagttcctggacgaacaggctatcgatcgagagcacgaacgcgacgtgtttcagcaggagattcagaagctagaacagcaacttaaggtggtgccaagatttcagcccatctctgaacaccaaaccagagaggttgagcagttagcgaaccacctcaaagaaaagacggataagtgttccgagctcctgcttagtaaggagcagctgcaacgggatatacaagagcggaacgaagagatcgagaagttagagttccgggtgagagagctagagcaggcattgctggtttctgccgacaccttccaaaaagtggaggatagaaagcatttcggagccgtcgaggcgaaacctgagctttctcttgaggtgcagttacaagccgaacgggacgccatcgataggaaagaaaaggaaatcacgaacctcgaggagcagttggaacaatttagagaggaattggaaaacaaaaatgaagaggtgcagcagctgcacatgcagctcgaaattcagaagaaggagtctactactcggctgcaagaactcgaacaggaaaacaaactcttcaaggacgacatggagaaactgggattggccatcaaggagtcagacgctatgagcactcaggaccagcatgtgctgtttggcaagttcgcccagataatccaggaaaaggaggtcgagatcgatcaacttaacgaacaagtcaccaagctgcagcagcagttaaaaatcaccaccgacaacaaagtgatcgaagagaaaaacgagctgattagggatttggaaacacaaatcgaatgcctgatgtccgaccaagagtgtgtcaaacgcaatcgagaggaggaaatcgagcaattaaatgaagtcattgaaaaactgcagcaagaactcgcaaacattggtcagaaaacgtccatgaacgctcacagtctgagcgaagaggccgacagcctcaagcaccaattggatgtggtaattgccgagaagctcgcattggaacagcaagtcgaaacagcaaacgaagaaatgaccttcatgaagaacgtgctaaaagagaccaacttcaagatgaaccaactgactcaggagctattctcacttaaacgggaacgggagtcagtggaaaagatacagtccatccctgaaaactcagttaatgttgccatcgatcatctgtcgaaagataagcccgagctggaggtggtgctgaccgaggacgccctgaaaagtttggagaaccagacctatttcaagagctttgaggagaacggaaagggatcaatcatcaaccttgaaactcggctgctacagttggaatccactgtcagcgcaaaagatctggagcttacccagtgctataaacaaattaaggatatgcaagaacagggccagttcgagaccgaaatgcttcaaaaaaagatcgtgaatctgcagaagatcgtggaggagaaggtggcagccgctcttgtatcccagatccagctcgaagcagttcaggaatacgccaagttttgccaggacaatcaaacaattagttccgaaccagagcggaccaatatacagaatctgaatcagttgcgggaagacgaactaggaagtgacatttccgctctcacgttacgcatcagcgagctggaaagccaagtggtcgagatgcacactagcttaatcctcgagaaggagcaggttgagatcgccgaaaagaatgtgctggagaaagaaaaaaaactgttggagctgcagaagctgctcgagggcaatgaaaaaaaacagcgcgagaaggaaaagaaacggtctccccaggacgtggaggtgctgaagaccactacagagctgtttcacagtaatgaggagagcggcttttttaacgagcttgaggccttgagagcagagtcggtcgccactaaagccgagctggccagctacaaagagaaagcggagaaactgcaagaggaactcctggtgaaggaaactaacatgacctccctccagaaagacctgagccaggtgcgcgaccacctcgccgaggcgaaggaaaaactgtccatccttgagaaagaggatgagaccgaggttcaggaatcaaagaaagcttgcatgtttgaaccactgcctataaaactgtctaagtctatagcgagccagacggacggcactctcaagatctcatcttcgaatcagacgcctcagatcctggtaaagaatgcaggtattcagataaatctgcagagcgaatgttcatccgaggaggtaactgaaattattagccagtttacagagaagatcgagaagatgcaggaactgcacgcggctgagatcctcgatatggaatcgcgacatatttctgaaaccgaaactctaaaacgcgagcactacgtggccgtgcaactcctcaaggaagaatgtgggactctgaaggccgttatacagtgtctgaggtccaaggagggatcgagcatccccgaattggctcattcggacgcttaccagacaagggaaatatgctcatcagactcgggctcggattggggacagggaatctacttgacacatagccagggcttcgatattgcatctgaagggaggggcgaggagtccgagtccgccacagactcctttcctaagaagatcaagggactgttgcgagcagtgcataacgaggggatgcaggtgctttccctcacagaaagtccctattcagatggtgaggaccattccattcagcaggtgtcagaaccatggctcgaggaaaggaaggcttatataaacaccatatcaagcctgaaggacctgataacaaagatgcagctgcagcgagaggcagaggtttatgatagttcacagtctcacgagtctttctcggactggcgtggggagctgctactcgccttacagcaagtgttccttgaagaaagatccgtccttctggccgcattccgcacggagctgacagccctagggaccactgatgccgttgggcttctcaattgtctggaacaacggatccaagaacagggagtagagtaccaggctgccatggagtgtcttcagaaggccgatagaagatcactcctgagcgagattcaggccctccacgcccaaatgaacgggagaaaaatcaccttaaagcgggagcaggagtctgaaaagccaagtcaggagctactggaatataatatccagcagaagcagagtcagatgttggagatgcaggtggagttatcaagcatgaaggacagagcaactgagcttcaggaacaactctccagtgaaaaaatggttgttgcagaattaaagagcgagctggctcagacaaagttagagcttgaaacaactctaaaagctcagcacaagcatttaaaagaattagaagctttccgcctggaggtaaaggataagacggatgaggtgcaccttctcaacgacacactcgcttccgagcagaagaagtcccgcgagcttcagtgggccctcgagaaagagaaagctaaactgggcaggtcggaggaaagagataaagaagaattagaggacctgaaattttccctcgaatcacagaaacaacggaatcttcagcttaatcttcttcttgaacagcagaagcagctcctgaatgagtcccagcagaaaattgagtcccagcgcatgttatacgatgctcagctgtctgaagagcaaggcaggaacctggagctgcaggtcttgctcgaatctgaaaaggtgcgaattagggagatgagctccacactggacagagaaagggaactgcacgcccagcttcagtccagcgatgggaccggacaaagtcgacctccattgccctcggaggacctgctgaaggaacttcagaaacagctggaggaaaaacattcaaggatcgtggaactcctgaatgagaccgagaagtacaagctggacagcctgcaaacccgccaacaaatggagaaggaccgccaggtacaccgaaaaacccttcagacggagcaagaagctaatacggaaggccagaaaaagatgcacgagctgcagagtaaggtggaggacctccagcggcagctcgaagaaaagcggcagcaggtgtacaagctggatctggagggtcaaaggttacaggggattatgcaggaatttcagaaacaggagcttgaaagggaggaaaaaagagaaagtcggcgtattctgtatcagaacctgaatgagcccacgacctggtcattgacaagcgatagaacccggaactgggtcctgcagcagaaaatcgaaggtgaaaccaaagaaagtaactatgcaaaactgatcgagatgaacggtggcggtacaggttgcaaccacgaactggaaatgattcggcaaaaactgcaatgcgtggcctccaagctgcaggttctgccccagaaagcttctgaacgcctgcagtttgaaaccgcggacgatgaggatttcatatgggtccaagaaaatatcgacgaaattattcttcagttgcagaaactgactggacagcaaggcgaagaaccatccctcgtcagcccttccacctcctgcggatccctaaccgaaaggctgctgcgacaaaacgccgaactgaccggccacataagccagttgacggaagagaagaatgacttacgcaatatggtcatgaaactggaggaacagatcagatggtaccggcaaacaggagcgggtagagataacagctcaagatttagtctcaatggaggtgctaatatagaggccattatcgcctccgagaaagaggtgtggaaccgagagaaacttaccttgcagaaatcactgaaacgggctgaggcggaagtttacaagctgaaagcggagctcagaaacgacagtctgttgcagacactcagtccagactccgagcatgtcactttaaagaggatctatgggaaatatctccgtgccgaatcattcagaaaggccctcatttaccagaagaagtatctcctcctgctcctcgggggatttcaggagtgtgaggacgctacactcgcactgttagctcgcatgggtggccagccggcatttaccgacttggaagttataactaaccgtcctaaaggttttacaagattcagatcagctgtgcgtgtaagcatagcaattagccggatgaagtttctcgtgcggagatggcatagagtcactgggagcgttagcattaacattaatagagacggtttcggactgaatcaaggcgctgaaaaaacagactccttctaccacagttctggcggacttgagctttatggagagcccagacacactacctaccgatcaaggagcgacctggattatataagaagtccgctgccgtttcaaaatagatatcccggaacccctgctgacttcaatccagggtcactcgcttgcagccagctccagaattacgaccccgacagagcgctgactgactatatcacgaggttggaggctttgcagaggcgactcgggaccatccagagcgggtccactactcagtttcacgccggaatgcgcaggtac

SEQ ID NO: 158972 - DNA, 12471 bp, Artificial Sequence
  derived and/or modified sequence
tacgtggagacgaagatggcggcggcggcggcggtgacggcgcttcccgtgcggctgaggacgatccgccagtgagcgcggagactgcttccacttcgggcgggggagcgccggaccgaatcggctctctaggccgtggagcttgccgtcccacctccgtccaaatcgacctttcctttctatccccaaccacccctcaacccctgttttcccctgccttccttgcagaggccatggaggacgaggagagacagaagaagctggaggccggcaaagccaagcttgcccagtttcgacaaagaaaagctcagtcggatgggcagagtccttccaagaagcagaaaaaaaagagaaaaacgtcaagcagtaaacatgatgtgtcagcacaccatgatttgaatattgatcaatcacagtgtaatgaaatgtacataaatagttctcagagagtagaatcaactgtgattcctgaatctacaataatgagaactctacatagtggagaaataaccagtcatgagcagggcttctctgtggaactggaaagtgaaatttcaaccacagcagatgactgcagttcagaggtaaatggttgcagttttgtgatgagaacaggaaagcctacaaatttattaagggaagaagaatttggtgttgatgattcttattctgaacaaggagcacaagacagtccgactcatctagagatgatggaaagtgagttggctgggaagcagcatgagattgaagagctaaacagagagctggaagaaatgagggttacctatgggactgaaggactgcagcagttacaagaatttgaagctgccattaaacaaagagatggcattataacccagctcactgctaatttacaacaagcaagaagagaaaaggatgagacaatgagagaatttttagagttgacagaacagagtcaaaaattacagattcaatttcagcaattacaggctagtgaaactctgagaaacagcactcatagtagcacagctgcagacttactacaagccaaacaacagatcctcactcatcaacagcagcttgaagaacaagaccacttattagaagattatcagaaaaagaaagaagacttcacaatgcaaattagtttcttgcaagagaaaattaaagtatatgaaatggaacaagataaaaaagtagaaaactcaaataaagaagaaatacaggaaaaggagacaatcattgaagaattaaacacaaaaataatagaagaagaaaagaaaactcttgagctaaaggataaattaacaactgctgataaattactaggagaattacaagaacagattgtgcaaaagaaccaagaaataaaaaacatgaaattagagctgactaattctaagcaaaaagaaagacagtcttctgaagaaataaaacagttaatggggacagtcgaagaacttcagaagagaaatcataaagacagccagttcgaaactgatatagtacaacgaatggaacaagaaacacaaagaaagttagaacaactccgggcagagctggatgagatgtatgggcagcagatagtgcaaatgaaacaagaattaataagacaacacatggcacagatggaggaaatgaaaacacggcataagggagaaatggagaatgctttaaggtcatattcaaatattacagttaatgaagatcagataaagttaatgaatgtggcaataaatgaactgaatataaaattgcaagatactaactctcaaaaggaaaaactcaaggaagaactaggactaattttagaagaaaagtgtgctctacagagacagcttgaagaccttgttgaagaattgagcttttcaagggaacagattcagagagctagacagacaatagctgaacaagaaagtaaacttaatgaagcacataagtcccttagtacagtggaagatttgaaagctgagattgtttctgcatctgaatccagaaaggaactagaattaaaacatgaagcagaagttacaaattacaagataaaacttgaaatgttagaaaaagaaaagaatgctgtgttagacagaatggctgaatcacaagaagctgaattagagaggctgagaacacagcttctatttagtcacgaagaagagctttccaaactgaaggaagatttagaaattgaacatcgaataaatattgaaaaacttaaagataatttaggcattcactataaacagcagatagatggtttacagaatgaaatgagtcaaaagatagaaaccatgcagtttgaaaaggacaatttgataactaagcagaatcaattaattttggaaatttcaaagctaaaagatttacagcagtctcttgtaaattcaaagtcagaagaaatgactcttcaaatcaatgaacttcaaaaagaaattgaaatactcagacaagaagaaaaagaaaagggtacacttgaacaagaagttcaagaattacaacttaaaacagaattgttagaaaaacagatgaaggaaaaagagaatgatcttcaagaaaaatttgcacaacttgaagcagagaatagcattcttaaagatgaaaagaaaacccttgaagacatgttgaaaatacatactcctgttagccaagaagaaagattgattttcttagactccattaagtccaaatccaaagactctgtgtgggaaaaagaaatagaaatacttatagaggaaaatgaggacctcaaacaacaatgtattcagctaaatgaagagattgaaaagcaaaggaacactttttcatttgctgaaaaaaactttgaagttaactatcaagagttacaagaggagtatgcttgccttctcaaagtaaaagatgatttagaagacagtaaaaataaacaggaattagagtataaaagtaaacttaaagcacttaatgaagagcttcatttgcaaagaataaatccaactacagtgaaaatgaaaagttctgtctttgatgaagacaaaacttttgtagcagaaacattggaaatgggtgaggttgttgaaaaggatacaacagaactcatggaaaaacttgaggtaaccaagcgagagaaattagagctgtcacagagactgtctgatctttctgaacaattgaaacagaaacatggtgagattagttttctaaatgaagaagttaaatctttaaagcaagagaaagaacaagtttcattgagatgtagagagctagaaatcattattaaccacaacagggcagaaaatgtacagtcatgtgatactcaagtaagctctttattagatggagttgtgaccatgacaagcaggggtgctgaaggatcagtttctaaagtaaataaaagttttggtgaagaatcaaaaataatggtggaagataaagtttcttttgaaaatatgactgttggagaagaaagtaagcaagaacagttgattttggatcacttaccatctgtaacaaaggaatcatcacttagagcaactcaaccaagtgaaaatgataaacttcagaaagaactcaatgtacttaaatcagaacagaatgatttaaggctacagatggaagcccaacgcatttgcctctctctggtttattcaactcatgtggatcaggttcgtgaatatatggaaaatgaaaaagataaagctctttgcagtcttaaagaagagcttatttttgctcaagaggaaaagatcaaggaacttcagaaaatacaccagttagaactacagactatgaaaacacaagaaacaggtgatgaaggaaagcctttacatctgctcattggaaaacttcaaaaggcagtgtctgaagaatgttcttattttttacagactttatgcagtgtccttggtgaatattatactcctgctttaaaatgtgaagtaaatgcagaagacaaagagaattctggtgattacatttctgaaaatgaagatccagaattacaagattatagatatgaagttcaagactttcaagaaaatatgcacactcttctcaacaaagtaacagaagaatacaacaaactcttggtacttcaaacacgactaagcaagatctggggacagcagacagatggtatgaaacttgaatttggagaagaaaaccttccaaaagaggaaacagagtttttatcaatccattctcagatgaccaatttggaagacattgatgtcaatcataaaagcaagttatcttctctgcaagatcttgaaaaaactaaacttgaagaacaagttcaagaattagaaagcctcatatcctctttgcagcaacagttgaaagaaactgaacaaaactatgaggcagagatccactgtttacagaagaggcttcaagctgttagtgagtccacggttccgccaagcttacctgttgattcggtggtaattacagaatctgatgcacagagaacaatgtaccctggaagttgtgtgaaaaagaatattgatggtacaatagagttttctggtgaatttggagtgaaagaggaaacaaatatcgttaagttgcttgaaaaacaataccaagaacaattagaagaagaagtagctaaggttattgtgtcaatgagtatagcatttgctcaacaaactgaactgtctagaatatctgggggaaaagaaaatactgcatcatcaaagcaagcacatgctgtgtgtcagcaagaacaacattattttaatgaaatgaaattatcacaggatcaaattggttttcagacttttgagacagtggatgtgaaatttaaagaagaatttaaaccacttagtaaagagttaggagaacatggaaaggaaattttattatcaaatagtgatccccatgatataccagaatcaaaggactgtgtgctgactatttcagaagaaatgttctccaaagataaaacatttatagttagacagtctattcatgatgagatttcagtgtcaagcatggatgcttctagacaactaatgttgaatgaagaacagttggaagatatgagacaggaacttgtacgacaataccaagaacatcaacaggcaacggaattgttaaggcaagcacatatgcggcaaatggagagacagcgagaagaccaggaacagctacaagaagagattaagagacttaatagacaattagcccagagatcctccatagataatgaaaacctggtttcagagagagagagggtgcttttagaggagctggaagcactaaagcagctgtctttagctggaagagagaagctgtgttgtgagctgcgcaacagcagtacgcaaacacagaatggaaatgaaaaccaaggagaagttgaagaacaaacatttaaagaaaaggaattagacagaaaacctgaagatgtgcctcctgagattttgtctaatgaaaggtatgcactccagaaagctaataatagacttttgaagatcctcttagaagttgtaaagacaacagcagctgttgaagaaacaattggtcgccatgtccttgggattctagatagatctagtaaaagccagtcatctgccagcctaatttggaggtcagaagcagaggcatctgtaaagtcatgtgtccatgaggaacatacaagagttacagatgaatccattccctcttattctggaagtgatatgccaagaaatgacattaacatgtggtcaaaagtaactgaggaaggaacagagctgtcacaacgacttgtgaggagtggttttgctggaactgaaatagaccctgaaaatgaagaacttatgctgaacattagctctcgactacaagcagcagttgaaaaactcctagaagccataagtgaaactagcagtcagcttgaacatgcgaaagtgacacagacagagttgatgcgtgagtcatttagacagaaacaagaagcaacagagtcccttaagtgccaagaggaacttcgagagcgccttcatgaggagtccagggccagagaacagctagctgtggagctcagtaaggctgagggcgtcattgatggctatgcagatgaaaaaactctttttgaaaggcaaattcaggaaaaaactgatataatagatcgtcttgagcaggagttgttatgtgcaagtaacaggttgcaagaattggaggcagagcaacagcagatccaagaagaaagagaattactgtccagacaaaaggaagctatgaaagcagaggcaggcccagttgaacaacaattactacaggagacagaaaaattaatgaaggaaaaactagaagtacaatgtcaagctgaaaaagtacgtgatgaccttcaaaaacaagtgaaagctctagaaatagatgtggaagaacaagtcagtaggtttatagagctggaacaagaaaaaaatactgaactaatggatttaagacagcaaaaccaagcattggaaaagcagttagaaaaaatgagaaaatttttagatgagcaagccattgacagagaacatgagagagatgtattccaacaggaaatacagaaactagaacagcaacttaaggttgttcctcgattccagcctatcagtgaacatcaaactagagaggttgaacagttagcaaatcatctgaaagaaaaaacagacaaatgcagtgagcttttgctctctaaagagcagcttcaaagggatatacaagaaaggaatgaagaaatagagaaactggagttcagagtaagagaactggagcaggcgcttcttgtgagtgcagatacttttcaaaaggtagaggaccgaaaacactttggagctgtagaagctaaaccagaattgtccctagaagtacaattgcaggctgaacgagatgccatagacagaaaggaaaaagagattacaaacttagaagagcaattagaacagtttagagaagaactggaaaataagaatgaagaagttcaacaattacatatgcaattagaaatacagaaaaaggaatctactacccgcctacaagaacttgaacaggaaaacaaattatttaaggatgacatggagaaactgggacttgccataaaggaatctgatgccatgtctactcaagaccaacatgtgctatttgggaaatttgctcaaataatacaggaaaaagaggtagaaattgaccaattaaatgaacaagttacgaaactccagcagcaacttaaaattacaacagataacaaggttattgaagaaaaaaatgaactgataagggatcttgaaacccaaatagaatgtttgatgagtgatcaagaatgtgtgaagagaaatagagaagaagaaatagagcagctcaatgaagtgattgaaaaacttcaacaggaattggcaaatattggacagaagacatcaatgaatgctcattccctctcagaagaagcagacagtttaaaacatcaattggatgtggttatagctgaaaagctggccttggaacagcaagtagaaaccgctaatgaagaaatgaccttcatgaaaaatgtacttaaagaaaccaattttaaaatgaatcagctaacacaggaattattcagcttaaagagagaacgtgaaagtgtggaaaagattcaaagcataccagagaatagtgttaacgtggctatagatcatctgagcaaagacaaacctgaactagaagtagtccttacagaggatgctcttaaatccctagaaaatcagacatacttcaaatcttttgaagaaaatggcaaaggttccataattaatttggaaacaaggttgctacaacttgagagcactgttagtgcaaaggacttagaacttacccagtgttataaacaaataaaagacatgcaagaacaaggccagtttgaaacagaaatgcttcaaaagaagattgtaaacctacagaaaatagttgaagaaaaagtggctgctgctcttgtcagtcaaatccaacttgaggcagttcaggaatatgcaaaattctgtcaagataatcaaacaatttcatcagaacctgaaagaacaaatattcagaatttaaatcaactaagagaagatgagttggggtcagatatatcagcattaaccttgagaatatcagaattagaaagccaggttgttgaaatgcatactagtttgattttagaaaaagaacaagtagaaattgcagaaaaaaatgttttagaaaaagaaaagaagctgctagaactacagaagctattggagggcaatgagaaaaaacagagagagaaagaaaagaaaagaagccctcaagatgttgaagttctcaagacaactactgagctatttcatagcaatgaagaaagtggattttttaatgaactcgaggctcttagagctgaatcagtggctaccaaagcagaacttgccagttataaagaaaaggctgaaaaacttcaagaagagcttttggtaaaagaaacaaatatgacatctcttcagaaagacttaagccaagttagggatcacctcgcagaggcaaaagagaaattgtccattttagaaaaagaagatgagactgaggtacaagaaagcaaaaaggcctgcatgtttgagccacttcctataaaactgagtaagagcattgcatcccagacagatgggactctgaagatcagtagcagcaatcagactccacaaattcttgttaaaaatgcaggaatacaaattaatttacagagtgaatgttcctcagaagaagttactgaaataatcagtcagtttactgaaaaaattgagaagatgcaagaactacatgctgctgaaattttggacatggaatccagacatatttcagaaactgaaaccttaaagagggaacactatgttgccgttcagttactgaaagaggaatgtggtaccttgaaggcagtgatacagtgtctgagaagtaaagagggatcctcaattcctgagctagcacattctgatgcttaccagactagagaaatatgctccagtgattctggatcagactggggtcagggaatttatcttacacacagtcagggatttgacatagcatcagaaggccgaggagaagaaagtgaaagtgcaacagattcctttccaaagaaaataaagggattactgagagctgtccataatgaaggcatgcaggtgctttctctcactgagtctccctatagtgatggagaggaccattctattcagcaggtttcagaaccttggctagaagagagaaaagcttacatcaatacaatctcatctctaaaggatttaattacaaagatgcaactgcaaagagaagccgaggtttatgatagttctcaatctcatgagagcttctcagactggcgaggtgaactactgcttgcccttcaacaagttttcttagaagagcgtagtgttttactagcagcatttcggacggagctgacagctctaggtactacagatgcagttggtttactaaactgtttggaacagagaatacaagaacagggtgttgaatatcaagcagctatggaatgcctccagaaagcagatagaaggagtttgttatctgaaattcaggcactgcatgcacaaatgaatggtaggaaaattactctgaaaagagaacaagagagtgagaaaccaagccaagaactcttggaatataatatacagcagaagcagtctcaaatgctggagatgcaagtggagctcagcagtatgaaagacagagcaacggaactgcaggagcagctgagttctgagaaaatggtggttgctgaactgaagagtgagcttgcacaaactaaattggaactagaaacaacactcaaggcacagcataaacacctaaaagaattggaggctttcaggttggaagttaaagataagacagatgaagtacatttgcttaatgacacattagcaagtgaacagaaaaaatcaagagagctccagtgggctttggagaaagagaaagccaagttgggacgcagtgaagaacgggataaagaagaacttgaggatctgaagttttcacttgagagtcagaaacaaaggaatcttcagctaaatctacttttggaacaacagaaacaactactgaacgaatcccagcaaaaaatagaatcacagagaatgctatatgatgcccagttgtcagaagaacaaggtcgaaacttagagcttcaggtacttcttgaatctgagaaagttcgaattcgggaaatgagtagtaccctagatagggagcgggaattgcacgcacagctgcagagcagtgatggtactggacagtctcggccacccttgccctcagaggacctactgaaagagctgcagaaacagctagaggaaaaacacagtcgcatagtagaattgttaaatgagactgaaaaatataaactggattctttgcaaacacgacagcaaatggaaaaagataggcaggttcacaggaaaacactgcagacagaacaggaggccaacactgagggacagaaaaaaatgcatgagctccagtccaaagtggaagatcttcagcgccagctggaagagaaaagacaacaagtttataagttagaccttgaaggacagcgactacaaggaatcatgcaggaattccagaagcaagaactagaacgagaagaaaaacgagaaagtagaagaattctgtatcagaaccttaatgagccaaccacgtggagcttaaccagtgatagaactagaaattgggttcttcaacagaaaatagaaggagaaacaaaagaatcaaactacgctaaattgattgaaatgaatggaggaggaaccggctgtaatcatgaattagaaatgatcagacaaaagcttcaatgtgtagcttcaaaactacaggttctaccccagaaagcctctgagagactacagtttgaaacagcagatgatgaagatttcatttgggttcaggaaaatattgatgaaattattttacaactacagaaattaactggccagcaaggtgaagagcccagcttggtgtccccaagtacttcttgtggctcattgactgaaagactactgagacaaaatgctgagctgacagggcatatcagtcaactgactgaagagaagaatgacttaaggaacatggttatgaagctggaagagcagatcaggtggtatcgacagacaggagctggtagagataattcttccaggttttcattgaatggtggtgccaacattgaagccatcattgcctctgaaaaagaagtatggaacagagaaaaattgactctccagaaatctttgaaaagggcagaggctgaagtatacaaactgaaagctgaactaagaaatgactctttacttcaaactctgagccctgattctgaacatgtcactttaaagagaatttatggtaaatacttgagggcagaaagttttcgaaaggctctcatttaccagaagaaatacctgctgctgttactgggtgggttccaggaatgtgaagatgccaccttggccctgcttgcccggatgggggggcagccagctttcacggatctagaggtgatcaccaatcgcccaaagggcttcaccaggtttcggtcggccgtcagagtatccattgcaatttccagaatgaaatttttggttcgacggtggcatcgagtcacaggttctgtttccatcaatattaacagagatggctttggactgaatcaaggtgcagaaaagactgactcattttatcattcttctggtgggctggagttatatggagaaccaagacatactacgtatcgctcaagatcagatctggactatattaggtcccctttaccatttcagaataggtacccaggcactccagctgatttcaatcctggttctttagcatgttctcagcttcagaattacgatcctgacagagccctaacagattatatcactcggctagaggcactgcaaagacgacttggaactatacagtcaggttcaactactcaatttcatgctggcatgagaagataatcctttgaaacatcattaattgaagtgattttaaatagatttccttttgtaaatcaatggttcttttgtgcttttgtattgtgaatattcaatgggaccaatatgaacacagcttatgattgtatacaaatcccttgccagcacatgaaaacaaactggaatttgtatatataagcattgtgtatgtattcatgcacaataattattgaattacctgtatatttgtggaatgctaatttaaaacattaaattataaaccttgtgtatttatcaaatgggtgaaaagattaaacttttacgcattacaatactgctgaatgtgtagctcgaggtgtcctgcacttttcttataaggctactgaagttacatgttttgcctaatatattctactggtgatgaagacagataatatcacttgtagagacctatttttgtataatggtagaagttttgaattttatggggtattttgtcaagtactgaaataaaaatgacttcaccattttcaccaca

SEQ ID NO: 158973 - DNA, 11724 bp, Artificial Sequence
  derived and/or modified sequence
atggaggacgaggagagacagaagaagctggaggccggcaaggccaagctggcccagttcagacagagaaaggcccagagcgacggccagagccccagcaagaagcagaagaagaagagaaagaccagcagcagcaagcacgacgtgagcgcccaccacgacctgaacatcgaccagagccagtgcaacgagatgtacatcaacagcagccagagagtggagagcaccgtgatccccgagagcaccatcatgagaaccctgcacagcggcgagatcaccagccacgagcagggcttcagcgtggagctggagagcgagatcagcaccaccgccgacgactgcagcagcgaggtgaacggctgcagcttcgtgatgagaaccggcaagcccaccaacctgctgagagaggaggagttcggcgtggacgacagctacagcgagcagggcgcccaggacagccccacccacctggagatgatggagagcgagctggccggcaagcagcacgagatcgaggagctgaacagagagctggaggagatgagagtgacctacggcaccgagggcctgcagcagctgcaggagttcgaggccgccatcaagcagagagacggcatcatcacccagctgaccgccaacctgcagcaggccagaagagagaaggacgagaccatgagagagttcctggagctgaccgagcagagccagaagctgcagatccagttccagcagctgcaggccagcgagaccctgagaaacagcacccacagcagcaccgccgccgacctgctgcaggccaagcagcagatcctgacccaccagcagcagctggaggagcaggaccacctgctggaggactaccagaagaagaaggaggacttcaccatgcagatcagcttcctgcaggagaagatcaaggtgtacgagatggagcaggacaagaaggtggagaacagcaacaaggaggagatccaggagaaggagaccatcatcgaggagctgaacaccaagatcatcgaggaggagaagaagaccctggagctgaaggacaagctgaccaccgccgacaagctgctgggcgagctgcaggagcagatcgtgcagaagaaccaggagatcaagaacatgaagctggagctgaccaacagcaagcagaaggagagacagagcagcgaggagatcaagcagctgatgggcaccgtggaggagctgcagaagagaaaccacaaggacagccagttcgagaccgacatcgtgcagagaatggagcaggagacccagagaaagctggagcagctgagagccgagctggacgagatgtacggccagcagatcgtgcagatgaagcaggagctgatcagacagcacatggcccagatggaggagatgaagaccagacacaagggcgagatggagaacgccctgagaagctacagcaacatcaccgtgaacgaggaccagatcaagctgatgaacgtggccatcaacgagctgaacatcaagctgcaggacaccaacagccagaaggagaagctgaaggaggagctgggcctgatcctggaggagaagtgcgccctgcagagacagctggaggacctggtggaggagctgagcttcagcagagagcagatccagagagccagacagaccatcgccgagcaggagagcaagctgaacgaggcccacaagagcctgagcaccgtggaggacctgaaggccgagatcgtgagcgccagcgagagcagaaaggagctggagctgaagcacgaggccgaggtgaccaactacaagatcaagctggagatgctggagaaggagaagaacgccgtgctggacagaatggccgagagccaggaggccgagctggagagactgagaacccagctgctgttcagccacgaggaggagctgagcaagctgaaggaggacctggagatcgagcacagaatcaacatcgagaagctgaaggacaacctgggcatccactacaagcagcagatcgacggcctgcagaacgagatgagccagaagatcgagaccatgcagttcgagaaggacaacctgatcaccaagcagaaccagctgatcctggagatcagcaagctgaaggacctgcagcagagcctggtgaacagcaagagcgaggagatgaccctgcagatcaacgagctgcagaaggagatcgagatcctgagacaggaggagaaggagaagggcaccctggagcaggaggtgcaggagctgcagctgaagaccgagctgctggagaagcagatgaaggagaaggagaacgacctgcaggagaagttcgcccagctggaggccgagaacagcatcctgaaggacgagaagaagaccctggaggacatgctgaagatccacacccccgtgagccaggaggagagactgatcttcctggacagcatcaagagcaagagcaaggacagcgtgtgggagaaggagatcgagatcctgatcgaggagaacgaggacctgaagcagcagtgcatccagctgaacgaggagatcgagaagcagagaaacaccttcagcttcgccgagaagaacttcgaggtgaactaccaggagctgcaggaggagtacgcctgcctgctgaaggtgaaggacgacctggaggacagcaagaacaagcaggagctggagtacaagagcaagctgaaggccctgaacgaggagctgcacctgcagagaatcaaccccaccaccgtgaagatgaagagcagcgtgttcgacgaggacaagaccttcgtggccgagaccctggagatgggcgaggtggtggagaaggacaccaccgagctgatggagaagctggaggtgaccaagagagagaagctggagctgagccagagactgagcgacctgagcgagcagctgaagcagaagcacggcgagatcagcttcctgaacgaggaggtgaagagcctgaagcaggagaaggagcaggtgagcctgagatgcagagagctggagatcatcatcaaccacaacagagccgagaacgtgcagagctgcgacacccaggtgagcagcctgctggacggcgtggtgaccatgaccagcagaggcgccgagggcagcgtgagcaaggtgaacaagagcttcggcgaggagagcaagatcatggtggaggacaaggtgagcttcgagaacatgaccgtgggcgaggagagcaagcaggagcagctgatcctggaccacctgcccagcgtgaccaaggagagcagcctgagagccacccagcccagcgagaacgacaagctgcagaaggagctgaacgtgctgaagagcgagcagaacgacctgagactgcagatggaggcccagagaatctgcctgagcctggtgtacagcacccacgtggaccaggtgagagagtacatggagaacgagaaggacaaggccctgtgcagcctgaaggaggagctgatcttcgcccaggaggagaagatcaaggagctgcagaagatccaccagctggagctgcagaccatgaagacccaggagaccggcgacgagggcaagcccctgcacctgctgatcggcaagctgcagaaggccgtgagcgaggagtgcagctacttcctgcagaccctgtgcagcgtgctgggcgagtactacacccccgccctgaagtgcgaggtgaacgccgaggacaaggagaacagcggcgactacatcagcgagaacgaggaccccgagctgcaggactacagatacgaggtgcaggacttccaggagaacatgcacaccctgctgaacaaggtgaccgaggagtacaacaagctgctggtgctgcagaccagactgagcaagatctggggccagcagaccgacggcatgaagctggagttcggcgaggagaacctgcccaaggaggagaccgagttcctgagcatccacagccagatgaccaacctggaggacatcgacgtgaaccacaagagcaagctgagcagcctgcaggacctggagaagaccaagctggaggagcaggtgcaggagctggagagcctgatcagcagcctgcagcagcagctgaaggagaccgagcagaactacgaggccgagatccactgcctgcagaagagactgcaggccgtgagcgagagcaccgtgccccccagcctgcccgtggacagcgtggtgatcaccgagagcgacgcccagagaaccatgtaccccggcagctgcgtgaagaagaacatcgacggcaccatcgagttcagcggcgagttcggcgtgaaggaggagaccaacatcgtgaagctgctggagaagcagtaccaggagcagctggaggaggaggtggccaaggtgatcgtgagcatgagcatcgccttcgcccagcagaccgagctgagcagaatcagcggcggcaaggagaacaccgccagcagcaagcaggcccacgccgtgtgccagcaggagcagcactacttcaacgagatgaagctgagccaggaccagatcggcttccagaccttcgagaccgtggacgtgaagttcaaggaggagttcaagcccctgagcaaggagctgggcgagcacggcaaggagatcctgctgagcaacagcgacccccacgacatccccgagagcaaggactgcgtgctgaccatcagcgaggagatgttcagcaaggacaagaccttcatcgtgagacagagcatccacgacgagatcagcgtgagcagcatggacgccagcagacagctgatgctgaacgaggagcagctggaggacatgagacaggagctggtgagacagtaccaggagcaccagcaggccaccgagctgctgagacaggcccacatgagacagatggagagacagagagaggaccaggagcagctgcaggaggagatcaagagactgaacagacagctggcccagagaagcagcatcgacaacgagaacctggtgagcgagagagagagagtgctgctggaggagctggaggccctgaagcagctgagcctggccggcagagagaagctgtgctgcgagctgagaaacagcagcacccagacccagaacggcaacgagaaccagggcgaggtggaggagcagaccttcaaggagaaggagctggacagaaagcccgaggacgtgccccccgagatcctgagcaacgagagatacgccctgcagaaggccaacaacagactgctgaagatcctgctggaggtggtgaagaccaccgccgccgtggaggagaccatcggcagacacgtgctgggcatcctggacagaagcagcaagagccagagcagcgccagcctgatctggagaagcgaggccgaggccagcgtgaagagctgcgtgcacgaggagcacaccagagtgaccgacgagagcatccccagctacagcggcagcgacatgcccagaaacgacatcaacatgtggagcaaggtgaccgaggagggcaccgagctgagccagagactggtgagaagcggcttcgccggcaccgagatcgaccccgagaacgaggagctgatgctgaacatcagcagcagactgcaggccgccgtggagaagctgctggaggccatcagcgagaccagcagccagctggagcacgccaaggtgacccagaccgagctgatgagagagagcttcagacagaagcaggaggccaccgagagcctgaagtgccaggaggagctgagagagagactgcacgaggagagcagagccagagagcagctggccgtggagctgagcaaggccgagggcgtgatcgacggctacgccgacgagaagaccctgttcgagagacagatccaggagaagaccgacatcatcgacagactggagcaggagctgctgtgcgccagcaacagactgcaggagctggaggccgagcagcagcagatccaggaggagagagagctgctgagcagacagaaggaggccatgaaggccgaggccggccccgtggagcagcagctgctgcaggagaccgagaagctgatgaaggagaagctggaggtgcagtgccaggccgagaaggtgagagacgacctgcagaagcaggtgaaggccctggagatcgacgtggaggagcaggtgagcagattcatcgagctggagcaggagaagaacaccgagctgatggacctgagacagcagaaccaggccctggagaagcagctggagaagatgagaaagttcctggacgagcaggccatcgacagagagcacgagagagacgtgttccagcaggagatccagaagctggagcagcagctgaaggtggtgcccagattccagcccatcagcgagcaccagaccagagaggtggagcagctggccaaccacctgaaggagaagaccgacaagtgcagcgagctgctgctgagcaaggagcagctgcagagagacatccaggagagaaacgaggagatcgagaagctggagttcagagtgagagagctggagcaggccctgctggtgagcgccgacaccttccagaaggtggaggacagaaagcacttcggcgccgtggaggccaagcccgagctgagcctggaggtgcagctgcaggccgagagagacgccatcgacagaaaggagaaggagatcaccaacctggaggagcagctggagcagttcagagaggagctggagaacaagaacgaggaggtgcagcagctgcacatgcagctggagatccagaagaaggagagcaccaccagactgcaggagctggagcaggagaacaagctgttcaaggacgacatggagaagctgggcctggccatcaaggagagcgacgccatgagcacccaggaccagcacgtgctgttcggcaagttcgcccagatcatccaggagaaggaggtggagatcgaccagctgaacgagcaggtgaccaagctgcagcagcagctgaagatcaccaccgacaacaaggtgatcgaggagaagaacgagctgatcagagacctggagacccagatcgagtgcctgatgagcgaccaggagtgcgtgaagagaaacagagaggaggagatcgagcagctgaacgaggtgatcgagaagctgcagcaggagctggccaacatcggccagaagaccagcatgaacgcccacagcctgagcgaggaggccgacagcctgaagcaccagctggacgtggtgatcgccgagaagctggccctggagcagcaggtggagaccgccaacgaggagatgaccttcatgaagaacgtgctgaaggagaccaacttcaagatgaaccagctgacccaggagctgttcagcctgaagagagagagagagagcgtggagaagatccagagcatccccgagaacagcgtgaacgtggccatcgaccacctgagcaaggacaagcccgagctggaggtggtgctgaccgaggacgccctgaagagcctggagaaccagacctacttcaagagcttcgaggagaacggcaagggcagcatcatcaacctggagaccagactgctgcagctggagagcaccgtgagcgccaaggacctggagctgacccagtgctacaagcagatcaaggacatgcaggagcagggccagttcgagaccgagatgctgcagaagaagatcgtgaacctgcagaagatcgtggaggagaaggtggccgccgccctggtgagccagatccagctggaggccgtgcaggagtacgccaagttctgccaggacaaccagaccatcagcagcgagcccgagagaaccaacatccagaacctgaaccagctgagagaggacgagctgggcagcgacatcagcgccctgaccctgagaatcagcgagctggagagccaggtggtggagatgcacaccagcctgatcctggagaaggagcaggtggagatcgccgagaagaacgtgctggagaaggagaagaagctgctggagctgcagaagctgctggagggcaacgagaagaagcagagagagaaggagaagaagagaagcccccaggacgtggaggtgctgaagaccaccaccgagctgttccacagcaacgaggagagcggcttcttcaacgagctggaggccctgagagccgagagcgtggccaccaaggccgagctggccagctacaaggagaaggccgagaagctgcaggaggagctgctggtgaaggagaccaacatgaccagcctgcagaaggacctgagccaggtgagagaccacctggccgaggccaaggagaagctgagcatcctggagaaggaggacgagaccgaggtgcaggagagcaagaaggcctgcatgttcgagcccctgcccatcaagctgagcaagagcatcgccagccagaccgacggcaccctgaagatcagcagcagcaaccagaccccccagatcctggtgaagaacgccggcatccagatcaacctgcagagcgagtgcagcagcgaggaggtgaccgagatcatcagccagttcaccgagaagatcgagaagatgcaggagctgcacgccgccgagatcctggacatggagagcagacacatcagcgagaccgagaccctgaagagagagcactacgtggccgtgcagctgctgaaggaggagtgcggcaccctgaaggccgtgatccagtgcctgagaagcaaggagggcagcagcatccccgagctggcccacagcgacgcctaccagaccagagagatctgcagcagcgacagcggcagcgactggggccagggcatctacctgacccacagccagggcttcgacatcgccagcgagggcagaggcgaggagagcgagagcgccaccgacagcttccccaagaagatcaagggcctgctgagagccgtgcacaacgagggcatgcaggtgctgagcctgaccgagagcccctacagcgacggcgaggaccacagcatccagcaggtgagcgagccctggctggaggagagaaaggcctacatcaacaccatcagcagcctgaaggacctgatcaccaagatgcagctgcagagagaggccgaggtgtacgacagcagccagagccacgagagcttcagcgactggagaggcgagctgctgctggccctgcagcaggtgttcctggaggagagaagcgtgctgctggccgccttcagaaccgagctgaccgccctgggcaccaccgacgccgtgggcctgctgaactgcctggagcagagaatccaggagcagggcgtggagtaccaggccgccatggagtgcctgcagaaggccgacagaagaagcctgctgagcgagatccaggccctgcacgcccagatgaacggcagaaagatcaccctgaagagagagcaggagagcgagaagcccagccaggagctgctggagtacaacatccagcagaagcagagccagatgctggagatgcaggtggagctgagcagcatgaaggacagagccaccgagctgcaggagcagctgagcagcgagaagatggtggtggccgagctgaagagcgagctggcccagaccaagctggagctggagaccaccctgaaggcccagcacaagcacctgaaggagctggaggccttcagactggaggtgaaggacaagaccgacgaggtgcacctgctgaacgacaccctggccagcgagcagaagaagagcagagagctgcagtgggccctggagaaggagaaggccaagctgggcagaagcgaggagagagacaaggaggagctggaggacctgaagttcagcctggagagccagaagcagagaaacctgcagctgaacctgctgctggagcagcagaagcagctgctgaacgagagccagcagaagatcgagagccagagaatgctgtacgacgcccagctgagcgaggagcagggcagaaacctggagctgcaggtgctgctggagagcgagaaggtgagaatcagagagatgagcagcaccctggacagagagagagagctgcacgcccagctgcagagcagcgacggcaccggccagagcagaccccccctgcccagcgaggacctgctgaaggagctgcagaagcagctggaggagaagcacagcagaatcgtggagctgctgaacgagaccgagaagtacaagctggacagcctgcagaccagacagcagatggagaaggacagacaggtgcacagaaagaccctgcagaccgagcaggaggccaacaccgagggccagaagaagatgcacgagctgcagagcaaggtggaggacctgcagagacagctggaggagaagagacagcaggtgtacaagctggacctggagggccagagactgcagggcatcatgcaggagttccagaagcaggagctggagagagaggagaagagagagagcagaagaatcctgtaccagaacctgaacgagcccaccacctggagcctgaccagcgacagaaccagaaactgggtgctgcagcagaagatcgagggcgagaccaaggagagcaactacgccaagctgatcgagatgaacggcggcggcaccggctgcaaccacgagctggagatgatcagacagaagctgcagtgcgtggccagcaagctgcaggtgctgccccagaaggccagcgagagactgcagttcgagaccgccgacgacgaggacttcatctgggtgcaggagaacatcgacgagatcatcctgcagctgcagaagctgaccggccagcagggcgaggagcccagcctggtgagccccagcaccagctgcggcagcctgaccgagagactgctgagacagaacgccgagctgaccggccacatcagccagctgaccgaggagaagaacgacctgagaaacatggtgatgaagctggaggagcagatcagatggtacagacagaccggcgccggcagagacaacagcagcagattcagcctgaacggcggcgccaacatcgaggccatcatcgccagcgagaaggaggtgtggaacagagagaagctgaccctgcagaagagcctgaagagagccgaggccgaggtgtacaagctgaaggccgagctgagaaacgacagcctgctgcagaccctgagccccgacagcgagcacgtgaccctgaagagaatctacggcaagtacctgagagccgagagcttcagaaaggccctgatctaccagaagaagtacctgctgctgctgctgggcggcttccaggagtgcgaggacgccaccctggccctgctggccagaatgggcggccagcccgccttcaccgacctggaggtgatcaccaacagacccaagggcttcaccagattcagaagcgccgtgagagtgagcatcgccatcagcagaatgaagttcctggtgagaagatggcacagagtgaccggcagcgtgagcatcaacatcaacagagacggcttcggcctgaaccagggcgccgagaagaccgacagcttctaccacagcagcggcggcctggagctgtacggcgagcccagacacaccacctacagaagcagaagcgacctggactacatcagaagccccctgcccttccagaacagataccccggcacccccgccgacttcaaccccggcagcctggcctgcagccagctgcagaactacgaccccgacagagccctgaccgactacatcaccagactggaggccctgcagagaagactgggcaccatccagagcggcagcaccacccagttccacgccggcatgagaagatag

SEQ ID NO: 158974 - protein, 229 aa, Artificial Sequence
  derived and/or modified sequence
MTPQLLLALVLWASCPPCSGRKGPPAALTLPRVQCRASRYPIAVDCSWTLPPAPNSTSPVSFIATYRLGMAARGHSWPCLQQTPTSTSCTITDVQLFSMAPYVLNVTAVHPWGSSSSFVPFITEHIIKPDPPEGVRLSPLAERQLQVQWEPPGSWPFPEIFSLKYWIRYKRQGAARFHRVGPIEATSFILRAVRPRARYYVQVAAQDLTDYGELSDWSLPATATMSLGK

SEQ ID NO: 158975 - protein, 209 aa, Artificial Sequence
  derived and/or modified sequence
RKGPPAALTLPRVQCRASRYPIAVDCSWTLPPAPNSTSPVSFIATYRLGMAARGHSWPCLQQTPTSTSCTITDVQLFSMAPYVLNVTAVHPWGSSSSFVPFITEHIIKPDPPEGVRLSPLAERQLQVQWEPPGSWPFPEIFSLKYWIRYKRQGAARFHRVGPIEATSFILRAVRPRARYYVQVAAQDLTDYGELSDWSLPATATMSLGK

SEQ ID NO: 158976 - protein, 669 aa, Artificial Sequence
  derived and/or modified sequence
MTPQLLLALVLWASCPPCSGRKGPPAALTLPRVQCRASRYPIAVDCSWTLPPAPNSTSPVSFIATYRLGMAARGHSWPCLQQTPTSTSCTITDVQLFSMAPYVLNVTAVHPWGSSSSFVPFITEHIIKPDPPEGVRLSPLAERQLQVQWEPPGSWPFPEIFSLKYWIRYKRQGAARFHRVGPIEATSFILRAVRPRARYYVQVAAQDLTDYGELSDWSLPATATMSLGKGGGSGGGSGGGSGGGSRNLPVATPDPGMFPCLHHSQNLLRAVSNMLQKARQTLEFYPCTSEEIDHEDITKDKTSTVEACLPLELTKNESCLNSRETSFITNGSCLASRKTSFMMALCLSSIYEDLKMYQVEFKTMNAKLLMDPKRQIFLDQNMLAVIDELMQALNFNSETVPQKSSLEEPDFYKTKIKLCILLHAFRIRAVTIDRVMSYLNASDKTHTCPPCPAPELLGGPSVFLFPPKPKDQLMISRTPEVTCVVVDVSHEDPEVKFNWYVDGVEVHNAKTKPREEQYNSTYRVVSVLTVLHQDWLNGKEYKCKVSNKALPAPIEKTISKAKGQPREPQVYTLPPSREEMTKNQVSLTCLVKGFYPSDIAVEWESNGQPENNYKTTPPVLDSDGSFFLYSKLTVDKSRWQQGNVFSCSVLHEALHNHYTQKSLSLSPGK

SEQ ID NO: 158977 - DNA, 690 bp, Artificial Sequence
  derived and/or modified sequence
atgaccccccagctgctgctggccctggtgctgtgggccagctgccccccctgcagcggcagaaagggcccccccgccgccctgaccctgcccagagtgcagtgcagagccagcagataccccatcgccgtggactgcagctggaccctgccccccgcccccaacagcaccagccccgtgagcttcatcgccacctacagactgggcatggccgccagaggccacagctggccctgcctgcagcagacccccaccagcaccagctgcaccatcaccgacgtgcagctgttcagcatggccccctacgtgctgaacgtgaccgccgtgcacccctggggcagcagcagcagcttcgtgcccttcatcaccgagcacatcatcaagcccgacccccccgagggcgtgagactgagccccctggccgagagacagctgcaggtgcagtgggagccccccggcagctggcccttccccgagatcttcagcctgaagtactggatcagatacaagagacagggcgccgccagattccacagagtgggccccatcgaggccaccagcttcatcctgagagccgtgagacccagagccagatactacgtgcaggtggccgcccaggacctgaccgactacggcgagctgagcgactggagcctgcccgccaccgccaccatgagcctgggcaagtag

SEQ ID NO: 158978 - DNA, 690 bp, Artificial Sequence
  derived and/or modified sequence
atgacccctcaactcctactggctttagtgctgtgggccagctgcccgccatgctccgggaggaaagggcctccagccgctctaacattgcctagagtccagtgtcgggcgtcacgctatccaatcgctgtcgattgctcgtggaccttaccaccagcccccaacagtaccagcccagtctccttcatagccacttaccggctggggatggctgctcgcggccactcatggccctgcctccagcagaccccaaccagtactagctgtaccataactgacgtccaactctttagtatggctccctatgtgctgaatgtaactgccgtgcatccttgggggagctcgtcatctttcgtgcccttcattactgagcacataatcaagccagacccacctgagggcgtgcggttaagtccactggctgagcgccagctccaggtgcaatgggagccccctggttcgtggccatttcccgaaatctttagtctcaagtactggattagatacaagagacagggcgccgcacggttccacagagtcggacccattgaggcaacaagcttcatccttcgtgctgtacgcccccgggcaaggtactacgttcaggtcgccgcccaggatctcaccgattatggggaactttctgactggagcctgccagccactgctacaatgagcttaggaaagtag

SEQ ID NO: 158979 - DNA, 690 bp, Artificial Sequence
  derived and/or modified sequence
atgaccccccagctgctgctggccctggtgctgtgggccagctgccccccctgcagcggcaggaagggccccccagctgccctgaccctgccccgggtgcagtgccgggccagccgctaccccatcgctgtggactgctcctggaccctgcccccagcccccaacagcaccagccctgtgtccttcatcgccacctaccgcctgggcatggccgcccggggccacagctggccctgcctgcagcagacccccaccagcaccagctgcaccatcacagatgtgcagctgttctccatggccccctacgtgctgaatgtgacagctgtgcacccctggggcagcagcagcagctttgtgcccttcatcacagagcacatcatcaagccagaccccccagagggcgtgcggctgagccccctggccgagcggcagctgcaggtgcagtgggagcccccaggctcctggcccttccctgagatcttcagcctgaagtactggatccgctacaagaggcagggcgccgcccgcttccaccgggtgggccccatcgaggccaccagcttcatcctgcgggctgtgcggccccgggcccgctactacgtgcaggtggccgcccaggacctgacagattatggagagctgagtgactggagcctgcctgccacagccaccatgagcctgggcaagtag

SEQ ID NO: 158980 - DNA, 690 bp, Artificial Sequence
  derived and/or modified sequence
atgaccccccagctgctgctggccctggtgctgtgggccagctgcccaccatgttccggtaggaagggcccccccgctgccttgacgctccccagggtccaatgcagagcaagccggtaccctatagccgtagactgtagctggacactgcccccggctccaaatagcacatcccctgtaagcttcatcgccacataccggttagggatggctgcaagaggccactcgtggccctgtctccagcagactcctacatccacgagctgcaccattaccgacgtgcagctattcagcatggccccttatgtgttgaatgtgaccgccgtacatccatgggggagcagttcctccttcgtgcccttcattaccgagcacatcatcaagcctgatcctccggagggcgtgcgactgtctccacttgctgaacggcaacttcaagttcagtgggagcctcccggcagttggccctttcctgagattttcagcctcaagtattggatccggtataagcgccagggtgctgcgcggtttcatagggtaggccctatcgaggctacatcatttattttgagggccgtgcggccgcgcgcaagatattacgttcaggtggctgcccaagatcttacagactatggcgagttatccgattggagcctaccagccaccgctactatgtctctggggaaatag

SEQ ID NO: 158981 - DNA, 690 bp, Artificial Sequence
  derived and/or modified sequence
atgactccacaactgctcctagctctggtcctttgggccagctgccccccatgctccggaagaaagggaccccctgctgctctgacactgccgagggtgcagtgccgggcaagtcggtatcccatagccgtggattgcagctggactctccccccagccccaaacagtacctctcccgtgtcttttatcgcgacctaccgcctcggcatggctgctaggggccactcctggccttgccttcagcagacccccacaagcactagctgcactatcacggacgttcaattgttctccatggctccctatgtcctgaatgtcactgctgtccacccatggggatcttcctcctcattcgttcctttcatcaccgaacatataataaagcctgatccaccagaaggagtgcgcctaagccccctcgctgaaagacagttgcaggtgcagtgggaacccccaggctcttggccatttcctgagatcttcagcctgaaatactggattaggtacaaaaggcagggcgcagccagatttcatcgggtcggaccaattgaggccacatccttcattctcagagccgtgcgccctcgtgcgaggtactatgtacaggtggctgcccaagacctcacagattatggggagctgtctgattggagcctcccggctaccgccacaatgagtttgggtaagtag

SEQ ID NO: 158982 - DNA, 1128 bp, Artificial Sequence
  derived and/or modified sequence
ccgcagccatgaccccgcagcttctcctggcccttgtcctctgggccagctgcccgccctgcagtggaaggaaagggcccccagcagctctgacactgccccgggtgcaatgccgagcctctcggtacccgatcgccgtggattgctcctggaccctgccgcctgctccaaactccaccagccccgtgtccttcattgccacgtacaggctcggcatggctgcccggggccacagctggccctgcctgcagcagacgccaacgtccaccagctgcaccatcacggatgtccagctgttctccatggctccctacgtgctcaatgtcaccgccgtccacccctggggctccagcagcagcttcgtgcctttcataacagagcacatcatcaagcccgaccctccagaaggcgtgcgcctaagccccctcgctgagcgccagctacaggtgcagtgggagcctcccgggtcctggcccttcccagagatcttctcactgaagtactggatccgttacaagcgtcagggagctgcgcgcttccaccgggtggggcccattgaagccacgtccttcatcctcagggctgtgcggccccgagccaggtactacgtccaagtggcggctcaggacctcacagactacggggaactgagtgactggagtctccccgccactgccacaatgagcctgggcaagtagcaagggcttcccgctgcctccagacagcacctgggtcctcgccaccctaagccccgggacacctgttggagggcggatgggatctgcctagcctgggctggagtccttgctttgctgctgctgagctgccgggcaacctcagatgaccgacttttccctttgagcctcagtttctctagctgagaaatggagatgtactactctctcctttacctttacctttaccacagtgcagggctgactgaactgtcactgtgagatattttttattgtttaattagaaaagaattgttgttgggctgggcgcagtggatcgcacctgtaatcccagtcactgggaagccgacgtgggagggtagcttgaggccaggagctcgaaaccagtccgggccacacagcaagaccccatctctaaaaaattaatataaat

SEQ ID NO: 158983 - protein, 1014 aa, Artificial Sequence
  derived and/or modified sequence
MVFSVRQCGHVGRTEEVLLTFKIFLVIICLHVVLVTSLEEDTDNSSLSPPPAKLSVVSFAPSSNEVETTSLNDVTLSLLPSNETEKTKITIVKTFNASGVKPQRNICNLSSICNDSAFFRGEIMFQYDKESTVPQNQHITNGTLTGVLSLSELKRSELNKTLQTLSETYFIMCATAEAQSTLNCTFTIKLNNTMNACAVIAALERVKIRPMEHCCCSVRIPCPSSPEELEKLQCDLQDPIVCLADHPRGPPFSSSQSIPVVPRATVLSQVPKATSFAEPPDYSPVTHNVPSPIGEIQPLSPQPSAPIASSPAIDMPPQSETISSPMPQTHVSGTPPPVKASFSSPTVSAPANVNTTSAPPVQTDIVNTSSISDLENQVLQMEKALSLGSLEPNLAGEMINQVSRLLHSPPDMLAPLAQRLLKVVDDIGLQLNFSNTTISLTSPSLALAVIRVNASSFNTTTFVAQDPANLQVSLETQAPENSIGTITLPSSLMNNLPAHDMELASRVQFNFFETPALFQDPSLENLSLISYVISSSVANLTVRNLTRNVTVTLKHINPSQDELTVRCVFWDLGRNGGRGGWSDNGCSVKDRRLNETICTCSHLTSFGVLLDLSRTSVLPAQMMALTFITYIGCGLSSIFLSVTLVTYIAFEKIRRDYPSKILIQLCAALLLLNLVFLLDSWIALYKMQGLCISVAVFLHYFLLVSFTWMGLEAFHMYLALVKVFNTYIRKYILKFCIVGWGVPAVVVTIILTISPDNYGLGSYGKFPNGSPDDFCWINNNAVFYITVVGYFCVIFLLNVSMFIVVLVQLCRIKKKKQLGAQRKTSIQDLRSIAGLTFLLGITWGFAFFAWGPVNVTFMYLFAIFNTLQGFFIFIFYCVAKENVRKQWRRYLCCGKLRLAENSDWSKTATNGLKKQTVNQGVSSSSNSLQSSSNSTNSTTLLVNNDCSVHASGNGNASTERNGVSFSVQNGDVCLHDFTGKQHMFNEKEDSCNGKGRMALRRTSKRGSLHFIEQM

SEQ ID NO: 158984 - DNA, 3045 bp, Artificial Sequence
  derived and/or modified sequence
atggtgtttagcgtgcgccaatgcggccacgttggcagaactgaggaggtgctgctgacatttaagatctttctggtgatcatctgtctgcacgtcgtgctggtgacctcacttgaggaagatacagataattcttcactgtcccctcccccagctaagctgtctgttgtctcttttgccccatcctcaaacgaagttgagacgaccagtttgaatgatgttacactctctctgctgcccagtaatgagactgaaaagaccaagatcactattgttaaaaccttcaacgcgagcggggtgaagcctcagagaaacatctgcaatctgtcctctatttgcaatgattccgctttctttaggggcgagatcatgttccagtacgataaagaaagcactgtgccccaaaatcaacatattacaaacggaacactgactggcgtgcttagtttgagcgagctgaaaaggagcgaactgaacaaaacactccagactctctctgaaacctatttcattatgtgcgccactgccgaagcccagtctacccttaattgtactttcactattaaactcaacaataccatgaatgcctgtgccgtgatcgcggccttggagcgtgtcaagatccgccccatggagcactgctgctgttccgtgcggattccctgcccctcctcacctgaagagctcgagaagctgcaatgtgaccttcaagatcccatcgtctgtctggcagaccacccccgtggacccccctttagcagctcgcagagcattcccgtcgtgccacgggcgacagtgcttagccaggtgccaaaagccacatcatttgctgaaccccccgactattctccagtgactcacaacgtccctagccccataggagagatccagccactgtcccctcagcccagcgcacccattgcttcttctccagctatcgacatgccaccacagtctgagaccattagcagtccaatgccccaaactcatgtgtcaggtacaccccctcccgtgaaagcttccttctcctcaccgaccgtctccgccccagcgaatgttaacaccaccagcgctccgcccgtacagacagatattgtgaacacatcgagcatatctgatctggaaaaccaggtgttgcagatggagaaagccctgagccttggctcactcgagccaaacttggccggtgagatgattaaccaagtgtcgaggcttttacactctcctccggacatgttagcacctctggcccaaaggcttttgaaggttgtggacgacatcggcctacagttaaatttctctaatacaaccatctccttgacctctccaagcttggccctcgccgtcatcagggtcaacgcctcaagcttcaatacaacaacttttgtagctcaggaccctgctaaccttcaggtttctctcgaaacacaagcccctgagaacagtattggcacgattactctaccaagctccctgatgaataatctaccagctcacgatatggaacttgccagcagggttcagttcaattttttcgagacccctgctctgtttcaggacccctcactagagaacctctcccttatcagttatgtgatcagttcttcagttgctaacttaacagtcaggaacctcacgcggaatgtgacagtgaccctgaaacatattaacccttctcaggatgaattaaccgtaaggtgcgtgttctgggacctgggccgaaacggcggccgggggggttggtctgataacggctgcagcgtgaaggaccgacgacttaatgagaccatttgcacctgcagtcacttgacatccttcggcgttctccttgacctcagcagaactagcgttttaccggcccaaatgatggccttgaccttcattacgtacatcggctgcggactctcctccatttttctgtcagtaactctcgtgacctatatagccttcgaaaaaatacggcgcgactacccatcaaaaatcctgatccaactatgtgccgctctgctcctcttgaatctagtcttcctccttgattcatggattgccttatacaagatgcaggggctctgcatctccgtggcggtgtttctgcattattttctgttagtgtcattcacatggatgggcctggaggccttccacatgtacctggccctggtgaaggtgttcaacacctacatccggaaatacatcttaaagttttgcatcgtgggatggggggtaccagccgtagtcgtaactatcatcctcacaattagtcctgataattatgggttgggttcatacggcaagttccctaacgggagccccgatgacttttgttggattaataacaacgctgtgttctatattacggtggtgggttatttctgcgtgatttttcttcttaatgtttccatgtttatcgtggtgctggtacagctttgcaggatcaaaaagaagaaacaactgggagctcaaagaaagacttccatccaggatctccgttctattgccgggttaacatttctgctgggtataacctggggcttcgccttttttgcctggggtcctgtgaatgttaccttcatgtacctgtttgcgatctttaacacactccagggcttctttattttcatcttctactgcgtagccaaagaaaacgttaggaagcagtggaggcggtatctgtgctgtggcaagttgcgactcgccgaaaatagtgattggtccaaaactgccacgaatgggctcaagaaacagaccgtaaatcagggagtgagttcatctagtaatagcctgcagtctagtagcaactcaaccaacagcacaacactgctggtcaacaacgactgtagcgttcacgcttctggaaacgggaacgctagtacagagcgaaatggcgtctcattctctgtgcagaacggtgacgtatgtctccacgactttactggcaagcaacacatgtttaatgagaaagaggactcctgtaacggtaaagggcgtatggccctacggcggaccagcaagcgaggttctctgcacttcattgaacaaatgtag

SEQ ID NO: 158985 - DNA, 3045 bp, Artificial Sequence
  derived and/or modified sequence
atggtgttttctgtgcggcagtgtggccacgtgggccgcacagaggaggtgctgctgaccttcaagatcttcctggtgatcatctgcctgcacgtggtgctggtgaccagcctggaggaggacacagacaacagcagcctgagccccccaccagccaagctgtctgtggtgtcctttgcccccagcagcaatgaggtggagaccaccagcctgaatgatgtgaccctgagcctgctgcccagcaatgaaacagagaagaccaagatcaccatcgtgaagaccttcaatgccagcggcgtgaagccccagaggaacatctgcaacctgagcagcatctgcaatgacagcgccttcttccggggggagatcatgttccagtatgacaaggagagcacagtgccccagaaccagcacatcaccaacggcaccctgactggagtgctgagcctgtctgagctgaagaggtctgagctgaacaagaccctgcagaccctgtctgagacctacttcatcatgtgtgccacagctgaggcccagagcaccctgaactgcaccttcaccatcaagctgaacaacaccatgaatgcctgtgctgtgattgctgccctggagcgggtgaagatccggcccatggagcactgctgctgcagcgtgcgcatcccctgccccagcagccctgaggagctggagaagctgcagtgtgacctgcaggaccccatcgtgtgcctggccgaccacccccggggcccccccttcagcagcagccagagcatccctgtggtgccccgggccaccgtgctgagccaggtgcccaaggccaccagctttgctgagcccccagactacagccctgtgacccacaacgtgcccagccccatcggggagatccagcccctgagcccccagcccagcgcccccatcgccagcagccctgccatcgacatgccaccccagagcgagaccatcagcagccccatgccccagacccacgtgtctggcaccccacctcctgtgaaggccagcttcagcagccccaccgtgtctgccccagccaacgtgaacaccaccagcgcccctcctgtgcagacagacatcgtgaacaccagcagcatcagtgacctggagaaccaggtgctgcagatggagaaggccctgagcctgggcagcctggagcccaacctggccggggagatgatcaaccaggtgtcccggctgctgcacagccccccagacatgctggcccccctggcccagaggctgctgaaggtggtggatgacatcggcctgcagctgaacttcagcaacaccaccatcagcctgaccagccccagcctggccctggccgtcatccgggtgaatgccagcagcttcaacaccaccacctttgtggcccaggaccctgccaacctgcaggtgtccctggagacccaggcccctgagaacagcatcggcaccatcaccctgcccagcagcctgatgaacaacctgcctgcccatgacatggagctggccagccgggtgcagttcaacttctttgagaccccagccctcttccaggaccccagcctggagaacctgagcctcatctcctatgtgatcagcagctctgtggccaacctgactgtgaggaacctgaccagaaatgtgacagtgaccctgaagcacatcaaccccagccaggatgagctgactgtgcgctgtgtgttctgggacctgggcagaaatggaggccggggcggctggagcgacaatggctgcagcgtgaaggaccggcggctgaatgagaccatctgcacctgcagccacctgaccagctttggagtgctgctggacctgagcaggacctctgtgctgcctgcccagatgatggccctgaccttcatcacctacatcggctgcggcctgagcagcatcttcctgtctgtgaccctggtgacctacatcgcctttgagaagatccggcgggactaccccagcaagatcctgatccagctgtgtgccgccctgctgctgctgaacctggtgttcctgctggacagctggatcgccctgtacaagatgcagggcctgtgcatctctgtggccgtgttcctgcactacttcctgctggtgtccttcacctggatgggcctggaggccttccacatgtacctggccctggtgaaggtgttcaacacctacatcaggaagtacatcctgaagttctgcatcgtgggctggggcgtgcctgctgtggtggtgaccatcatcctgaccatcagcccagacaactacggcctgggcagctatggcaagttccccaacggcagcccagatgacttctgctggatcaacaacaatgctgtgttctacatcaccgtggtgggctacttctgtgtgatcttcctgctgaatgtgtccatgtttattgtggtgctggtgcagctgtgccgcatcaagaagaagaagcagctgggcgcccagaggaagaccagcatccaggacctgcggagcattgctggcctgaccttcctgctgggcatcacctggggctttgccttctttgcctggggccctgtgaatgtgaccttcatgtacctgtttgccatcttcaacaccctgcagggcttcttcatcttcatcttctactgtgtggccaaggaaaatgtgaggaagcagtggaggcgctacctgtgctgcggcaagctgcggctggccgagaacagcgactggagcaagacagccaccaacggcctgaagaagcagacagtgaaccagggcgtgagcagcagcagcaacagcctgcagagcagcagcaacagcaccaacagcaccaccctgctggtgaacaatgactgcagcgtgcacgccagcggaaatggaaatgccagcacagaaagaaatggagtgtccttctctgtgcagaatggagatgtgtgcctgcatgacttcaccgggaagcagcacatgtttaatgagaaggaggacagctgcaatggcaagggccgcatggccctgcggaggaccagcaagaggggcagcctgcacttcatcgagcagatgtag

SEQ ID NO: 158986 - DNA, 3045 bp, Artificial Sequence
  derived and/or modified sequence
atggtgttcagcgtgcggcagtgcggccacgtgggccggaccgaggaggtcctgttaaccttcaagatctttctggtaatcatatgcctgcatgtggtattggttaccagtctggaggaagataccgacaactcctccctcagccctcctccagccaaactaagcgtggtgtccttcgccccctcctccaatgaggtggaaactactagtttgaatgacgtgaccctctcattattaccatccaatgaaacagaaaagaccaaaatcaccatcgtgaagacattcaacgcctccggtgtgaagcctcagagaaacatctgcaatctgtcctctatttgtaatgactctgcctttttcaggggagagattatgttccaatatgacaaggaaagcactgtaccccagaaccagcacatcactaacggtacactgaccggtgtgctgtcactgagcgaactcaagcggtcagaactgaacaagactctgcaaactctttctgagacttactttattatgtgtgccacagctgaggcccagtccacgctgaattgcacatttacaatcaaactcaacaatactatgaatgcatgcgcagtgatagcagccctcgagagagttaagatacgtccaatggaacactgctgttgttccgtccgcattccttgtccttcatcccctgaagaacttgaaaagctgcagtgtgatcttcaggatcctatcgtgtgtctggccgaccatccccggggccctcccttctcctcttcccagagcatcccagtcgtgccacgagcaacagtcctctcacaggtgcctaaggccaccagctttgccgagccccccgactatagcccagtgacccacaatgtgccatccccgattggggagatacagccactgtcacctcagccaagcgctccaattgcttcctccccagcaatcgatatgcctccacagagtgagactatctcatcacccatgccccagacacacgtatccggtacccccccgcccgtcaaagcttcctttagcagccctaccgtgtcagcacccgctaatgtgaataccaccagcgccccgcccgtccaaacagacatcgtgaatacctcatcgatttctgacttggaaaaccaggtgctgcagatggagaaggccctgtcacttggcagccttgagccaaacctggcaggggagatgatcaatcaagtgtctcggttgctgcactccccccctgacatgttagcgcctctggcacagcgcctgctgaaagtcgtggacgacataggcctgcagctcaatttctccaataccaccatcagtttgacatctccctccctcgctcttgccgtcattagggtgaacgcctctagctttaacacgacaactttcgtggctcaggacccggctaacctgcaagtgtcactggagactcaagcacctgaaaattccattggcacaataacgctaccctcatctttgatgaacaatttgcctgctcacgatatggagctggcatcaagggtgcagtttaatttttttgaaacacccgctttgtttcaggacccttccctagagaatttatctttgataagctacgtgatcagctcaagtgtggcgaacttgactgtcaggaacctcacccggaacgttaccgtgacactcaagcatataaatccctcccaggacgaactcacggtgagatgcgtgttttgggatctggggcgcaatggcgggcgcggaggttggagtgacaacgggtgcagtgtgaaagataggagacttaatgagaccatctgcacttgtagtcacctgaccagcttcggcgtcctccttgatctgtcccggacatccgtgttgcctgcccagatgatggctcttacttttattacctacataggctgtggtctctcatccatttttctttccgtcaccttggttacctatatcgcgtttgaaaagatacggcgcgactacccaagtaaaattctgattcagctgtgtgctgccctgctcctcctgaatcttgtcttcctgctggatagttggattgccctgtataagatgcagggtctgtgcatctctgtcgcagtttttctgcattacttcctgcttgtttcgttcacttggatgggactggaggcattccatatgtatctggccctcgtcaaggtgttcaacacttacatccgaaagtacatcctcaaattctgtatcgtgggatggggagtgccagcagtcgtggttacaattatactcacaatcagtcccgacaactacggactcggatcatacggcaagttccctaatgggagtccggatgacttttgctggatcaacaacaatgcagtgttctatatcactgttgtgggctatttttgcgtgatttttctcctgaatgtttccatgttcatcgtggtgctcgtgcagctttgtagaatcaagaaaaaaaaacagttgggtgcccagcgaaaaacctccattcaggacctgagatcgatcgcgggtttgacttttctcctaggcatcacctggggatttgcttttttcgcttggggccccgttaacgtgactttcatgtacttatttgccatctttaatacactgcagggcttcttcatttttatcttttattgcgtagcaaaggaaaatgtgcgcaagcagtggcggcgctatctctgttgtggcaaactccggctggccgagaacagcgactggtctaaaactgccacaaatggactgaagaagcagaccgtgaaccaaggtgttagctcatcctcaaattctcttcagagttcaagcaattctactaacagtactactttgttagtgaacaacgactgcagcgtgcatgcctctgggaacggtaatgcttccactgagaggaatggggtctccttttccgtccagaatggcgatgtgtgtctacacgattttacgggcaagcagcatatgttcaatgagaaggaggattcatgtaatgggaaaggcaggatggccctgcgcaggacatcaaagcggggatccctgcacttcattgagcagatgtag

SEQ ID NO: 158987 - DNA, 3045 bp, Artificial Sequence
  derived and/or modified sequence
atggtgttctccgtcagacagtgtgggcacgtgggtcgaaccgaagaagttctgctcaccttcaaaatattccttgtcatcatatgtttgcacgtggtgctcgtgacctcactggaggaggataccgacaactcctcattatccccacctccagccaagctcagcgtggtgtccttcgccccttcatcgaacgaagtggagactacttcactaaatgacgtgactctgtccctgctgccgtctaatgagactgagaagaccaaaattaccattgtgaaaacattcaacgcatctggagtgaaacctcaacggaatatctgtaatctgagtagcatctgtaatgactccgcattttttagaggggaaatcatgtttcagtacgataaagaatctactgtaccacagaaccagcacatcaccaacggcacgctcacgggcgtactgtccctatccgagttaaaaaggagcgagctgaataagaccttgcaaacgctgtcggagacctactttattatgtgtgccacggccgaggcacagagtaccctgaattgtactttcaccatcaaacttaacaacactatgaatgcctgcgccgttatcgccgcattggagcgtgtcaaaattcggccaatggagcactgttgttgtagtgtcaggatcccctgccccagcagccccgaggaattggagaagctgcaatgtgatctgcaagatccaatcgtgtgtctcgctgaccaccccagggggccacctttcagttccagtcagtctattcccgttgttccacgggcaacagttctgtcccaagtccccaaggccacatccttcgctgaaccgccagattactccccagtgacccacaatgtgcctagtccaatcggtgagattcaacccctgtcaccccagccctcggcccctatcgccagcagccctgctatcgatatgcctccccaatcagagaccataagttcacctatgccacagactcatgtgagcggcaccccaccccctgttaaggccagtttttcgagcccaacggtgtctgcccctgccaatgtaaacactacaagtgcccctcccgttcagactgacattgtcaacacctcctctatttcagaccttgaaaatcaggttctacaaatggaaaaggcactctcgcttggttcgcttgagcccaacctggcgggagagatgatcaaccaggtgtctcgactcctgcactcaccccctgatatgctagcacccctggcacagcgactgctgaaagtagtggacgacataggcctacaactgaacttctctaatacaactatctccctaacttccccttctctggccctggcagtgattagagtcaatgcgtcaagcttcaataccaccactttcgtcgcccaggatccggcaaatctgcaggtgagtctagaaactcaggccccagaaaattccattggtaccatcacactcccctccagtttaatgaacaaccttccagcccatgacatggagttggccagtcgtgtgcaatttaatttctttgaaacacccgcattattccaagacccatctctggagaatttgagccttatctcatatgtcatttctagcagcgtggcgaatctgacagtgcgaaacttgaccagaaatgtgacagtgacgctgaaacacatcaatcccagtcaggatgagctgactgttcgatgtgtgttttgggacctcggtcgaaacggtggaaggggtggttggagcgataatggctgctcagtaaaggaccggagattgaacgaaacaatctgtacatgctcccatctgacctctttcggtgtcctgcttgatctgtcacgcacttcagtgttgcccgctcaaatgatggcgcttacctttatcacttacataggatgcggactgtcttcgatcttcttatctgtgactctggtcacatatatagcgttcgagaagataagaagagattacccatcaaagatcctgatccagttgtgcgctgcccttttgcttctcaatctggtgtttttgctggactcctggattgccctctacaagatgcaaggtctttgcataagcgtcgcagtgtttctccattacttcttgctggtttcatttacctggatgggcctggaggcctttcatatgtacctcgccctggtgaaagtcttcaacacatacatcagaaagtacatccttaaattttgcattgtcggatggggggtacccgcagtagttgtgactataatcctgactatttctccagataactacggtttgggcagctatggcaagtttcccaatgggagccccgacgatttctgttggattaataataatgccgtgttttacattacagtcgtcggctatttctgcgtgatttttctgctgaacgtttctatgttcattgtggtattagttcagctgtgccggattaaaaaaaaaaaacagctcggtgctcaacgaaagaccagtatccaagatctgaggtctattgcaggtctgacattcctgttaggaattacatggggttttgccttcttcgcatggggccctgtcaatgtgacctttatgtacctttttgcaatatttaatacactgcaaggtttctttatattcattttctactgtgtggctaaagagaacgtgcggaaacagtggcggaggtatctgtgctgtgggaagttgcgcctcgcggagaatagtgactggtcgaagaccgctacaaacggcctgaaaaagcagacagtgaaccagggtgtgtcctcttcttcaaactccctccagtcgtccagcaatagtacgaattcgacaacgctccttgttaacaatgattgcagcgtgcatgccagcggtaacggaaacgcgtccaccgaaaggaacggcgtatctttctcagtgcaaaatggagacgtgtgtctacacgatttcaccggcaagcagcacatgttcaacgagaaggaagattcctgcaacggcaagggcagaatggcattaagacgtacctccaagagaggctccctgcatttcatcgagcagatgtag

SEQ ID NO: 158988 - DNA, 3045 bp, Artificial Sequence
  derived and/or modified sequence
atggtgttcagcgtgagacagtgcggccacgtgggcagaaccgaggaggtgctgctgaccttcaagatcttcctggtgatcatctgcctgcacgtggtgctggtgaccagcctggaggaggacaccgacaacagcagcctgagccccccccccgccaagctgagcgtggtgagcttcgcccccagcagcaacgaggtggagaccaccagcctgaacgacgtgaccctgagcctgctgcccagcaacgagaccgagaagaccaagatcaccatcgtgaagaccttcaacgccagcggcgtgaagccccagagaaacatctgcaacctgagcagcatctgcaacgacagcgccttcttcagaggcgagatcatgttccagtacgacaaggagagcaccgtgccccagaaccagcacatcaccaacggcaccctgaccggcgtgctgagcctgagcgagctgaagagaagcgagctgaacaagaccctgcagaccctgagcgagacctacttcatcatgtgcgccaccgccgaggcccagagcaccctgaactgcaccttcaccatcaagctgaacaacaccatgaacgcctgcgccgtgatcgccgccctggagagagtgaagatcagacccatggagcactgctgctgcagcgtgagaatcccctgccccagcagccccgaggagctggagaagctgcagtgcgacctgcaggaccccatcgtgtgcctggccgaccaccccagaggcccccccttcagcagcagccagagcatccccgtggtgcccagagccaccgtgctgagccaggtgcccaaggccaccagcttcgccgagccccccgactacagccccgtgacccacaacgtgcccagccccatcggcgagatccagcccctgagcccccagcccagcgcccccatcgccagcagccccgccatcgacatgcccccccagagcgagaccatcagcagccccatgccccagacccacgtgagcggcacccccccccccgtgaaggccagcttcagcagccccaccgtgagcgcccccgccaacgtgaacaccaccagcgccccccccgtgcagaccgacatcgtgaacaccagcagcatcagcgacctggagaaccaggtgctgcagatggagaaggccctgagcctgggcagcctggagcccaacctggccggcgagatgatcaaccaggtgagcagactgctgcacagcccccccgacatgctggcccccctggcccagagactgctgaaggtggtggacgacatcggcctgcagctgaacttcagcaacaccaccatcagcctgaccagccccagcctggccctggccgtgatcagagtgaacgccagcagcttcaacaccaccaccttcgtggcccaggaccccgccaacctgcaggtgagcctggagacccaggcccccgagaacagcatcggcaccatcaccctgcccagcagcctgatgaacaacctgcccgcccacgacatggagctggccagcagagtgcagttcaacttcttcgagacccccgccctgttccaggaccccagcctggagaacctgagcctgatcagctacgtgatcagcagcagcgtggccaacctgaccgtgagaaacctgaccagaaacgtgaccgtgaccctgaagcacatcaaccccagccaggacgagctgaccgtgagatgcgtgttctgggacctgggcagaaacggcggcagaggcggctggagcgacaacggctgcagcgtgaaggacagaagactgaacgagaccatctgcacctgcagccacctgaccagcttcggcgtgctgctggacctgagcagaaccagcgtgctgcccgcccagatgatggccctgaccttcatcacctacatcggctgcggcctgagcagcatcttcctgagcgtgaccctggtgacctacatcgccttcgagaagatcagaagagactaccccagcaagatcctgatccagctgtgcgccgccctgctgctgctgaacctggtgttcctgctggacagctggatcgccctgtacaagatgcagggcctgtgcatcagcgtggccgtgttcctgcactacttcctgctggtgagcttcacctggatgggcctggaggccttccacatgtacctggccctggtgaaggtgttcaacacctacatcagaaagtacatcctgaagttctgcatcgtgggctggggcgtgcccgccgtggtggtgaccatcatcctgaccatcagccccgacaactacggcctgggcagctacggcaagttccccaacggcagccccgacgacttctgctggatcaacaacaacgccgtgttctacatcaccgtggtgggctacttctgcgtgatcttcctgctgaacgtgagcatgttcatcgtggtgctggtgcagctgtgcagaatcaagaagaagaagcagctgggcgcccagagaaagaccagcatccaggacctgagaagcatcgccggcctgaccttcctgctgggcatcacctggggcttcgccttcttcgcctggggccccgtgaacgtgaccttcatgtacctgttcgccatcttcaacaccctgcagggcttcttcatcttcatcttctactgcgtggccaaggagaacgtgagaaagcagtggagaagatacctgtgctgcggcaagctgagactggccgagaacagcgactggagcaagaccgccaccaacggcctgaagaagcagaccgtgaaccagggcgtgagcagcagcagcaacagcctgcagagcagcagcaacagcaccaacagcaccaccctgctggtgaacaacgactgcagcgtgcacgccagcggcaacggcaacgccagcaccgagagaaacggcgtgagcttcagcgtgcagaacggcgacgtgtgcctgcacgacttcaccggcaagcagcacatgttcaacgagaaggaggacagctgcaacggcaagggcagaatggccctgagaagaaccagcaagagaggcagcctgcacttcatcgagcagatgtag

SEQ ID NO: 158989 - protein, 475 aa, Artificial Sequence
  derived and/or modified sequence
MAELQMLLEEEIPGGRRALFDSYTNLERVADYCENNYIQSADKQRALEETKAYTTQSLASVAYLINTLANNVLQMLDIQASQLRRMESSINHISQTVDIHKEKVARREIGILTTNKNTSRTHKIIAPANLERPVRYIRKPIDYTILDDIGHGVKVSTQNMKMGGLPRTTPPTQKPPSPPMSGKGTLGRHSPYRTLEPVRPPVVPNDYVPSPTRNMAPSQQSPVRTASVNQRNRTYSSSGSSGGSHPSSRSSSRENSGSGSVGVPIAVPTPSPPSVFPGHPVQFYSMNRPASRHTPPTIGGSLPYRRPPSITSQTSLQNQMNGGPFYSQNPVSLAPPPPSILQVTPQLPLMGFVARVQENISDTPPPPPPVEEPVFDESPPPPPPPEDYEEEEAAVVEYSDPYAEEDPPWAPRSYLEKVVAIYDYTKDKEDELSFQEGAIIYVIKKNDDGWYEGVMNGVTGLFPGNYVESIMHYSE

SEQ ID NO: 158990 - DNA, 1428 bp, Artificial Sequence
  derived and/or modified sequence
atggctgagctacagatgttactggaggaagagattccaggggggagacgggcacttttcgactcctacaccaatctagaaagggtggccgactactgcgagaataattatatacagagcgctgataaacagcgagcgctggaagagactaaggcttacactacacagagcctggccagcgtggcctacctcatcaacacgctggccaacaacgtcttacaaatgctagacatccaggcaagccaattacgacgtatggagagctcgatcaaccatatcagccagactgtcgatattcataaggagaaggtcgccaggcgcgagatcgggatcttaaccactaacaaaaatactagccgtacccacaaaataattgcacccgccaatcttgagcggccagttcgttacattagaaagcctatcgactacactatcctggatgatattgggcacggagtgaaggtgtccacgcagaacatgaaaatgggaggcctgcctcgcaccacccccccaacccagaaacctcccagtccacctatgagcgggaaaggtaccctcggccgccattcaccgtaccgtacactcgagcccgtcagacctcccgtcgtcccgaatgattacgtgcctagtcctacccggaacatggccccctcccaacagagtcccgtgaggactgcttctgtcaatcagcgaaatcggacttatagctcttcgggctccagcggggggagccaccccagctcacggtcaagctccagggaaaacagtggaagcggatccgtgggagtacccattgccgttccaaccccatctccccctagtgtgtttcctggtcaccctgtgcaattttactccatgaacaggcccgcatcccgccacacccccccaacaattgggggctctctgccatatcgaaggcccccctcaataactagtcaaactagcttgcagaaccagatgaacggaggacccttttattcccagaaccctgtatccctggccccaccccctccatccatactccaggttacccctcagctcccactgatggggttcgtggcccgggtgcaggagaatataagcgacaccccaccgccccccccccctgttgaggagccggtgtttgatgaatccccaccaccacccccaccacctgaggattacgaggaggaagaagctgcagtcgtcgaatacagtgatccatatgcagaggaagaccccccctgggcccccagatcttacctggaaaaggtggtggccatctacgattatactaaagacaaagaggatgagttaagcttccaggagggggccataatctacgtgataaagaagaacgatgatggctggtacgagggagtgatgaatggggtgaccgggctttttcccggcaactatgtggagtccatcatgcattactcagagtag

SEQ ID NO: 158991 - DNA, 1428 bp, Artificial Sequence
  derived and/or modified sequence
atggccgagctgcagatgctgctggaggaggagatccctgggggccggcgggccctgtttgacagctacaccaacctggagcgggtggccgactactgtgagaacaactacatccagagcgctgacaagcagagggccctggaggagaccaaggcctacaccacccagagcctggcctctgtggcctacctgatcaacaccctggccaacaacgtgctgcagatgctggacatccaggccagccagctgcggaggatggagagcagcatcaaccacatcagccagacagtggacatccacaaggagaaggtggcccggcgggagatcggcatcctgaccaccaacaagaacaccagcaggacccacaagatcatcgccccagccaacctggagaggcctgtgcgctacatcaggaagcccatcgactacaccatcctggatgacattggacatggagtgaaggtgtccacccagaacatgaagatgggcggcctgcccaggaccaccccacccacccagaagccacccagcccccccatgtctgggaagggcaccctgggccgccacagcccctaccgcaccctggagcctgtgcggccccctgtggtgcccaatgactatgtgcccagccccaccaggaacatggcccccagccagcagagccctgtgaggacagcctctgtgaaccagaggaacagaacctacagcagcagcggcagcagcggcggcagccaccccagcagccgcagcagcagccgggagaacagcggcagcggctctgtgggcgtgcccatcgctgtgcccacccccagcccccccagcgtcttccctggccaccctgtgcagttctacagcatgaacagacctgccagccgccacaccccacccaccatcggcggcagcctgccctacagaagacctccttccatcaccagccagaccagcctgcagaaccagatgaatggaggccccttctacagccagaaccctgtgtccctggcccctcctcctccttccatcctgcaggtgaccccccagctgcccctgatgggctttgtggcccgggtgcaggagaacatcagtgacaccccacctcctcctcctcctgtggaggagcctgtgtttgatgagagccccccacctcctcctcctcctgaggactatgaggaggaggaggccgctgtggtggagtacagcgacccctatgcagaagaagatcctccctgggcccccaggagctacctggagaaggtggtggccatctatgactacaccaaggacaaggaggatgagctgtccttccaggagggcgccatcatctacgtgatcaagaagaatgatgatggctggtatgaaggagtgatgaatggagtgacaggcctcttccctggcaactacgtggagagcatcatgcactacagcgagtag

SEQ ID NO: 158992 - DNA, 1428 bp, Artificial Sequence
  derived and/or modified sequence
atggccgagctgcagatgctgctggaggaggagatccccggcggccggcgcgctctgtttgatagctatacgaatctggagagggtggcagattactgtgagaataactacattcagagcgcagataagcaacgtgccctggaggagaccaaggcctacactacacagtcacttgccagtgtggcatatctcattaatactctagccaataacgttctccagatgctggatattcaggcatctcaactccggcggatggagtcatcaataaatcatatttcccaaaccgtggatatccacaaagaaaaagtggcaagaagggagattggcatcttgacaacgaacaaaaacaccagcaggacacacaagataattgccccagcaaatctggaacgccccgtgagatacatccgcaagccaatagattataccatcttggacgatataggacacggagtcaaggtatcaacacaaaatatgaagatgggaggactgccccgaactacgccccctactcagaaacccccgtcaccgccaatgtccggaaagggcactctgggacggcacagtccctatcggacactggagcccgtcaggccccccgtggtcccgaatgactacgtccccagccctaccaggaacatggccccgtctcaacagtctcccgtccggaccgcctcagtcaaccagagaaacaggacgtacagttctagcggttcttccggaggcagccacccctcctcccgaagttctagcagagaaaacagcgggtccggctctgtaggggttcccattgctgtgccaacaccaagccccccaagcgtatttccgggtcatcccgtccagttctactctatgaatagaccggctagtaggcatacaccccctactatcggtggtagtctgccttaccggcggcctccatcgatcaccagtcaaacatcattgcagaatcagatgaatggaggccctttctactcacaaaatcccgtctccctggctccaccacccccgagcatccttcaggtgacaccccagctcccactgatgggattcgtcgctagagtacaggagaacatttctgacacgccgcccccaccacctccggtcgaggaacccgtttttgatgaatcaccccctcctccaccgccccctgaggattacgaggaagaggaagcagcagtggttgaatattctgacccatatgctgaagaagaccctccctgggctcccagaagctacctggagaaagttgtggcgatctatgactacaccaaggacaaggaggacgagctgagcttccaggaaggagccattatttacgtgatcaaaaagaacgatgacggatggtacgaaggagtgatgaatggtgttaccggcttatttccagggaactatgtcgaaagcattatgcactacagtgagtag

SEQ ID NO: 158993 - DNA, 1428 bp, Artificial Sequence
  derived and/or modified sequence
atggccgaactgcaaatgctgttggaggaagagatccccggaggtcggagagccctattcgattcctacactaatctcgaacgggtggccgactactgtgagaacaactacatccagtctgctgacaaacagcgagccctcgaagagaccaaagcatacactacccagagtctcgcttcagttgcctacctgatcaatactctcgccaataatgtcttgcaaatgttagatatccaggcctcacagttacggagaatggagtcaagcataaatcatatctctcagaccgtggacatccataaagagaaagtggctaggagggagattgggatcctgacaactaacaagaacacttctaggacccacaagattatcgccccagccaatcttgaacggcctgtgcggtatataaggaaacctatcgattatacaatcctggatgatattggccacggtgttaaggtatccacgcaaaatatgaaaatgggtggcctcccaagaacaacgccccctactcagaaaccgcctagccctccaatgagcgggaagggcactctcggacggcattcaccttatcgcaccctggaacccgtgcgtccaccagtcgtgcctaacgactatgtgccttcgcccacccggaacatggcaccttcgcagcaatcgccagtccgcaccgcctctgtgaaccaaaggaatcggacttattcaagcagtggatcaagtggcggatctcaccccagttctcgtagctcgagccgagagaattctggctcggggagtgtgggagtaccaatcgcagtgcccacgccgtctcctccgtcagtgtttcctggacatcctgtgcaattttacagtatgaaccggccagcttctcgacacacaccgcctactatcgggggatccctgccatataggaggccaccctccatcacttcccaaacctccttgcaaaaccagatgaatggcggacccttctattcccaaaaccctgtgtcccttgcaccaccaccaccatccatactacaggtgactccccagctgccgctaatggggttcgttgcacgtgtacaggaaaatatttcggatactcctccgccaccacctccggtggaggagcctgtcttcgacgagtctccccctccccctcctcccccagaagattatgaagaagaagaagcagccgtggtggagtattctgatccttacgctgaggaggaccccccttgggccccacgcagttacctcgagaaggtagtcgccatttatgactacaccaaggataaggaggatgagctgagcttccaggaaggagccattatatatgtgattaagaagaacgatgacggatggtacgagggtgtcatgaacggggtgacggggttattcccaggcaactacgtggagagtatcatgcactactccgagtag

SEQ ID NO: 158994 - DNA, 6484 bp, Artificial Sequence
  derived and/or modified sequence
gcgcgtgcgcgcgcccggccggccgtcgccgcggtgaccgtcctcggagtccgtcggctcgcgccccgcccccgtcgccccctcccctgtcgcgcgctggggctgtttctcgctccttccgagttaccgccgccgtcgccgccgctcctcctctcccggtcctgggtttccttggcgctgcggccgccgctccctctgcgacctgtatgaggaggaggaggaggaggatgtgaagatggcggagctgcagatgctgctggaagaggaaatcccggggggccgccgggccctcttcgacagctacacaaatctggaacgggtggccgattactgcgagaacaactacatacagtcagcagataagcagagagccctagaagaaaccaaagcctacaccacccaatccttagcaagtgttgcctatctgataaacaccttggccaacaatgtcctgcagatgctggatatccaggcatcccagctacgaaggatggaatcttcaatcaatcatatttcacaaacagttgatattcataaagagaaagttgcaagaagagaaattggtattttgactaccaataaaaacacttcaaggacacataagattattgctccagccaaccttgaacgaccagttcgttatattagaaaacctattgactatacaattctagatgatattggacatggagtaaaggtgagtacccagaacatgaagatgggtgggctgccgcgtacaacacctccaactcagaagccccctagtccccctatgtcagggaaagggacacttgggcggcactccccctatcgcacactggagccagtgcgtcctccagtggtaccaaatgattacgtacctagcccaacccgtaatatggctccctcgcagcagagccctgtgaggacagcttctgtgaatcaaagaaatcgaacttacagcagcagtgggagtagtggagggagccacccaagtagtcggagcagcagtcgagagaacagtggaagtggtagtgtgggggttcctattgctgttcctactccatctcctcccagtgtctttccaggtcatcctgtacagttctacagcatgaataggcctgcctctcgccatactcccccaacaatagggggctcgttgccctatagacgccctccttccattacttcacaaacaagccttcagaatcagatgaatggaggacctttttatagccagaatccagtatctcttgctcctcctcctccctccatcctacaggtaactcctcagttacctttaatgggatttgtggccagagtccaagaaaatatttcagatacaccacctccaccgccacctgtggaagaaccagtctttgatgagtctcccccacctcctcctcctccagaagattacgaagaggaggaagctgctgtggttgagtatagtgatccttatgctgaagaggacccaccgtgggctccacgttcttacttggaaaaggttgtggcaatttatgactatacaaaagacaaggaagatgagctgtcctttcaggaaggagccattatttatgtcatcaagaagaatgacgatggttggtatgagggagttatgaatggagtgactgggctttttcctgggaattacgttgagtctatcatgcattattctgagtaaagctcagcagggctgtgcttgcctcacaggaatagtcaggtcttcccagattatctgaaggccctggggattccactccagtaaagtagaatgaaggatacaaatgataaaaattacacttttttttttggtttattccccagtattaaaaacaaagcaagctgagtctgaacaaatggatctttctgccatcatttgtacaatgctgagctgtctggattgaaataaaatgaccatttttatgtatgtcaaaggtataacagcataactgtgtagccaaaacaaaatcagattaagactgattcagaaaaatctgggatctttctcaggaatactgtatacccttgggatttctcctcctgcagaatctgtggcattggatgttcttcattgcctgtgctaaggggttaacctcatggcccagtgggtaccctagccccttcttttcttccacttgtatgaagaggagggaaccaacatttaaataccacacttaaccatttttacaattatttcagatggcttttttcctctgtgacactgtaaattctgcattctctcagcacttgagtgcaccaaacgagtgaatgctgaactcacttgcatcccttcatgtttctgtttgtggattataaggatgatgaaatgtgaaagtctcccaacactctgagggtggtgaacgattgccacccgtttgattttaatgtgctgctgcatgagactgcattgttgctaatggccagtgtacccagatgtgaagtgtggtaggctggttcatatgtggaggtgggtgtgtgaagctagacacgaaggtccctaaggttctgaagagacttgaactgtggaaatgctcttagcaggcatcccgaacccctgcttcggtgctgttttgaggagtaggatcttggagttcagaccaactatgactatcatttccttcactatctagaaaaacgctattctactttggaagagaatagtagttattttcaagtctcctgacagtcactgggagtacaaggtttgctaatgtgctctctggacgttattaatggccagtattagttgctgctgtattactgactcgcttagctgtagaaagggtaatactctcctgattttgtatgattggactcttaagtagctgctgttagtcagaattaaaacccatctcagactaagaatataatgaataagattaataggccaaaatatgtatctaatcacattgataaaaattaatataactgacacaataaaacacatttcccccatctgtacaataaatacagcttcaaattcagtggagtctgtagggcagataactttaatcatcactactgtagtcagtataagaaatgctgaaaaaaatccaggagggcttgtctctttgtgggtggtcactgtgatgttgggccagctcctgttcaggtccagagctgctaacgtgggttctactcagtcccagtgacttggccagaatagagctttgccaggtaactgccctgtgctaggtgaaaggggaaaagcagtagctggatatatttcaaatgaggttttgaacaagttcagaaagtggaacttgattgaaaagtgaacaagtgtagtagtgtgtgagaaaattcagatggtgtcggatgcagaagttaatattccacttaatgttatctgagcattaaaaatcatcagcatttaactgagaccccactatagagtttccttatcaagactttttggttttaaagttgtttttaatgcattgcaagttacaatagctattttgcttttagatttttcccagcactttgtatttattagctttcattaacttgcctccagtatacattccacttcgtgcttttcttaggtcatttctacatcccttattccttgttttcctgcagtgtaatggccctgaatgtcctctgagccttcagctccattatggacccaaactagactatacttggataagttaagctcttcttcgtgtactggtctataattagaaaaactgttttaaattagatgttcccattatttatttaaacagctttttgctgagaaagcttagtggattaatgaggcagagggtgttttgaaatccaataaatagttcccacaggctgggtgtggtggcttatgcctgtaatcccagcactttcggaggccgaggtgggtggatcatgaggtcaataaattgagaccatcctggccaacatggtgaaaccccatctctactaaaaacacaaaaattagctgggcgtggtggcgcacacctgtagtcccagctacttgggaggctgaggcaggagaatcactggaacctgggaggcagaggttgcagtgagccgagattgtgccactgcactccagcctggtgacagagcgagactccatcaaaaaaaaaaaaaaaaagttcccacagctcaccactacagaagcagggaagacaactatgcagaaaacagagttagtggcggtcagcaggaatgcagctggtcttttggacccctacgggatgggggcagtgcagaagacactggtgaagtcctttatactgaagacctgtggttgggagcaggggtagtccatgggtctgctgattttttttccctatttagtactaatgtgtgtgtgatctttgttttacaaacagtaccttttgggttttctgcatattttataatttttgtacagttttgaattctatagattgtcttggaaggatactgtgtgatgggtcaggcacacagtaattggagacttttaatgtatgtaatatttcatagattgcatgctattaatcatctgtgagggtagtattttttgttttattgtaagtttccctctttttttataaattaaaagatggttggtattaggaatttcaaatgaatgcagaaaatcttacatgctgtgtactattaatattataacagacgatccaagtccaaaatctgaccaataaagcaaccattttatcaagatagagggattctaatgggagaggggattcttccctcctgaagtttgtgtgtccagtccccttaaaaaaaatgaatagttgtcttttcttgtcatattaatactcgaaagtccatggtggtattaatgaaagtacactttattgttgcctttgaacttacggccaaggcaataaatcagaaacaaaaatagtgccaatgtgtcaaaatcgacatctgagagattcagcctcccatttggaataaatatgaatcttctaagctatcttgtttaatattttccatcatttagctacttcctatctccctcagaggcgcctgctgttcccattttagagttgacagtggcctgctaattttgctatgttcctaaaagttactgggtgtgagacattttcatcccctcctttttcctactgctggtgtttattatccagctagacaatattttatgcatatttaccgtgatgtctggaccgtacctgtgctccttggcagtttatgttgaagataactaaagatttttctctttgggaggcatcaaaatgatggtagtttgcttttatctttttatgttcattttcttttagtaggtgacctttctgcattaagaactgtttttatcttttactaccttttcttttctcctttgtggagacagcatgacatgtcctgaaggtcacctttgcctttgaaaaaggtttgatggaggaattcacaggtgactgacaagtctttgaaaagaatgggatctgctcacttctggtctttttggccgggaactcctgattggtgttaaggtggtaatttcccccatataagatttagaatcactgagtttgagctagatgaaatttttaaaatttctggttgtctcattagactgatgaggtgagttttcttcttcatatgaacagctagttaataacagcagagttctcactcagtgctcagtacttaattttccactgcaccacaactgtcttaactaaatgtgctgtatttttctttaaaagttaagagttctatttggtgttttcaggaatatacgtgaaaagacatgccatgttttggtaaataccatcagagttgtgtaaaggcgtgtactaagtgcaatcttaatttgtggaaataatcttcatttacccctcctaaaactacactcagtataaacactttcccataaggtgtgtgcagtaaaaatgttatattactccaacactggcaggagcacagcacagcagccttattggagagagccttataaaagtgattaaatggaggcattgagctcattacctttaagtttactttgtgctgacctttgttcctgttttgagaatctcatataattattaaaaaaaaaaaacaattaaaacgaaacggcggggcctagctgtgtataaatgatccttgctgaatatcttaaggttttttgtaagaaaaaagaaaaaccaacaaaaaaagcttattttcacattaaaatgaaacctcttttgcaacttaagaattctatggaaaagcagtttttatcatattttgtgtccatgcaccatttttcttaaaatggcttacaaaaaagaatgtaaacaatttgtgatctggccagttgtacttttagctcccagagggagagttggtggtattatgagttgagtaaaaaccatccaggggaacttgagggagcagtctgttgccagtaatgttccttgtgtgccattaaaccacctccagatgagtggaggaacatcactttttaattttttaattgtatttggaattgttgccgtgtactaagaacttgacctaaataaaatcccacaaagtatattca

SEQ ID NO: 158995 - DNA, 1428 bp, Artificial Sequence
  derived and/or modified sequence
atggccgagctgcagatgctgctggaggaggagatccccggcggcagaagagccctgttcgacagctacaccaacctggagagagtggccgactactgcgagaacaactacatccagagcgccgacaagcagagagccctggaggagaccaaggcctacaccacccagagcctggccagcgtggcctacctgatcaacaccctggccaacaacgtgctgcagatgctggacatccaggccagccagctgagaagaatggagagcagcatcaaccacatcagccagaccgtggacatccacaaggagaaggtggccagaagagagatcggcatcctgaccaccaacaagaacaccagcagaacccacaagatcatcgcccccgccaacctggagagacccgtgagatacatcagaaagcccatcgactacaccatcctggacgacatcggccacggcgtgaaggtgagcacccagaacatgaagatgggcggcctgcccagaaccaccccccccacccagaagccccccagcccccccatgagcggcaagggcaccctgggcagacacagcccctacagaaccctggagcccgtgagaccccccgtggtgcccaacgactacgtgcccagccccaccagaaacatggcccccagccagcagagccccgtgagaaccgccagcgtgaaccagagaaacagaacctacagcagcagcggcagcagcggcggcagccaccccagcagcagaagcagcagcagagagaacagcggcagcggcagcgtgggcgtgcccatcgccgtgcccacccccagcccccccagcgtgttccccggccaccccgtgcagttctacagcatgaacagacccgccagcagacacaccccccccaccatcggcggcagcctgccctacagaagaccccccagcatcaccagccagaccagcctgcagaaccagatgaacggcggccccttctacagccagaaccccgtgagcctggccccccccccccccagcatcctgcaggtgaccccccagctgcccctgatgggcttcgtggccagagtgcaggagaacatcagcgacaccccccccccccccccccccgtggaggagcccgtgttcgacgagagccccccccccccccccccccccgaggactacgaggaggaggaggccgccgtggtggagtacagcgacccctacgccgaggaggaccccccctgggcccccagaagctacctggagaaggtggtggccatctacgactacaccaaggacaaggaggacgagctgagcttccaggagggcgccatcatctacgtgatcaagaagaacgacgacggctggtacgagggcgtgatgaacggcgtgaccggcctgttccccggcaactacgtggagagcatcatgcactacagcgagtag

SEQ ID NO: 158996 - protein, 1054 aa, Artificial Sequence
  derived and/or modified sequence
MAAVKEPLEFHAKRPWRPEEAVEDPDEEDEDNTSEAENGFSLEEVLRLGGTKQDYLMLATLDENEEVIDGGKKGAIDDLQQGELEAFIQNLNLAKYTKASLVEEDEPAEKENSSKKEVKIPKINNKNTAESQRTSVNKVKNKNRPEPHSDENGSTTPKVKKDKQNIFEFFERQTLLLRPGGKWYDLEYSNEYSLKPQPQDVVSKYKTLAQKLYQHEINLFKSKTNSQKGASSTWMKAIVSSGTLGDRMAAMILLIQDDAVHTLQFVETLVNLVKKKGSKQQCLMALDTFKELLITDLLPDNRKLRIFSQRPFDKLEQLSSGNKDSRDRRLILWYFEHQLKHLVAEFVQVLETLSHDTLVTTKTRALTVAHELLCNKPEEEKALLVQVVNKLGDPQNRIATKASHLLETLLCKHPNMKGVVSGEVERLLFRSNISSKAQYYAICFLNQMALSHEESELANKLITVYFCFFRTCVKKKDVESKMLSALLTGVNRAYPYSQTGDDKVREQIDTLFKVLHIVNFNTSVQALMLLFQVMNSQQTISDRYYTALYRKMLDPGLMTCSKQAMFLNLVYKSLKADIVLRRVKAFVKRLLQVTCQQMPPFICGALYLVSEILKAKPGLRSQLDDHPESDDEENFIDANDDEDMEKFTDADKETEIVKKLETEETVPETDVETKKPEVASWVHFDNLKGGKQLNKYDPFSRNPLFCGAENTSLWELKKLSVHFHPSVALFAKTILQGNYIQYSGDPLQDFTLMRFLDRFVYRNPKPHKGKENTDSVVMQPKRKHFIKDIRHLPVNSKEFLAKEESQIPVDEVFFHRYYKKVAVKEKQKRDADEESIEDVDDEEFEELIDTFEDDNCFSSGKDDMDFAGNVKKRTKGAKDNTLDEDSEGSDDELGNLDDDEVSLGSMDDEEFAEVDEDGGTFMDVLDDESESVPELEVHSKVSTKKSKRKGTDDFDFAGSFQGPRKKKRNLNDSSLFVSAEEFGHLLDENMGSKFDNIGMNAMANKDNASLKQLRWEAERDDWLHNRDAKSIIKKKKHFKKKRIKTTQKTKKQRK

SEQ ID NO: 158997 - protein, 998 aa, Artificial Sequence
  derived and/or modified sequence
MAAVKEPLEFHAKRPWRPEEAVEDPDEEDEDNTSEAENGFSLEEVLRLGGTKQDYLMLATLDENEEVIDGGKKGAIDDLQQGELEAFIQNLNLAKYTKASLVEEDEPAEKENSSKKEVKIPKINNKNTAESQRTSVNKVKNKNRPEPHSDENGSTTPKVKKDKQNIFEFFERQTLLLRPGGKWYDLEYSNEYSLKPQPQDVVSKYKTLAQKLYQHEINLFKSKTNSQKGASSTWMKAIVSSGTLGDRMAAMILLIQDDAVHTLQFVETLVNLVKKKGSKQQCLMALDTFKELLITDLLPDNRKLRIFSQRPFDKLEQLSSGNKDSRDRRLILWYFEHQLKHLVAEFVQVLETLSHDTLVTTKTRALTVAHELLCNKPEEEKALLVQVVNKLGDPQNRIATKASHLLETLLCKHPNMKGVVSGEVERLLFRSNISSKAQYYAICFLNQMALSHEESELANKLITVYFCFFRTCVKKKDVESKMLSALLTGVNRAYPYSQTGDDKVREQIDTLFKVLHIVNFNTSVQALMLLFQVMNSQQTISDRYYTALYRKMLDPGLMTCSKQAMFLNLVYKSLKADIVLRRVKAFVKRLLQVTCQQMPPFICGALYLVSEILKAKPGLRSQLDDHPESDDEENFIDANDDEDMEKFTDADKETEIVKKLETEETVPETDVETKKPEVASWVHFDNLKGGKQLNKYDPFSRNPLFCGAENTSLWELKKLSVHFHPSVALFAKTILQGNYIQYSGDPLQDFTLMRFLDRFVYRNPKPHKGKENTDSVVMQPKRKHFIKDIRHLPVNSKEFLAKEESQIPVDEVFFHRYYKKVAVKEKQKRDADEESIEDVDDEEFEELIDTFEDDNCFSSGKDDMDFAGNVKKRTKGAKDNTLDEDSEGSDDELGNLDDDEVSLGSMDDEEFAEVDEDGGTFMDVLDDESESVPELEVHSKVSTKKSKRKGTDDFDFAGSFQGPRKKKRNLNDSSLFVSAEEFGHLLDENMGSKFDNIA

SEQ ID NO: 158998 - DNA, 3341 bp, Artificial Sequence
  derived and/or modified sequence
tgagtttcacgcgcgtatgctttgcccgccatggccgcagtcaaggagcctttggagttccatgccaagcggccttggcgccccgaggaggcagtagaagatccggacgaggaggatgaggataatactagtgaagccgagaatgggttctccctggaggaagtgttacggctcggaggcaccaagcaagattaccttatgctggctactttggatgagaatgaggaagtgatagatggaggcaaaaaaggagcaatcgatgaccttcagcaaggtgaattggaagcatttattcaaaatcttaatttggcgaagtatacaaaagcttccttagttgaagaagatgaaccagctgaaaaagaaaattccagcaaaaaagaagtaaaaatacctaaaataaataataaaaatacagcagaaagtcaaaggacatcagttaataaggtgaaaaataagaataggccagaaccacattctgatgagaatggcagtaccacaccgaaagtaaagaaagataaacagaacatctttgaattttttgagagacagactttgttacttaggcctggaggcaaatggtatgatctggagtacagcaatgaatattctttgaaaccccagcctcaggatgttgtatctaagtacaaaacccttgctcagaagctgtatcagcatgaaatcaacttattcaaaagtaagacgaatagtcaaaagggagcctcttctacctggatgaaggcaattgtgtcatcggggacactaggtgacaggatggcagccatgattcttcttattcaggatgatgccgttcacacacttcagtttgtagaaactcttgtgaaccttgttaaaaagaagggcagcaaacagcagtgccttatggccttggatactttcaaagagttgcttatcacagaccttttgccagacaatcggaagctgaggattttcagccagcgtccttttgacaaactggaacagttgtccagtggcaacaaggactcaagagatagaagactgatattatggtattttgaacaccagctgaaacacttagtggctgaatttgtgcaggtcttagaaactttaagtcatgatacattagtaaccactaaaactcgagcccttaccgtggctcatgagctgctttgtaacaagcctgaggaagaaaaggctcttcttgtgcaagtggtaaataaactgggagatcctcagaacagaattgccacaaaagcatcccatctgttagagacattactttgtaaacatcccaatatgaaaggagttgtgtctggtgaagtagaaaggctactcttccgctcaaatatcagctccaaagctcaatattatgcaatttgctttttaaatcaaatggctctgtcccatgaagaaagtgaattggctaacaaattaataactgtttacttttgcttttttcggacttgtgtcaaaaaaaaagatgttgaatcaaaaatgcttagcgcccttttaacaggtgtgaatagggcatacccttattcccagactggtgatgacaaagtaagggagcagattgacacactgtttaaagtgttgcatattgtgaattttaataccagtgtccaggctttaatgttgcttttccaagtaatgaattctcagcagacaatatcggatcgatattacacagcattatacaggaagatgttggatccagggttgatgacgtgttccaagcaagctatgtttcttaaccttgtctacaaatctctgaaagctgacattgtgttgcgccgggtgaaggcttttgtgaagaggttacttcaagttacttgtcaacagatgccaccatttatatgtggagctttatatcttgtgtctgagatccttaaagcaaaaccaggtttaagaagccaactagatgatcatccggagtctgatgatgaagaaaattttattgatgcaaatgatgatgaagacatggaaaaattcactgatgcagacaaagaaacagagatagtgaaaaaacttgagacagaggaaacagttcctgaaactgatgtagaaaccaaaaaaccagaggttgcttcctgggtgcactttgataatttgaaaggtgggaaacagttaaataaatacgatccattcagtagaaaccctctgttctgtggagctgaaaatacaagtctttgggaactcaaaaagttatctgtgcattttcatccctccgtggccctttttgcaaagaccatccttcagggaaactatattcagtattcaggggacccactgcaggatttcactctaatgagatttttggatcgatttgtataccgaaatccaaagccccataaaggcaaagaaaacacagatagtgttgtgatgcagccgaaaagaaaacattttattaaggatattcgtcatcttcctgtgaacagtaaggagttccttgcaaaagaagaaagccaaataccagtggatgaagtgtttttccacaggtattataaaaaagttgctgttaaagagaaacaaaaacgggatgcagatgaagaaagtatagaagacgtggatgatgaagaatttgaagagctgattgacacatttgaagatgataactgtttcagctctggaaaggatgatatggattttgctggaaacgtgaaaaagagaacaaaaggagctaaggataacacattagatgaagattcagaaggtagtgatgatgaacttggtaacctggatgacgatgaagtttctttaggaagtatggatgatgaagaatttgctgaagttgatgaagatggaggaacattcatggatgtgttagatgatgaaagtgagagcgttccagaacttgaagtccactccaaagtcagtactaagaaaagcaagagaaaaggtacagatgattttgactttgctggctcatttcaagggccaagaaaaaagaaaagaaacttaaatgattccagcctatttgtatctgctgaagagtttggccatctattggatgaaaatatgggatccaagtttgataacattggcatgaatgccatggctaacaaagataatgcaagtctcaaacagcttagatgggaggctgaacgtgatgactggctacacaacagagatgcaaaaagtatcatcaagaaaaagaaacattttaaaaagaagaggattaaaaccactcaaaaaactaaaaaacaaaggaaatgagttattaatgtaaattatagattaaaattctacttacatctaatttttgctgttcaaccatgttttttgatctagctctctgattccatacattccagacttctcagtggatttgtaataaactataaataaaaaaaaaaaaaaaa

SEQ ID NO: 158999 - DNA, 3165 bp, Artificial Sequence
  derived and/or modified sequence
atggcagccgtgaaggaacctcttgaattccatgcaaagcgcccttggcgccctgaagaggccgtcgaggaccctgatgaggaggacgaggacaatacatccgaggccgagaacggcttcagtcttgaagaggtgctcaggcttggtggaacgaaacaagactacctgatgcttgctaccttggatgaaaacgaggaggtgattgatggaggaaagaagggtgccattgatgaccttcaacagggcgagcttgaggcatttatccagaacctgaacctggctaaatatactaaggcgtcgttagtcgaagaagacgagcctgccgagaaggagaactcgtccaagaaggaggtgaaaatccctaagattaacaacaagaacactgcagaaagccagcggaccagtgtcaacaaggtgaaaaacaagaacaggcctgaaccacactccgatgaaaacggaagcacaaccccaaaagttaagaaggataagcagaacatcttcgagttcttcgagcgtcaaacacttcttctccgcccgggaggaaagtggtatgatctggagtattccaatgagtactcactcaaaccacagcctcaggacgtcgtgtctaagtacaagaccttagctcagaagctctatcagcatgaaattaatctgtttaagtccaagaccaactcccaaaaaggcgcctcttccacatggatgaaggccatagtgagttctggtacactgggtgatcgaatggcagcaatgattctgctgattcaggatgatgccgtgcatacgctccagtttgtagagactttggtgaatctggtgaagaagaaaggaagtaaacaacagtgtcttatggccctggatacctttaaagaactcctgattactgatctacttcccgataaccggaagctgcggattttctctcagcggccctttgataagctagaacagctttccagtggcaacaaagattcccgagataggaggctgattctgtggtattttgaacaccagctgaagcatctagtggccgagttcgtgcaggtactggaaacgctttcccatgataccctggtgacaacaaagaccagagccctgacggtggcccatgagctgctgtgcaacaagccggaggaagaaaaagcactcttagtgcaagtcgtcaataaactaggcgatccgcagaataggatcgccacaaaggcatcccatctgctcgagaccttgctgtgcaagcatccaaacatgaagggggtcgtctccggagaagtggaacgactgctgtttcgtagcaatatcagttcaaaagcccaatattacgcgatctgcttcctgaaccagatggccctcagccacgaggaaagtgaacttgccaataaactcatcactgtgtatttttgcttcttccggacctgcgtgaagaaaaaagacgttgagagcaagatgctgagcgctctgctaactggagtgaatcgcgcatacccatacagtcagaccggggacgataaagtgcgcgagcaaatcgacaccctctttaaggtgctgcacatcgttaacttcaacacttctgtccaagcactcatgctgctgttccaggtaatgaatagccagcaaaccataagtgacaggtactacacagccctgtaccgaaagatgcttgaccccggcctcatgacctgcagcaaacaggccatgtttctaaatctcgtgtataaatccttgaaagcagatattgtcctccggcgcgtgaaggccttcgttaagagactgttacaggtgacctgccagcagatgcccccttttatttgcggcgcattgtatctggtgtccgaaatcctgaaagccaaaccgggactcagatcccagctggatgaccatccagaaagcgatgatgaggaaaactttatagacgccaacgatgatgaggacatggaaaagttcactgacgccgacaaagagaccgagatcgttaagaagttggaaaccgaggagacagtgcccgaaaccgacgtggagacaaagaaacccgaggttgccagctgggtgcatttcgataacctgaaggggggaaagcagctcaataagtacgaccccttctcacgcaaccctctgttctgcggagcagagaatactagtttatgggagctgaagaagcttagcgtacatttccacccatctgtggctctgtttgccaagacgattttgcaaggaaattatatccaatactctggcgatccactgcaggactttaccctgatgaggtttctggatcgctttgtgtatcggaaccctaagccgcataagggaaaggagaataccgattcagtcgttatgcagcccaagcggaagcatttcattaaggatattcggcacctccctgtgaactctaaagagttcctcgcaaaggaagaaagccagattcccgtggatgaagtcttctttcaccgttattacaagaaggttgcggtgaaagagaagcaaaaaagggacgcagatgaagagagcatagaggatgtggacgatgaggagttcgaagaactcattgataccttcgaagatgacaattgtttcagcagcggcaaggatgacatggacttcgctggcaacgtgaagaaacgcacgaagggagctaaggacaacaccctggatgaagactccgaggggagtgatgatgaactggggaatctggatgacgatgaagtgtcactgggatccatggatgacgaagagtttgccgaggtcgacgaggatgggggcacctttatggacgtcctggacgacgaatcggaaagtgtacctgaacttgaggtacacagtaaagtgtccaccaagaagtccaagcgaaaaggcaccgatgacttcgacttcgcaggctccttccagggtccgcggaaaaaaaagaggaacctcaatgatagctccctgttcgtgtccgcagaagagtttggacatcttctcgacgaaaatatgggtagcaagttcgacaacatcggtatgaacgcaatggctaacaaggataatgcttcactcaagcaactccgttgggaagcggagagggatgactggctacacaacagagacgcaaaatcgattattaaaaagaagaagcacttcaaaaagaagcggatcaagaccacccagaaaaccaaaaaacagcggaagtag

SEQ ID NO: 159000 - DNA, 3165 bp, Artificial Sequence
  derived and/or modified sequence
atggctgctgtgaaggagcccctggagttccacgccaagaggccctggaggcctgaggaggccgtggaggaccctgatgaggaggatgaggacaacaccagcgaggctgaaaatggcttcagcctggaggaggtgctgcggctgggcggcaccaagcaggactacctgatgctggccaccctggatgaaaatgaggaggtgattgatggcggcaagaagggggccattgatgacctgcagcagggcgagctggaggccttcatccagaacctgaacctggccaagtacaccaaggccagcctggtggaggaggatgagcctgctgagaaggagaacagcagcaagaaggaggtgaagatccccaagatcaacaacaagaacacagctgagagccagaggacctctgtgaacaaggtgaagaacaagaacagacctgagccccacagtgatgaaaatggcagcaccacccccaaggtgaagaaggacaagcagaacatctttgagttctttgagcggcagaccctgctgctgcggcctgggggcaagtggtatgacctggagtacagcaatgagtacagcctgaagccccagccccaggatgtggtgtccaagtacaagaccctggcccagaagctgtaccagcacgagatcaacctcttcaagagcaagaccaacagccagaagggggccagcagcacctggatgaaggccatcgtgagcagcggcaccctgggggacaggatggccgccatgatcctgctgatccaggatgatgctgtgcacaccctgcagtttgtggagaccctggtgaacctggtgaagaagaagggcagcaagcagcagtgcctgatggccctggacaccttcaaggagctgctgatcacagacctgctgcctgacaacaggaagctgcgcatcttcagccagaggccctttgacaagctggagcagctgagcagcggcaacaaggacagccgggaccggcggctcatcctgtggtactttgagcaccagctgaagcacctggtggccgagtttgtgcaggtgctggagaccctgagccatgacaccctggtgaccaccaagacccgggccctgactgtggcccacgagctgctgtgcaacaagccagaggaggagaaggccctgctggtgcaggtggtgaacaagctgggggacccccagaaccgcatcgccaccaaggccagccacctgctggagaccctgctgtgcaagcaccccaacatgaagggcgtggtgtctggagaggtggagcggctgctcttccgcagcaacatcagcagcaaggcccagtactatgccatctgcttcctgaaccagatggccctgagccatgaggagagcgagctggccaacaagctgatcaccgtgtacttctgcttcttccgcacctgtgtgaagaagaaggatgtggagagcaagatgctgagcgccctgctgactggagtgaacagagcctacccctacagccagacaggagatgacaaggtgcgggagcagattgacaccctcttcaaggtgctgcacatcgtgaacttcaacacctctgtgcaggccctgatgctgctcttccaggtgatgaacagccagcagaccatcagtgaccgctactacacagccctgtacaggaagatgctggaccccggcctgatgacctgcagcaagcaggccatgttcctgaacctggtgtacaagagcctgaaggctgacatcgtgctgcggcgggtgaaggcctttgtgaagaggctgctgcaggtgacctgccagcagatgccacccttcatctgtggggccctgtacctggtgtctgagatcctgaaggccaagccaggcctgcggagccagctggatgaccaccctgagagtgatgatgaggagaacttcattgatgccaatgatgatgaggacatggagaagttcacagatgctgacaaggagacagagatcgtgaagaagctggagacagaggagaccgtgcctgagacagatgtggagaccaagaagccagaggtggcctcctgggtgcactttgacaacctgaagggcggcaagcagctgaacaagtatgaccccttcagcaggaaccccctcttctgtggggctgagaacaccagcctgtgggagctgaagaagctgtctgtgcacttccaccccagcgtggccctgtttgccaagaccatcctgcagggcaactacatccagtacagcggggaccccctgcaggacttcaccctgatgaggttcctggacagatttgtgtacagaaaccccaagccccacaagggcaaggaaaatacagattctgtggtgatgcagcccaagaggaagcacttcatcaaggacatccgccacctgcctgtgaacagcaaggagttcctggccaaggaggagagccagatccctgtggatgaggtgttcttccaccgctactacaagaaggtggccgtgaaggagaagcagaagagagatgctgatgaggagagcattgaagatgtggatgatgaggagtttgaggagctgattgacacctttgaagatgacaactgcttcagcagcggcaaggatgacatggactttgctggaaatgtgaagaagaggaccaagggggccaaggacaacaccctggatgaggacagcgagggcagtgatgatgagctgggcaacctggatgatgatgaggtgtccctgggctccatggatgatgaggagtttgctgaggtggatgaagatggcggcaccttcatggatgtgctggatgatgaaagtgaatctgtgcctgagctggaggtgcacagcaaggtgtccaccaagaagagcaagaggaaaggaacagatgactttgattttgctggcagcttccagggccccaggaagaagaagaggaacctgaatgacagcagcctgtttgtgtctgctgaggagtttggccacctgctggatgagaacatgggcagcaagtttgacaacatcggcatgaatgccatggccaacaaggacaatgccagcctgaagcagctgcgctgggaggccgagagagatgactggctgcacaacagagatgccaagagcatcatcaagaagaagaagcacttcaagaagaagaggatcaagaccacccagaagaccaagaagcagaggaagtag

SEQ ID NO: 159001 - DNA, 3165 bp, Artificial Sequence
  derived and/or modified sequence
atggccgccgtgaaggagcccctggagttccacgccaagcggccctggagacctgaggaggctgtagaagatcccgatgaggaggacgaggataacaccagtgaggcagagaatgggttctcactggaagaggtcctgaggctcggcggcaccaagcaggactacctgatgctcgccactttggacgagaacgaggaagtaatcgacggaggcaagaaaggcgccattgatgatttgcaacagggcgaactggaggcctttatacagaacttaaaccttgcaaaatacacaaaagcgagccttgttgaagaggacgagccagctgagaaagagaactcttcaaaaaaggaagtcaagatacccaagatcaacaacaagaatacagcagagagccagaggactagcgtcaacaaggtgaagaataagaatcgtcccgaaccgcattcggacgaaaacggcagtaccacgccgaaggtgaagaaggacaagcagaacattttcgaatttttcgagagacaaacgctcttattgagacctggaggaaagtggtatgatttagagtactcaaacgagtatagtcttaagccgcaaccacaagacgtggtaagcaagtacaaaactctggctcagaagctttaccagcatgagatcaacttattcaagtccaagacaaattcacagaagggtgcttcttccacttggatgaaggccattgtctcatcaggcaccttaggtgatcggatggccgcaatgatccttctgatccaggacgacgcagtgcataccttgcagttcgttgaaaccctggtcaatcttgtcaagaagaaaggctctaaacagcagtgccttatggccctcgacactttcaaggaattgctgatcaccgacctcctgcccgacaatcgcaaactgcgaatattctcacagagaccatttgataagctggagcagcttagttccggtaacaaggatagcagggatcgccgcctaatcttgtggtattttgagcatcaacttaaacacctcgtggccgagtttgtacaagttctcgaaactctttcgcacgacaccctggtgaccacgaagacacgtgcattaactgtcgcccatgagttactgtgcaacaagccagaggaagagaaggctctgcttgttcaggtcgtgaataagttaggagaccctcagaaccggatagctactaaagcatcgcatctgcttgaaacgctcctttgcaaacacccaaatatgaaaggcgttgtgtctggcgaggtggagcggctcttatttcgttcaaacatcagttccaaggcccagtattatgctatttgcttcctgaaccagatggccctcagccacgaagaatctgagctggccaataaactcatcacagtctacttctgttttttccgcacctgtgttaagaagaaggacgtggagtcgaaaatgttaagcgcacttctcacaggagtgaatcgcgcatacccatattcccaaactggagacgataaagtgcgcgagcagattgacacactgttcaaagtgcttcacatcgtgaatttcaatacaagtgtgcaggcactaatgctgctgttccaggtcatgaacagccaacaaactatttccgataggtactacacagccttgtaccgcaaaatgctcgacccaggactcatgacttgtagcaagcaggcaatgtttctgaaccttgtgtataagtcgctcaaagccgacatcgtgctaagaagagtgaaagccttcgtgaaacggcttctgcaggttacttgtcagcagatgccgccatttatctgcggtgctctgtacctggttagcgagattctgaaagcaaagcccgggctgcgctcccagctggacgatcacccagaatctgacgatgaagaaaattttatcgatgccaatgacgatgaagacatggagaaattcactgatgccgacaaagaaaccgaaattgttaagaagcttgagacagaagagacagtccccgaaaccgacgtcgaaaccaagaaacctgaggtagcctcctgggtgcacttcgataatctgaagggaggtaaacagttgaataaatacgatccattcagtcgaaatccattgttctgcggagctgagaatacgagtctttgggagctaaagaaactgagtgtccacttccatccctctgtcgctttgttcgcaaaaacaattcttcaggggaactacatccaatactctggagaccccctccaggacttcacattgatgcgatttcttgaccgcttcgtttataggaatccaaagcctcataagggcaaagagaacacagactccgtggtgatgcagcctaagcgaaagcacttcatcaaagacatcaggcatcttcctgttaactcgaaggaatttcttgcaaaggaggaatcacagatccccgttgatgaagttttttttcataggtactacaagaaggttgctgtgaaagagaaacagaaacgagatgctgacgaagagtcaattgaggacgtggacgatgaagaattcgaggagctaatagatacgttcgaggacgacaactgcttctcctccgggaaagatgacatggatttcgccggcaatgtaaaaaagcgcactaagggagccaaggataacactctggacgaagatagtgagggctccgacgacgagctgggcaacctagatgatgacgaggtcagcttgggatcgatggacgatgaggaatttgctgaggttgatgaggacgggggcactttcatggacgtcctggacgatgaatccgaaagcgtgcccgagctagaagtgcactcaaaagtttcgacaaagaaatcaaagcgaaaaggcaccgatgatttcgactttgccggctcatttcaggggccacgcaaaaagaaacgtaatttgaatgacagctccttgttcgttagtgctgaggaattcgggcacctgctagacgagaacatggggagcaagtttgacaatattgggatgaatgccatggccaacaaggataatgcctctctcaaacagctacgctgggaggcagagcgggatgattggctgcataatcgggacgctaagagtattatcaaaaaaaagaaacacttcaaaaagaagagaatcaagacaacacaaaagacaaagaaacagcgcaaatag

SEQ ID NO: 159002 - DNA, 3165 bp, Artificial Sequence
  derived and/or modified sequence
atggccgctgtgaaggagcccttggaattccacgctaaacggccatggaggccagaggaagccgtggaagatccagacgaggaggatgaggataacacttcagaggcagagaacggctttagcttagaggaggtcctgcggctggggggaacgaaacaggactacctgatgctagcgaccctggatgaaaatgaggaagtgattgatggaggcaaaaaaggagccatagacgatttgcagcaaggagaactggaggctttcatccagaaccttaatctggctaagtacactaaggcttctttagtagaggaagatgaacccgcagaaaaagagaattcatccaaaaaggaggtcaaaatacccaagatcaacaacaagaacactgccgaaagtcagcggacatctgttaataaagtcaagaataagaaccgcccagaaccacacagtgacgagaacggctccaccactccgaaggtgaaaaaagataagcagaacatcttcgaattctttgaaaggcagacccttcttctgagacctggtggtaagtggtacgacctggaatactccaatgaatacagtctcaagcctcagcctcaagacgtggtttctaagtacaagaccttagcccaaaagctgtaccaacacgagattaacctgttcaaaagcaaaaccaacagccaaaagggagcctcatctacatggatgaaggccatcgtgtcgtccgggaccctcggggatcgcatggcagccatgatcctgctcattcaggatgatgccgttcatactttacagtttgtggaaacgctggtgaatctggtgaaaaaaaaagggtctaaacaacagtgtttaatggctctggatacgttcaaggagttactcatcacagacctgttgccagacaatagaaagctcagaatattctcccaacgtcctttcgataaactcgaacagctgagcagcggaaacaaggactcgcgggaccgacggcttatactgtggtattttgagcatcagctgaaacacctggtcgccgagttcgtgcaggtgctcgaaactctcagtcatgacaccctcgtaaccaccaagacacgcgcactgacggtcgctcatgaactgctttgcaataaaccggaagaggaaaaggcccttttagtgcaagtcgtcaataagctcggtgacccgcaaaatcgcatagctacgaaggcctcccacctactcgaaaccctcctctgcaaacaccctaatatgaagggtgtggtgtccggggaggtggaaaggctgctgttcagatcaaatatcagctctaaggctcagtactacgctatatgcttcctcaaccagatggctcttagtcatgaagaaagcgaactggcaaataagctgataaccgtgtacttctgtttctttaggacgtgcgttaaaaagaaggatgtggagtctaagatgctttccgctctgctgactggagtgaaccgggcttatccgtactctcagaccggcgatgacaaggtccgagaacaaattgacaccctcttcaaggtccttcacattgtgaatttcaataccagcgtgcaagcacttatgctgctattccaagttatgaactcccagcagacgatctctgataggtactacacggcactttaccggaaaatgcttgatcccggactgatgacttgtagcaagcaggctatgtttctgaacctcgtgtataagagtcttaaagccgatattgtactccgaagagtcaaagcttttgttaaacggcttctccaggtgacttgccagcagatgccaccctttatctgtggcgcactctatttggtcagcgaaattcttaaagcaaaaccgggtctgagaagccagctggatgaccatcctgagtctgatgatgaagagaacttcatagatgcgaatgacgatgaggatatggagaagttcaccgacgcagacaaagagacagagattgtgaagaagttagagactgaggagactgtacccgagacagacgtggaaactaagaaacccgaagtggccagctgggtgcacttcgataatctaaagggaggaaaacagctaaacaagtacgatccattcagcaggaatccgttgttctgtggtgccgaaaatactagcctttgggagctgaaaaaactgtcagtccacttccacccaagcgtggctctgttcgcaaagaccattctgcaaggcaactacatccagtactccggcgaccccctacaagacttcacactgatgaggttcctagataggtttgtgtaccgaaaccctaaaccccacaaaggaaaggagaacactgacagtgtggtaatgcagccaaaaaggaagcacttcatcaaagatatcagacatttgccggtaaactcaaaggaatttcttgctaaggaggaaagccagattccagttgacgaagtgttcttccatagatattataagaaggttgccgtcaaggaaaaacagaagagggacgcagacgaagagtcaatcgaggacgttgatgatgaagagttcgaggagctgatcgacacattcgaggatgataactgttttagttccggcaaagacgatatggacttcgccggaaatgtgaaaaagaggactaagggggctaaagataatacccttgacgaagatagcgaggggagtgatgacgagctggggaacctggacgacgacgaagtcagcttgggcagcatggatgatgaagagttcgcagaggtggatgaggatgggggaacgttcatggacgtgctagatgacgagtcagagtccgtgccagagctggaggttcactcaaaggtttccacaaaaaaatctaaaaggaagggcaccgacgattttgacttcgcaggtagtttccaggggcctcggaagaagaagcgtaatctgaatgattctagtctttttgtatccgctgaggagtttggtcatctccttgatgagaacatgggcagcaaattcgacaatatagggatgaacgctatggccaataaagacaacgcctctctgaaacagcttagatgggaagctgagcgggacgattggctccacaatcgagatgcgaagagcattataaaaaaaaagaaacattttaaaaaaaagagaatcaagactacacagaagactaagaaacagcgaaaatag

SEQ ID NO: 159003 - DNA, 3165 bp, Artificial Sequence
  derived and/or modified sequence
atggccgccgtgaaggagcccctggagttccacgccaagagaccctggagacccgaggaggccgtggaggaccccgacgaggaggacgaggacaacaccagcgaggccgagaacggcttcagcctggaggaggtgctgagactgggcggcaccaagcaggactacctgatgctggccaccctggacgagaacgaggaggtgatcgacggcggcaagaagggcgccatcgacgacctgcagcagggcgagctggaggccttcatccagaacctgaacctggccaagtacaccaaggccagcctggtggaggaggacgagcccgccgagaaggagaacagcagcaagaaggaggtgaagatccccaagatcaacaacaagaacaccgccgagagccagagaaccagcgtgaacaaggtgaagaacaagaacagacccgagccccacagcgacgagaacggcagcaccacccccaaggtgaagaaggacaagcagaacatcttcgagttcttcgagagacagaccctgctgctgagacccggcggcaagtggtacgacctggagtacagcaacgagtacagcctgaagccccagccccaggacgtggtgagcaagtacaagaccctggcccagaagctgtaccagcacgagatcaacctgttcaagagcaagaccaacagccagaagggcgccagcagcacctggatgaaggccatcgtgagcagcggcaccctgggcgacagaatggccgccatgatcctgctgatccaggacgacgccgtgcacaccctgcagttcgtggagaccctggtgaacctggtgaagaagaagggcagcaagcagcagtgcctgatggccctggacaccttcaaggagctgctgatcaccgacctgctgcccgacaacagaaagctgagaatcttcagccagagacccttcgacaagctggagcagctgagcagcggcaacaaggacagcagagacagaagactgatcctgtggtacttcgagcaccagctgaagcacctggtggccgagttcgtgcaggtgctggagaccctgagccacgacaccctggtgaccaccaagaccagagccctgaccgtggcccacgagctgctgtgcaacaagcccgaggaggagaaggccctgctggtgcaggtggtgaacaagctgggcgacccccagaacagaatcgccaccaaggccagccacctgctggagaccctgctgtgcaagcaccccaacatgaagggcgtggtgagcggcgaggtggagagactgctgttcagaagcaacatcagcagcaaggcccagtactacgccatctgcttcctgaaccagatggccctgagccacgaggagagcgagctggccaacaagctgatcaccgtgtacttctgcttcttcagaacctgcgtgaagaagaaggacgtggagagcaagatgctgagcgccctgctgaccggcgtgaacagagcctacccctacagccagaccggcgacgacaaggtgagagagcagatcgacaccctgttcaaggtgctgcacatcgtgaacttcaacaccagcgtgcaggccctgatgctgctgttccaggtgatgaacagccagcagaccatcagcgacagatactacaccgccctgtacagaaagatgctggaccccggcctgatgacctgcagcaagcaggccatgttcctgaacctggtgtacaagagcctgaaggccgacatcgtgctgagaagagtgaaggccttcgtgaagagactgctgcaggtgacctgccagcagatgccccccttcatctgcggcgccctgtacctggtgagcgagatcctgaaggccaagcccggcctgagaagccagctggacgaccaccccgagagcgacgacgaggagaacttcatcgacgccaacgacgacgaggacatggagaagttcaccgacgccgacaaggagaccgagatcgtgaagaagctggagaccgaggagaccgtgcccgagaccgacgtggagaccaagaagcccgaggtggccagctgggtgcacttcgacaacctgaagggcggcaagcagctgaacaagtacgaccccttcagcagaaaccccctgttctgcggcgccgagaacaccagcctgtgggagctgaagaagctgagcgtgcacttccaccccagcgtggccctgttcgccaagaccatcctgcagggcaactacatccagtacagcggcgaccccctgcaggacttcaccctgatgagattcctggacagattcgtgtacagaaaccccaagccccacaagggcaaggagaacaccgacagcgtggtgatgcagcccaagagaaagcacttcatcaaggacatcagacacctgcccgtgaacagcaaggagttcctggccaaggaggagagccagatccccgtggacgaggtgttcttccacagatactacaagaaggtggccgtgaaggagaagcagaagagagacgccgacgaggagagcatcgaggacgtggacgacgaggagttcgaggagctgatcgacaccttcgaggacgacaactgcttcagcagcggcaaggacgacatggacttcgccggcaacgtgaagaagagaaccaagggcgccaaggacaacaccctggacgaggacagcgagggcagcgacgacgagctgggcaacctggacgacgacgaggtgagcctgggcagcatggacgacgaggagttcgccgaggtggacgaggacggcggcaccttcatggacgtgctggacgacgagagcgagagcgtgcccgagctggaggtgcacagcaaggtgagcaccaagaagagcaagagaaagggcaccgacgacttcgacttcgccggcagcttccagggccccagaaagaagaagagaaacctgaacgacagcagcctgttcgtgagcgccgaggagttcggccacctgctggacgagaacatgggcagcaagttcgacaacatcggcatgaacgccatggccaacaaggacaacgccagcctgaagcagctgagatgggaggccgagagagacgactggctgcacaacagagacgccaagagcatcatcaagaagaagaagcacttcaagaagaagagaatcaagaccacccagaagaccaagaagcagagaaagtag

SEQ ID NO: 159004 - DNA, 2997 bp, Artificial Sequence
  derived and/or modified sequence
atggccgccgtgaaggagcctttggagttccacgccaaaagaccgtggagaccagaggaggccgtggaggaccccgacgaggaagacgaggataatacctccgaagcggagaatggcttcagtttggaagaggtcctacgtctcggcggtacaaaacaagactacctcatgttagctaccttggacgaaaacgaggaagtgatagacggagggaagaaaggtgccatcgatgacttgcaacagggcgaactggaggcgtttatacaaaacctaaacctggccaagtacaccaaagcttctttagttgaggaagatgagcctgccgagaaagaaaactcatcaaagaaggaggtgaaaataccaaaaatcaacaacaaaaatactgccgaatcccagagaacttccgttaacaaggtgaagaacaaaaacagaccggagccacactctgacgagaatggtagcactacacccaaagtaaaaaaagacaagcagaacatctttgaattcttcgagcgacagactctgctcctccgcccgggggggaaatggtatgacctggagtacagtaatgaatattctctgaagccccagccacaggatgtggtatctaagtacaagacgctcgcccagaagctctatcagcacgaaattaacctcttcaaatcaaaaactaacagccagaagggcgcctcttcaacttggatgaaagcaattgtcagtagcggaacacttggcgaccggatggctgccatgatcttgctgattcaggacgacgcagtgcacacactacaattcgtggagacgctggtcaatttggtgaagaagaaagggtccaagcagcagtgcctcatggcactagatacattcaaggagctcctgattacggacctgttacccgacaaccgcaaactgcggatattctctcagagacctttcgacaaactcgaacagttatcttctggcaataaggactccagggacagaaggctgattctgtggtactttgaacaccagctgaaacatcttgtcgcagaatttgtgcaggtgctcgagaccctgtcccatgatacgctggttacaacaaagacccgcgcactgactgttgcccacgagctgttgtgcaataagcccgaagaagagaaagccctgcttgtgcaggttgtcaataagctcggggatccgcagaaccgtattgcaaccaaagcgagccatctgctggagacactgctctgtaaacaccctaacatgaagggtgtagtcagtggggaagtggaaaggttgctattcaggagtaacatttcctcgaaagcgcaatactatgccatctgttttctgaatcagatggccctgtcacatgaggagtctgagttggcaaacaagctgatcacggtgtacttttgtttctttcgcacctgtgtgaaaaagaaggacgtggaatccaagatgctgtctgctcttctgactggggtaaacagggcatatccttacagccaaacaggtgatgacaaggtcagagaacagatcgatactctcttcaaagtgctgcacattgtcaacttcaatacctcagtacaggctctcatgctgctcttccaggtgatgaacagtcagcaaactatcagtgacaggtactacacagctctgtatcgaaagatgctcgatcctggattgatgacctgctctaaacaagccatgtttctgaacctagtatacaaatcccttaaggcagacatcgtacttcggcgggtgaaagcttttgtgaaaaggttgttacaggtcacctgtcagcaaatgccaccgtttatctgcggcgcactatacctggtttcagaaattttgaaggccaagcctggactgagatcccagctcgacgaccaccccgagagtgacgatgaggagaactttatcgacgccaatgacgatgaggacatggagaagttcacagatgccgacaaggagaccgagatagttaagaagctggagactgaggagacggtgccagagacagatgttgaaacaaagaagccagaggtcgctagttgggtacatttcgacaatctgaagggcggaaaacaactgaacaaatatgatccgtttagcagaaaccctctgttttgtggggcggagaacacaagcctctgggagttgaagaagctgagcgtgcacttccacccgagtgtggccctattcgctaaaacaatactccagggcaattacatccaatactccggtgaccctcttcaggattttacgcttatgcggtttctggataggtttgtgtatcggaatcccaagccacataagggaaaagagaacaccgacagcgtggtcatgcagccgaaaaggaaacactttataaaggacatccggcatttacctgtcaactctaaagagtttctggcgaaagaggaaagtcaaatcccagtcgatgaagtgttcttccatcgctactataaaaaagtggcagtcaaggaaaagcaaaaacgggacgctgacgaggaatctatcgaggatgtggatgatgaggagttcgaggagcttatagacactttcgaagacgataactgcttcagcagcggaaaagatgacatggactttgctgggaacgtgaaaaagagaactaagggagctaaggacaataccctcgacgaagacagcgagggtagtgatgacgaattggggaacctggacgatgacgaggtttctctgggctcgatggatgacgaggagtttgccgaggttgacgaagatggagggacattcatggacgtgctagatgacgagtccgagtcagtaccggagttagaagtccattccaaagtgagcactaagaaaagtaagagaaagggaaccgatgacttcgacttcgcaggatccttccagggtccaaggaaaaaaaaaaggaatctcaatgactcaagtctcttcgtatctgcagaagagttcggccatctgctggatgaaaacatgggttccaagttcgacaatattgcttag

SEQ ID NO: 159005 - DNA, 2997 bp, Artificial Sequence
  derived and/or modified sequence
atggctgctgtgaaggagcccctggagttccacgccaagaggccctggaggcctgaggaggccgtggaggaccctgatgaggaggatgaggacaacaccagcgaggctgaaaatggcttcagcctggaggaggtgctgcggctgggcggcaccaagcaggactacctgatgctggccaccctggatgaaaatgaggaggtgattgatggcggcaagaagggggccattgatgacctgcagcagggcgagctggaggccttcatccagaacctgaacctggccaagtacaccaaggccagcctggtggaggaggatgagcctgctgagaaggagaacagcagcaagaaggaggtgaagatccccaagatcaacaacaagaacacagctgagagccagaggacctctgtgaacaaggtgaagaacaagaacagacctgagccccacagtgatgaaaatggcagcaccacccccaaggtgaagaaggacaagcagaacatctttgagttctttgagcggcagaccctgctgctgcggcctgggggcaagtggtatgacctggagtacagcaatgagtacagcctgaagccccagccccaggatgtggtgtccaagtacaagaccctggcccagaagctgtaccagcacgagatcaacctcttcaagagcaagaccaacagccagaagggggccagcagcacctggatgaaggccatcgtgagcagcggcaccctgggggacaggatggccgccatgatcctgctgatccaggatgatgctgtgcacaccctgcagtttgtggagaccctggtgaacctggtgaagaagaagggcagcaagcagcagtgcctgatggccctggacaccttcaaggagctgctgatcacagacctgctgcctgacaacaggaagctgcgcatcttcagccagaggccctttgacaagctggagcagctgagcagcggcaacaaggacagccgggaccggcggctcatcctgtggtactttgagcaccagctgaagcacctggtggccgagtttgtgcaggtgctggagaccctgagccatgacaccctggtgaccaccaagacccgggccctgactgtggcccacgagctgctgtgcaacaagccagaggaggagaaggccctgctggtgcaggtggtgaacaagctgggggacccccagaaccgcatcgccaccaaggccagccacctgctggagaccctgctgtgcaagcaccccaacatgaagggcgtggtgtctggagaggtggagcggctgctcttccgcagcaacatcagcagcaaggcccagtactatgccatctgcttcctgaaccagatggccctgagccatgaggagagcgagctggccaacaagctgatcaccgtgtacttctgcttcttccgcacctgtgtgaagaagaaggatgtggagagcaagatgctgagcgccctgctgactggagtgaacagagcctacccctacagccagacaggagatgacaaggtgcgggagcagattgacaccctcttcaaggtgctgcacatcgtgaacttcaacacctctgtgcaggccctgatgctgctcttccaggtgatgaacagccagcagaccatcagtgaccgctactacacagccctgtacaggaagatgctggaccccggcctgatgacctgcagcaagcaggccatgttcctgaacctggtgtacaagagcctgaaggctgacatcgtgctgcggcgggtgaaggcctttgtgaagaggctgctgcaggtgacctgccagcagatgccacccttcatctgtggggccctgtacctggtgtctgagatcctgaaggccaagccaggcctgcggagccagctggatgaccaccctgagagtgatgatgaggagaacttcattgatgccaatgatgatgaggacatggagaagttcacagatgctgacaaggagacagagatcgtgaagaagctggagacagaggagaccgtgcctgagacagatgtggagaccaagaagccagaggtggcctcctgggtgcactttgacaacctgaagggcggcaagcagctgaacaagtatgaccccttcagcaggaaccccctcttctgtggggctgagaacaccagcctgtgggagctgaagaagctgtctgtgcacttccaccccagcgtggccctgtttgccaagaccatcctgcagggcaactacatccagtacagcggggaccccctgcaggacttcaccctgatgaggttcctggacagatttgtgtacagaaaccccaagccccacaagggcaaggaaaatacagattctgtggtgatgcagcccaagaggaagcacttcatcaaggacatccgccacctgcctgtgaacagcaaggagttcctggccaaggaggagagccagatccctgtggatgaggtgttcttccaccgctactacaagaaggtggccgtgaaggagaagcagaagagagatgctgatgaggagagcattgaagatgtggatgatgaggagtttgaggagctgattgacacctttgaagatgacaactgcttcagcagcggcaaggatgacatggactttgctggaaatgtgaagaagaggaccaagggggccaaggacaacaccctggatgaggacagcgagggcagtgatgatgagctgggcaacctggatgatgatgaggtgtccctgggctccatggatgatgaggagtttgctgaggtggatgaagatggcggcaccttcatggatgtgctggatgatgaaagtgaatctgtgcctgagctggaggtgcacagcaaggtgtccaccaagaagagcaagaggaaaggaacagatgactttgattttgctggcagcttccagggccccaggaagaagaagaggaacctgaatgacagcagcctgtttgtgtctgctgaggagtttggccacctgctggatgagaacatgggcagcaagtttgacaacatcgcctag

SEQ ID NO: 159006 - DNA, 2997 bp, Artificial Sequence
  derived and/or modified sequence
atggccgccgtgaaggagcccctggagttccacgccaagcggccctggaggccagaggaggccgtagaggaccctgatgaggaagacgaagacaacacttcggaggccgagaatgggttctccctggaagaggttctgagactgggcggtaccaaacaagattatctgatgctggcaactctggatgagaatgaggaggttattgatggtggaaagaaaggcgccattgatgacctgcagcagggcgaactggaagcattcattcagaatctgaatttggccaagtataccaaagcaagcctggttgaagaagatgagcctgcggaaaaagagaatagctccaagaaggaggtcaagatcccaaagataaataataagaacaccgccgagagccagcggaccagcgtgaacaaggtgaagaataaaaaccggcccgagccacacagtgacgagaacggcagcactactccaaaggtgaagaaggacaagcagaacatcttcgaattcttcgaaagacaaaccctcttgctgaggcctggcggcaagtggtacgacttggaatactcgaacgaatatagcttaaaaccccagccccaggacgtggtgtccaagtataaaactctggcacagaagttgtatcagcacgagatcaatctgtttaagagcaaaacgaactctcagaagggagcatcctctacctggatgaaggctattgtcagctcgggcaccttgggcgaccgaatggccgccatgatattgctaatacaagatgatgccgtacatacacttcagtttgtcgaaaccctcgtcaaccttgtcaaaaagaaaggatccaaacagcagtgtctcatggccctcgacacgtttaaggagctcctgattacggatctcctacccgacaatagaaagctgcggatttttagccagagaccatttgataaactggagcagctgtcttccggaaataaagatagccgggaccgccgtctaattctgtggtatttcgaacaccagctgaagcatctcgtggccgagttcgtgcaggtcctcgaaactctcagtcacgatacactggtgaccacgaaaaccagagccctgaccgtggctcacgagttgctgtgcaacaaaccagaggaagaaaaagccctgctggtgcaagtggtcaacaaactaggggatccacagaaccgcatagctacaaaggcatcacacctgttagaaacactcctgtgcaaacatcccaacatgaaaggagtggtaagcggagaagtggagaggctgctcttccgatcaaacatcagctcaaaagcccagtactatgccatttgcttcctaaaccagatggccctttctcacgaagagtcagagctcgcaaacaagctcattactgtctacttctgcttctttaggacttgcgtcaagaaaaaggatgttgagagcaaaatgctctccgccctccttacgggagtcaatagggcctatccatacagtcagacaggagacgataaagtgcgggagcagatcgataccttatttaaagtgttgcatatcgttaacttcaacacatctgttcaagctctgatgcttctctttcaggtgatgaacagtcaacagactatttccgacagatattatacagccctctataggaaaatgctggacccaggtctgatgacctgcagcaaacaagccatgttcctaaacctcgtatataagagtttgaaggccgacatagttctgcgacgcgtgaaagccttcgtaaagaggctgcttcaggttacctgccaacagatgccacccttcatttgcggagcgctgtatctcgtttccgagatattgaaagcgaaacccggtttgagatcccaattggatgatcacccagagagcgatgatgaagagaatttcatagacgctaacgatgacgaggacatggagaagttcaccgacgctgacaaagaaactgagatcgtcaagaagctagagacagaggagacagtgcccgagactgatgtggaaacaaagaagcctgaagtggccagttgggtgcactttgataacttgaaggggggtaaacagctaaataagtacgatccattctcacgtaacccacttttctgcggagcagagaatacctctctttgggaactcaagaagctgtccgtacacttccacccaagtgttgctctcttcgctaagacaattctgcaggggaactacatccagtactctggcgaccccctgcaggatttcactctcatgaggtttctggaccggtttgtgtaccggaaccctaaacctcacaagggcaaagagaacacagattctgtggtaatgcagcctaagcggaagcatttcatcaaagatattcgacacctgcctgtgaacagcaaggagttcctggctaaagaggaatcacagattcctgtcgatgaagtgttcttccacaggtactataagaaggtggccgtcaaggaaaaacagaagagagatgctgacgaggaatcaatagaggacgtggatgacgaggagtttgaggagctcattgacaccttcgaagatgacaactgtttttcaagcgggaaggatgacatggactttgctggcaacgtgaaaaagaggacaaaaggggccaaagacaatacgttggatgaggattcagaaggaagcgatgatgagctcggcaacttggatgacgacgaggtctccctcgggtccatggacgacgaggagttcgcagaggttgatgaggacggcggcaccttcatggatgtcttagacgacgagagtgaaagcgttcccgagctggaggtccacagcaaggtctccactaagaagtcgaagaggaagggaacggatgactttgattttgctggcagcttccaaggcccacggaaaaaaaagcggaatctcaatgactcttccctgttcgtgagtgctgaagagtttgggcacctgttggatgaaaatatgggatcaaaattcgataatatagcatag

SEQ ID NO: 159007 - DNA, 2997 bp, Artificial Sequence
  derived and/or modified sequence
atggccgctgttaaggagcccttggaatttcacgcaaaaaggccttggagacctgaggaagctgtcgaagacccagacgaagaggacgaggacaacaccagcgaagcagaaaacggctttagcctggaagaagtactccggctcggcggaactaagcaggattatctcatgttggccactcttgatgagaacgaggaagtgattgacgggggaaaaaaaggtgctatagacgatctgcagcagggcgaactcgaggcttttattcagaatctcaacctagctaaatacactaaagctagcctcgtggaagaagatgagccagctgagaaagagaactcgagcaaaaaggaagttaaaattcccaaaattaacaataaaaataccgcagagtctcaaagaaccagcgttaataaggtgaagaataagaaccgcccagagccccactccgacgaaaatggctctaccacacctaaggtgaagaaagataagcagaacatctttgagttcttcgaacgtcagaccctcctcttaaggcccggtggcaagtggtatgatctggagtattcaaatgaatactcccttaagccacagccgcaggatgtcgtatccaagtacaaaaccctggctcaaaagctttatcaacacgagatcaacctgtttaagagtaaaacgaacagtcagaaaggcgcatcctcgacctggatgaaagcaatcgtctcttcaggaacactgggagataggatggctgctatgattctccttatccaggacgacgcggtgcacactctacagtttgttgaaacattggtgaatctcgtcaaaaaaaaaggcagcaaacagcagtgccttatggcccttgacacctttaaggagctgctcattactgatctcctgcccgacaatcggaagctgagaattttctctcaaaggcctttcgataaacttgagcagctgtcatccgggaataaggactcacgtgaccgccgactgattctgtggtatttcgaacatcagcttaaacacctcgtggccgaatttgtgcaggtcctggagactctgtcccacgatactctagtgactacaaaaacccgcgctctgaccgtggcgcatgaactcctgtgcaacaagcccgaagaggaaaaggcacttctggttcaggttgtgaacaagctcggcgatccccaaaatagaatagcaactaaagccagccaccttctagaaaccctgttgtgtaaacatcctaacatgaagggcgtcgtcagcggagaggtggaacggctgttattcaggtcgaatatctcatccaaggctcagtattacgccatctgctttctaaaccaaatggcactgtctcacgaggagtctgaactggctaataagctgataacggtgtacttttgttttttcagaacatgtgtgaagaagaaggatgtggaaagtaaaatgttgagcgctctcttaaccggcgtgaacagagcctacccctactcccaaacaggcgatgataaggtgagagaacagatcgataccctgtttaaggtgctgcacatcgtcaactttaatacatccgtccaagcgctcatgctcttatttcaggtgatgaactcgcagcagactatttccgaccggtactatacagccctttacagaaagatgctggatcctgggcttatgacctgctccaagcaggctatgtttctcaacttggtgtacaagtctctgaaagctgatatagtattgcgcagggtgaaagcctttgtaaaaaggctccttcaggttacatgccagcagatgcccccttttatttgcggggcactttatctggtcagcgaaattcttaaggctaaacctgggctgaggtctcagctggacgaccaccctgagtcagacgatgaggaaaactttatcgatgccaatgacgatgaggatatggagaaattcacggatgcggacaaggaaactgaaatcgtgaagaaattggagaccgaggaaaccgttccagaaacggacgtagaaactaaaaagccagaggtcgcctcttgggttcacttcgataacctcaaaggtgggaagcagctgaacaagtacgaccctttctctcgaaatcccttgttctgcggagctgaaaacacatctttgtgggaattgaagaagctaagtgtgcatttccatccttctgtcgctttgttcgcaaaaaccattttgcagggcaattatatccagtacagtggggatcctttgcaggatttcacacttatgagattcctcgacaggtttgtgtaccgtaacccaaagccacataagggcaaagaaaataccgattccgtggttatgcagcccaagagaaagcactttattaaggacatccgacatctgcccgtaaacagcaaggagtttcttgcgaaagaggaaagccagattcccgttgacgaagtgttttttcatcgttactacaagaaagttgcagtgaaagagaaacagaagcgggatgcagatgaggaatccattgaggacgttgacgatgaggaattcgaggagcttatcgacacatttgaggacgataactgcttttcaagtggaaaagacgatatggattttgcgggtaacgtgaaaaaacgaacaaagggagcgaaggataacactctggacgaagattcagagggaagtgatgatgaacttggcaacctggacgatgatgaagttagcttaggatcaatggacgatgaggaatttgctgaagtcgatgaggatggcggaacttttatggatgtgctggatgatgaatcagaaagcgtccctgagcttgaagtgcacagtaaggtttccacaaaaaagagcaagcgaaaaggcactgacgacttcgatttcgccggatcgttccagggcccacgcaagaagaaaaggaacttgaacgactcttccctgtttgtgagtgcagaggagttcggtcacttattagacgagaacatggggtctaaatttgacaacattgcctag

SEQ ID NO: 159008 - DNA, 3463 bp, Artificial Sequence
  derived and/or modified sequence
acactcatgctgaaattcgcaggctagctcgctccgccaggagctggggcttagaccatttccgggagaagacacgccccgacaggaattacgccactggcagagcggaaataggctgagtttcacgcgcgtatgctttgcccgccatggccgcagtcaaggagcctttggagttccatgccaagcggccttggcgccccgaggaggcagtagaagatccggacgaggaggatgaggataatactagtgaagccgagaatgggttctccctggaggaagtgttacggctcggaggcaccaagcaagattaccttatgctggctactttggatgagaatgaggaagtgatagatggaggcaaaaaaggagcaatcgatgaccttcagcaaggtgaattggaagcatttattcaaaatcttaatttggcgaagtatacaaaagcttccttagttgaagaagatgaaccagctgaaaaagaaaattccagcaaaaaagaagtaaaaatacctaaaataaataataaaaatacagcagaaagtcaaaggacatcagttaataaggtgaaaaataagaataggccagaaccacattctgatgagaatggcagtaccacaccgaaagtaaagaaagataaacagaacatctttgaattttttgagagacagactttgttacttaggcctggaggcaaatggtatgatctggagtacagcaatgaatattctttgaaaccccagcctcaggatgttgtatctaagtacaaaacccttgctcagaagctgtatcagcatgaaatcaacttattcaaaagtaagacgaatagtcaaaagggagcctcttctacctggatgaaggcaattgtgtcatcggggacactaggtgacaggatggcagccatgattcttcttattcaggatgatgccgttcacacacttcagtttgtagaaactcttgtgaaccttgttaaaaagaagggcagcaaacagcagtgccttatggccttggatactttcaaagagttgcttatcacagaccttttgccagacaatcggaagctgaggattttcagccagcgtccttttgacaaactggaacagttgtccagtggcaacaaggactcaagagatagaagactgatattatggtattttgaacaccagctgaaacacttagtggctgaatttgtgcaggtcttagaaactttaagtcatgatacattagtaaccactaaaactcgagcccttaccgtggctcatgagctgctttgtaacaagcctgaggaagaaaaggctcttcttgtgcaagtggtaaataaactgggagatcctcagaacagaattgccacaaaagcatcccatctgttagagacattactttgtaaacatcccaatatgaaaggagttgtgtctggtgaagtagaaaggctactcttccgctcaaatatcagctccaaagctcaatattatgcaatttgctttttaaatcaaatggctctgtcccatgaagaaagtgaattggctaacaaattaataactgtttacttttgcttttttcggacttgtgtcaaaaaaaaagatgttgaatcaaaaatgcttagcgcccttttaacaggtgtgaatagggcatacccttattcccagactggtgatgacaaagtaagggagcagattgacacactgtttaaagtgttgcatattgtgaattttaataccagtgtccaggctttaatgttgcttttccaagtaatgaattctcagcagacaatatcggatcgatattacacagcattatacaggaagatgttggatccagggttgatgacgtgttccaagcaagctatgtttcttaaccttgtctacaaatctctgaaagctgacattgtgttgcgccgggtgaaggcttttgtgaagaggttacttcaagttacttgtcaacagatgccaccatttatatgtggagctttatatcttgtgtctgagatccttaaagcaaaaccaggtttaagaagccaactagatgatcatccggagtctgatgatgaagaaaattttattgatgcaaatgatgatgaagacatggaaaaattcactgatgcagacaaagaaacagagatagtgaaaaaacttgagacagaggaaacagttcctgaaactgatgtagaaaccaaaaaaccagaggttgcttcctgggtgcactttgataatttgaaaggtgggaaacagttaaataaatacgatccattcagtagaaaccctctgttctgtggagctgaaaatacaagtctttgggaactcaaaaagttatctgtgcattttcatccctccgtggccctttttgcaaagaccatccttcagggaaactatattcagtattcaggggacccactgcaggatttcactctaatgagatttttggatcgatttgtataccgaaatccaaagccccataaaggcaaagaaaacacagatagtgttgtgatgcagccgaaaagaaaacattttattaaggatattcgtcatcttcctgtgaacagtaaggagttccttgcaaaagaagaaagccaaataccagtggatgaagtgtttttccacaggtattataaaaaagttgctgttaaagagaaacaaaaacgggatgcagatgaagaaagtatagaagacgtggatgatgaagaatttgaagagctgattgacacatttgaagatgataactgtttcagctctggaaaggatgatatggattttgctggaaacgtgaaaaagagaacaaaaggagctaaggataacacattagatgaagattcagaaggtagtgatgatgaacttggtaacctggatgacgatgaagtttctttaggaagtatggatgatgaagaatttgctgaagttgatgaagatggaggaacattcatggatgtgttagatgatgaaagtgagagcgttccagaacttgaagtccactccaaagtcagtactaagaaaagcaagagaaaaggtacagatgattttgactttgctggctcatttcaagggccaagaaaaaagaaaagaaacttaaatgattccagcctatttgtatctgctgaagagtttggccatctattggatgaaaatatgggatccaagtttgataacattggcatgaatgccatggctaacaaagataatgcaagtctcaaacagcttagatgggaggctgaacgtgatgactggctacacaacagagatgcaaaaagtatcatcaagaaaaagaaacattttaaaaagaagaggattaaaaccactcaaaaaactaaaaaacaaaggaaatgagttattaatgtaaattatagattaaaattctacttacatctaatttttgctgttcaaccatgttttttgatctagctctctgattccatacattccagacttctcagtggatttgtaataaactataaataaaaatagctctcatttataaa

SEQ ID NO: 159009 - DNA, 3026 bp, Artificial Sequence
  derived and/or modified sequence
gagtttcacgcgcgtatgctttgcccgccatggccgcagtcaaggagcctttggagttccatgccaagcggccttggcgccccgaggaggcagtagaagatccggacgaggaggatgaggataatactagtgaagccgagaatgggttctccctggaggaagtgttacggctcggaggcaccaagcaagattaccttatgctggctactttggatgagaatgaggaagtgatagatggaggcaaaaaaggagcaatcgatgaccttcagcaaggtgaattggaagcatttattcaaaatcttaatttggcgaagtatacaaaagcttccttagttgaagaagatgaaccagctgaaaaagaaaattccagcaaaaaagaagtaaaaatacctaaaataaataataaaaatacagcagaaagtcaaaggacatcagttaataaggtgaaaaataagaataggccagaaccacattctgatgagaatggcagtaccacaccgaaagtaaagaaagataaacagaacatctttgaattttttgagagacagactttgttacttaggcctggaggcaaatggtatgatctggagtacagcaatgaatattctttgaaaccccagcctcaggatgttgtatctaagtacaaaacccttgctcagaagctgtatcagcatgaaatcaacttattcaaaagtaagacgaatagtcaaaagggagcctcttctacctggatgaaggcaattgtgtcatcggggacactaggtgacaggatggcagccatgattcttcttattcaggatgatgccgttcacacacttcagtttgtagaaactcttgtgaaccttgttaaaaagaagggcagcaaacagcagtgccttatggccttggatactttcaaagagttgcttatcacagaccttttgccagacaatcggaagctgaggattttcagccagcgtccttttgacaaactggaacagttgtccagtggcaacaaggactcaagagatagaagactgatattatggtattttgaacaccagctgaaacacttagtggctgaatttgtgcaggtcttagaaactttaagtcatgatacattagtaaccactaaaactcgagcccttaccgtggctcatgagctgctttgtaacaagcctgaggaagaaaaggctcttcttgtgcaagtggtaaataaactgggagatcctcagaacagaattgccacaaaagcatcccatctgttagagacattactttgtaaacatcccaatatgaaaggagttgtgtctggtgaagtagaaaggctactcttccgctcaaatatcagctccaaagctcaatattatgcaatttgctttttaaatcaaatggctctgtcccatgaagaaagtgaattggctaacaaattaataactgtttacttttgcttttttcggacttgtgtcaaaaaaaaagatgttgaatcaaaaatgcttagcgcccttttaacaggtgtgaatagggcatacccttattcccagactggtgatgacaaagtaagggagcagattgacacactgtttaaagtgttgcatattgtgaattttaataccagtgtccaggctttaatgttgcttttccaagtaatgaattctcagcagacaatatcggatcgatattacacagcattatacaggaagatgttggatccagggttgatgacgtgttccaagcaagctatgtttcttaaccttgtctacaaatctctgaaagctgacattgtgttgcgccgggtgaaggcttttgtgaagaggttacttcaagttacttgtcaacagatgccaccatttatatgtggagctttatatcttgtgtctgagatccttaaagcaaaaccaggtttaagaagccaactagatgatcatccggagtctgatgatgaagaaaattttattgatgcaaatgatgatgaagacatggaaaaattcactgatgcagacaaagaaacagagatagtgaaaaaacttgagacagaggaaacagttcctgaaactgatgtagaaaccaaaaaaccagaggttgcttcctgggtgcactttgataatttgaaaggtgggaaacagttaaataaatacgatccattcagtagaaaccctctgttctgtggagctgaaaatacaagtctttgggaactcaaaaagttatctgtgcattttcatccctccgtggccctttttgcaaagaccatccttcagggaaactatattcagtattcaggggacccactgcaggatttcactctaatgagatttttggatcgatttgtataccgaaatccaaagccccataaaggcaaagaaaacacagatagtgttgtgatgcagccgaaaagaaaacattttattaaggatattcgtcatcttcctgtgaacagtaaggagttccttgcaaaagaagaaagccaaataccagtggatgaagtgtttttccacaggtattataaaaaagttgctgttaaagagaaacaaaaacgggatgcagatgaagaaagtatagaagacgtggatgatgaagaatttgaagagctgattgacacatttgaagatgataactgtttcagctctggaaaggatgatatggattttgctggaaacgtgaaaaagagaacaaaaggagctaaggataacacattagatgaagattcagaaggtagtgatgatgaacttggtaacctggatgacgatgaagtttctttaggaagtatggatgatgaagaatttgctgaagttgatgaagatggaggaacattcatggatgtgttagatgatgaaagtgagagcgttccagaacttgaagtccactccaaagtcagtactaagaaaagcaagagaaaaggtacagatgattttgactttgctggctcatttcaagggccaagaaaaaagaaaagaaacttaaatgattccagcctatttgtatctgctgaagagtttggccatctattggatgaaaatatgggatccaagtttgataacattgcatga

SEQ ID NO: 159010 - DNA, 2997 bp, Artificial Sequence
  derived and/or modified sequence
atggccgccgtgaaggagcccctggagttccacgccaagagaccctggagacccgaggaggccgtggaggaccccgacgaggaggacgaggacaacaccagcgaggccgagaacggcttcagcctggaggaggtgctgagactgggcggcaccaagcaggactacctgatgctggccaccctggacgagaacgaggaggtgatcgacggcggcaagaagggcgccatcgacgacctgcagcagggcgagctggaggccttcatccagaacctgaacctggccaagtacaccaaggccagcctggtggaggaggacgagcccgccgagaaggagaacagcagcaagaaggaggtgaagatccccaagatcaacaacaagaacaccgccgagagccagagaaccagcgtgaacaaggtgaagaacaagaacagacccgagccccacagcgacgagaacggcagcaccacccccaaggtgaagaaggacaagcagaacatcttcgagttcttcgagagacagaccctgctgctgagacccggcggcaagtggtacgacctggagtacagcaacgagtacagcctgaagccccagccccaggacgtggtgagcaagtacaagaccctggcccagaagctgtaccagcacgagatcaacctgttcaagagcaagaccaacagccagaagggcgccagcagcacctggatgaaggccatcgtgagcagcggcaccctgggcgacagaatggccgccatgatcctgctgatccaggacgacgccgtgcacaccctgcagttcgtggagaccctggtgaacctggtgaagaagaagggcagcaagcagcagtgcctgatggccctggacaccttcaaggagctgctgatcaccgacctgctgcccgacaacagaaagctgagaatcttcagccagagacccttcgacaagctggagcagctgagcagcggcaacaaggacagcagagacagaagactgatcctgtggtacttcgagcaccagctgaagcacctggtggccgagttcgtgcaggtgctggagaccctgagccacgacaccctggtgaccaccaagaccagagccctgaccgtggcccacgagctgctgtgcaacaagcccgaggaggagaaggccctgctggtgcaggtggtgaacaagctgggcgacccccagaacagaatcgccaccaaggccagccacctgctggagaccctgctgtgcaagcaccccaacatgaagggcgtggtgagcggcgaggtggagagactgctgttcagaagcaacatcagcagcaaggcccagtactacgccatctgcttcctgaaccagatggccctgagccacgaggagagcgagctggccaacaagctgatcaccgtgtacttctgcttcttcagaacctgcgtgaagaagaaggacgtggagagcaagatgctgagcgccctgctgaccggcgtgaacagagcctacccctacagccagaccggcgacgacaaggtgagagagcagatcgacaccctgttcaaggtgctgcacatcgtgaacttcaacaccagcgtgcaggccctgatgctgctgttccaggtgatgaacagccagcagaccatcagcgacagatactacaccgccctgtacagaaagatgctggaccccggcctgatgacctgcagcaagcaggccatgttcctgaacctggtgtacaagagcctgaaggccgacatcgtgctgagaagagtgaaggccttcgtgaagagactgctgcaggtgacctgccagcagatgccccccttcatctgcggcgccctgtacctggtgagcgagatcctgaaggccaagcccggcctgagaagccagctggacgaccaccccgagagcgacgacgaggagaacttcatcgacgccaacgacgacgaggacatggagaagttcaccgacgccgacaaggagaccgagatcgtgaagaagctggagaccgaggagaccgtgcccgagaccgacgtggagaccaagaagcccgaggtggccagctgggtgcacttcgacaacctgaagggcggcaagcagctgaacaagtacgaccccttcagcagaaaccccctgttctgcggcgccgagaacaccagcctgtgggagctgaagaagctgagcgtgcacttccaccccagcgtggccctgttcgccaagaccatcctgcagggcaactacatccagtacagcggcgaccccctgcaggacttcaccctgatgagattcctggacagattcgtgtacagaaaccccaagccccacaagggcaaggagaacaccgacagcgtggtgatgcagcccaagagaaagcacttcatcaaggacatcagacacctgcccgtgaacagcaaggagttcctggccaaggaggagagccagatccccgtggacgaggtgttcttccacagatactacaagaaggtggccgtgaaggagaagcagaagagagacgccgacgaggagagcatcgaggacgtggacgacgaggagttcgaggagctgatcgacaccttcgaggacgacaactgcttcagcagcggcaaggacgacatggacttcgccggcaacgtgaagaagagaaccaagggcgccaaggacaacaccctggacgaggacagcgagggcagcgacgacgagctgggcaacctggacgacgacgaggtgagcctgggcagcatggacgacgaggagttcgccgaggtggacgaggacggcggcaccttcatggacgtgctggacgacgagagcgagagcgtgcccgagctggaggtgcacagcaaggtgagcaccaagaagagcaagagaaagggcaccgacgacttcgacttcgccggcagcttccagggccccagaaagaagaagagaaacctgaacgacagcagcctgttcgtgagcgccgaggagttcggccacctgctggacgagaacatgggcagcaagttcgacaacatcgcctag

SEQ ID NO: 159011 - protein, 75 aa, Artificial Sequence
  derived and/or modified sequence
LVTSASKGSSFPKKIDCGGACAARCQLSSRPHLCKRACGTCCARSRCVPPGTAGNQEMCPCYASLTTHGGKRKCP

SEQ ID NO: 159012 - protein, 1568 aa, Artificial Sequence
  derived and/or modified sequence
MEVSRRKAPPRPPRPAAPLPLLAYLLALAAPGRGADEPVWRSEQAIGAIAASQEDGVFVASGSCLDQLDYSLEHSLSRLYRDQAGNCTEPVSLAPPARPRPGSSFSKLLLPYREGAAGLGGLLLTGWTFDRGACEVRPLGNLSRNSLRNGTEVVSCHPQGSTAGVVYRAGRNNRWYLAVAATYVLPEPETASRCNPAASDHDTAIALKDTEGRSLATQELGRLKLCEGAGSLHFVDAFLWNGSIYFPYYPYNYTSGAATGWPSMARIAQSTEVLFQGQASLDCGHGHPDGRRLLLSSSLVEALDVWAGVFSAAAGEGQERRSPTTTALCLFRMSEIQARAKRVSWDFKTAESHCKEGDQPERVQPIASSTLIHSDLTSVYGTVVMNRTVLFLGTGDGQLLKVILGENLTSNCPEVIYEIKEETPVFYKLVPDPVKNIYIYLTAGKEVRRIRVANCNKHKSCSECLTATDPHCGWCHSLQRCTFQGDCVHSENLENWLDISSGAKKCPKIQIIRSSKEKTTVTMVGSFSPRHSKCMVKNVDSSRELCQNKSQPNRTCTCSIPTRATYKDVSVVNVMFSFGSWNLSDRFNFTNCSSLKECPACVETGCAWCKSARRCIHPFTACDPSDYERNQEQCPVAVEKTSGGGRPKENKGNRTNQALQVFYIKSIEPQKVSTLGKSNVIVTGANFTRASNITMILKGTSTCDKDVIQVSHVLNDTHMKFSLPSSRKEMKDVCIQFDGGNCSSVGSLSYIALPHCSLIFPATTWISGGQNITMMGRNFDVIDNLIISHELKGNINVSEYCVATYCGFLAPSLKSSKVRTNVTVKLRVQDTYLDCGTLQYREDPRFTGYRVESEVDTELEVKIQKENDNFNISKKDIEITLFHGENGQLNCSFENITRNQDLTTILCKIKGIKTASTIANSSKKVRVKLGNLELYVEQESVPSTWYFLIVLPVLLVIVIFAAVGVTRHKSKELSRKQSQQLELLESELRKEIRDGFAELQMDKLDVVDSFGTVPFLDYKHFALRTFFPESGGFTHIFTEDMHNRDANDKNESLTALDALICNKSFLVTVIHTLEKQKNFSVKDRCLFASFLTIALQTKLVYLTSILEVLTRDLMEQCSNMQPKLMLRRTESVVEKLLTNWMSVCLSGFLRETVGEPFYLLVTTLNQKINKGPVDVITCKALYTLNEDWLLWQVPEFSTVALNVVFEKIPENESADVCRNISVNVLDCDTIGQAKEKIFQAFLSKNGSPYGLQLNEIGLELQMGTRQKELLDIDSSSVILEDGITKLNTIGHYEISNGSTIKVFKKIANFTSDVEYSDDHCHLILPDSEAFQDVQGKRHRGKHKFKVKEMYLTKLLSTKVAIHSVLEKLFRSIWSLPNSRAPFAIKYFFDFLDAQAENKKITDPDVVHIWKTNSLPLRFWVNILKNPQFVFDIKKTPHIDGCLSVIAQAFMDAFSLTEQQLGKEAPTNKLLYAKDIPTYKEEVKSYYKAIRDLPPLSSSEMEEFLTQESKKHENEFNEEVALTEIYKYIVKYFDEILNKLERERGLEEAQKQLLHVKVLFDEKKKCKWM

SEQ ID NO: 159013 - protein, 615 aa, Artificial Sequence
  derived and/or modified sequence
MQHLCLLAAVGVTRHKSKELSRKQSQQLELLESELRKEIRDGFAELQMDKLDVVDSFGTVPFLDYKHFALRTFFPESGGFTHIFTEDMHNRDANDKNESLTALDALICNKSFLVTVIHTLEKQKNFSVKDRCLFASFLTIALQTKLVYLTSILEVLTRDLMEQCSNMQPKLMLRRTESVVEKLLTNWMSVCLSGFLRETVGEPFYLLVTTLNQKINKGPVDVITCKALYTLNEDWLLWQVPEFSTVALNVVFEKIPENESADVCRNISVNVLDCDTIGQAKEKIFQAFLSKNGSPYGLQLNEIGLELQMGTRQKELLDIDSSSVILEDGITKLNTIGHYEISNGSTIKVFKKIANFTSDVEYSDDHCHLILPDSEAFQDVQGKRHRGKHKFKVKEMYLTKLLSTKVAIHSVLEKLFRSIWSLPNSRAPFAIKYFFDFLDAQAENKKITDPDVVHIWKTNSLPLRFWVNILKNPQFVFDIKKTPHIDGCLSVIAQAFMDAFSLTEQQLGKEAPTNKLLYAKDIPTYKEEVKSYYKAIRDLPPLSSSEMEEFLTQESKKHENEFNEEVALTEIYKYIVKYFDEILNKLERERGLEEAQKQLLHVKVLFDEKKKCKWM

SEQ ID NO: 159014 - DNA, 4707 bp, Artificial Sequence
  derived and/or modified sequence
atggaggtgagcagaagaaaggccccccccagaccccccagacccgccgcccccctgcccctgctggcctacctgctggccctggccgcccccggcagaggcgccgacgagcccgtgtggagaagcgagcaggccatcggcgccatcgccgccagccaggaggacggcgtgttcgtggccagcggcagctgcctggaccagctggactacagcctggagcacagcctgagcagactgtacagagaccaggccggcaactgcaccgagcccgtgagcctggccccccccgccagacccagacccggcagcagcttcagcaagctgctgctgccctacagagagggcgccgccggcctgggcggcctgctgctgaccggctggaccttcgacagaggcgcctgcgaggtgagacccctgggcaacctgagcagaaacagcctgagaaacggcaccgaggtggtgagctgccacccccagggcagcaccgccggcgtggtgtacagagccggcagaaacaacagatggtacctggccgtggccgccacctacgtgctgcccgagcccgagaccgccagcagatgcaaccccgccgccagcgaccacgacaccgccatcgccctgaaggacaccgagggcagaagcctggccacccaggagctgggcagactgaagctgtgcgagggcgccggcagcctgcacttcgtggacgccttcctgtggaacggcagcatctacttcccctactacccctacaactacaccagcggcgccgccaccggctggcccagcatggccagaatcgcccagagcaccgaggtgctgttccagggccaggccagcctggactgcggccacggccaccccgacggcagaagactgctgctgagcagcagcctggtggaggccctggacgtgtgggccggcgtgttcagcgccgccgccggcgagggccaggagagaagaagccccaccaccaccgccctgtgcctgttcagaatgagcgagatccaggccagagccaagagagtgagctgggacttcaagaccgccgagagccactgcaaggagggcgaccagcccgagagagtgcagcccatcgccagcagcaccctgatccacagcgacctgaccagcgtgtacggcaccgtggtgatgaacagaaccgtgctgttcctgggcaccggcgacggccagctgctgaaggtgatcctgggcgagaacctgaccagcaactgccccgaggtgatctacgagatcaaggaggagacccccgtgttctacaagctggtgcccgaccccgtgaagaacatctacatctacctgaccgccggcaaggaggtgagaagaatcagagtggccaactgcaacaagcacaagagctgcagcgagtgcctgaccgccaccgacccccactgcggctggtgccacagcctgcagagatgcaccttccagggcgactgcgtgcacagcgagaacctggagaactggctggacatcagcagcggcgccaagaagtgccccaagatccagatcatcagaagcagcaaggagaagaccaccgtgaccatggtgggcagcttcagccccagacacagcaagtgcatggtgaagaacgtggacagcagcagagagctgtgccagaacaagagccagcccaacagaacctgcacctgcagcatccccaccagagccacctacaaggacgtgagcgtggtgaacgtgatgttcagcttcggcagctggaacctgagcgacagattcaacttcaccaactgcagcagcctgaaggagtgccccgcctgcgtggagaccggctgcgcctggtgcaagagcgccagaagatgcatccaccccttcaccgcctgcgaccccagcgactacgagagaaaccaggagcagtgccccgtggccgtggagaagaccagcggcggcggcagacccaaggagaacaagggcaacagaaccaaccaggccctgcaggtgttctacatcaagagcatcgagccccagaaggtgagcaccctgggcaagagcaacgtgatcgtgaccggcgccaacttcaccagagccagcaacatcaccatgatcctgaagggcaccagcacctgcgacaaggacgtgatccaggtgagccacgtgctgaacgacacccacatgaagttcagcctgcccagcagcagaaaggagatgaaggacgtgtgcatccagttcgacggcggcaactgcagcagcgtgggcagcctgagctacatcgccctgccccactgcagcctgatcttccccgccaccacctggatcagcggcggccagaacatcaccatgatgggcagaaacttcgacgtgatcgacaacctgatcatcagccacgagctgaagggcaacatcaacgtgagcgagtactgcgtggccacctactgcggcttcctggcccccagcctgaagagcagcaaggtgagaaccaacgtgaccgtgaagctgagagtgcaggacacctacctggactgcggcaccctgcagtacagagaggaccccagattcaccggctacagagtggagagcgaggtggacaccgagctggaggtgaagatccagaaggagaacgacaacttcaacatcagcaagaaggacatcgagatcaccctgttccacggcgagaacggccagctgaactgcagcttcgagaacatcaccagaaaccaggacctgaccaccatcctgtgcaagatcaagggcatcaagaccgccagcaccatcgccaacagcagcaagaaggtgagagtgaagctgggcaacctggagctgtacgtggagcaggagagcgtgcccagcacctggtacttcctgatcgtgctgcccgtgctgctggtgatcgtgatcttcgccgccgtgggcgtgaccagacacaagagcaaggagctgagcagaaagcagagccagcagctggagctgctggagagcgagctgagaaaggagatcagagacggcttcgccgagctgcagatggacaagctggacgtggtggacagcttcggcaccgtgcccttcctggactacaagcacttcgccctgagaaccttcttccccgagagcggcggcttcacccacatcttcaccgaggacatgcacaacagagacgccaacgacaagaacgagagcctgaccgccctggacgccctgatctgcaacaagagcttcctggtgaccgtgatccacaccctggagaagcagaagaacttcagcgtgaaggacagatgcctgttcgccagcttcctgaccatcgccctgcagaccaagctggtgtacctgaccagcatcctggaggtgctgaccagagacctgatggagcagtgcagcaacatgcagcccaagctgatgctgagaagaaccgagagcgtggtggagaagctgctgaccaactggatgagcgtgtgcctgagcggcttcctgagagagaccgtgggcgagcccttctacctgctggtgaccaccctgaaccagaagatcaacaagggccccgtggacgtgatcacctgcaaggccctgtacaccctgaacgaggactggctgctgtggcaggtgcccgagttcagcaccgtggccctgaacgtggtgttcgagaagatccccgagaacgagagcgccgacgtgtgcagaaacatcagcgtgaacgtgctggactgcgacaccatcggccaggccaaggagaagatcttccaggccttcctgagcaagaacggcagcccctacggcctgcagctgaacgagatcggcctggagctgcagatgggcaccagacagaaggagctgctggacatcgacagcagcagcgtgatcctggaggacggcatcaccaagctgaacaccatcggccactacgagatcagcaacggcagcaccatcaaggtgttcaagaagatcgccaacttcaccagcgacgtggagtacagcgacgaccactgccacctgatcctgcccgacagcgaggccttccaggacgtgcagggcaagagacacagaggcaagcacaagttcaaggtgaaggagatgtacctgaccaagctgctgagcaccaaggtggccatccacagcgtgctggagaagctgttcagaagcatctggagcctgcccaacagcagagcccccttcgccatcaagtacttcttcgacttcctggacgcccaggccgagaacaagaagatcaccgaccccgacgtggtgcacatctggaagaccaacagcctgcccctgagattctgggtgaacatcctgaagaacccccagttcgtgttcgacatcaagaagaccccccacatcgacggctgcctgagcgtgatcgcccaggccttcatggacgccttcagcctgaccgagcagcagctgggcaaggaggcccccaccaacaagctgctgtacgccaaggacatccccacctacaaggaggaggtgaagagctactacaaggccatcagagacctgccccccctgagcagcagcgagatggaggagttcctgacccaggagagcaagaagcacgagaacgagttcaacgaggaggtggccctgaccgagatctacaagtacatcgtgaagtacttcgacgagatcctgaacaagctggagagagagagaggcctggaggaggcccagaagcagctgctgcacgtgaaggtgctgttcgacgagaagaagaagtgcaagtggatgtag

SEQ ID NO: 159015 - DNA, 1848 bp, Artificial Sequence
  derived and/or modified sequence
atgcagcacctgtgcctgctggccgccgtgggcgtgaccagacacaagagcaaggagctgagcagaaagcagagccagcagctggagctgctggagagcgagctgagaaaggagatcagagacggcttcgccgagctgcagatggacaagctggacgtggtggacagcttcggcaccgtgcccttcctggactacaagcacttcgccctgagaaccttcttccccgagagcggcggcttcacccacatcttcaccgaggacatgcacaacagagacgccaacgacaagaacgagagcctgaccgccctggacgccctgatctgcaacaagagcttcctggtgaccgtgatccacaccctggagaagcagaagaacttcagcgtgaaggacagatgcctgttcgccagcttcctgaccatcgccctgcagaccaagctggtgtacctgaccagcatcctggaggtgctgaccagagacctgatggagcagtgcagcaacatgcagcccaagctgatgctgagaagaaccgagagcgtggtggagaagctgctgaccaactggatgagcgtgtgcctgagcggcttcctgagagagaccgtgggcgagcccttctacctgctggtgaccaccctgaaccagaagatcaacaagggccccgtggacgtgatcacctgcaaggccctgtacaccctgaacgaggactggctgctgtggcaggtgcccgagttcagcaccgtggccctgaacgtggtgttcgagaagatccccgagaacgagagcgccgacgtgtgcagaaacatcagcgtgaacgtgctggactgcgacaccatcggccaggccaaggagaagatcttccaggccttcctgagcaagaacggcagcccctacggcctgcagctgaacgagatcggcctggagctgcagatgggcaccagacagaaggagctgctggacatcgacagcagcagcgtgatcctggaggacggcatcaccaagctgaacaccatcggccactacgagatcagcaacggcagcaccatcaaggtgttcaagaagatcgccaacttcaccagcgacgtggagtacagcgacgaccactgccacctgatcctgcccgacagcgaggccttccaggacgtgcagggcaagagacacagaggcaagcacaagttcaaggtgaaggagatgtacctgaccaagctgctgagcaccaaggtggccatccacagcgtgctggagaagctgttcagaagcatctggagcctgcccaacagcagagcccccttcgccatcaagtacttcttcgacttcctggacgcccaggccgagaacaagaagatcaccgaccccgacgtggtgcacatctggaagaccaacagcctgcccctgagattctgggtgaacatcctgaagaacccccagttcgtgttcgacatcaagaagaccccccacatcgacggctgcctgagcgtgatcgcccaggccttcatggacgccttcagcctgaccgagcagcagctgggcaaggaggcccccaccaacaagctgctgtacgccaaggacatccccacctacaaggaggaggtgaagagctactacaaggccatcagagacctgccccccctgagcagcagcgagatggaggagttcctgacccaggagagcaagaagcacgagaacgagttcaacgaggaggtggccctgaccgagatctacaagtacatcgtgaagtacttcgacgagatcctgaacaagctggagagagagagaggcctggaggaggcccagaagcagctgctgcacgtgaaggtgctgttcgacgagaagaagaagtgcaagtggatgtag

SEQ ID NO: 159016 - DNA, 4707 bp, Artificial Sequence
  derived and/or modified sequence
atggaagtgtcccggaggaaagccccaccccggccaccgaggccggctgcgccactgcccttattggcctacttactcgccctcgccgccccaggccgcggagccgacgagcctgtgtggcgatctgaacaggcaataggcgctatcgccgcctctcaggaggacggggtgttcgtcgcatcgggctcctgcctagaccagttggattatagcctggaacatagtctgtccaggctgtatagggatcaggctggaaactgtaccgagcctgtctcactcgccccacctgctcggcctcggcccgggagttcttttagcaagctccttctgccttatagagagggcgcagccgggctcgggggtctcctgctgacaggctggacattcgatcggggcgcttgtgaggttagacctctcgggaatctgtcccgaaattctcttcggaatggcacagaggttgtatcttgtcacccacagggcagcaccgccggagtggtttacagggcggggcgcaacaaccgctggtatctcgccgtggccgccacgtatgttctgcccgaacccgagactgcctctaggtgtaaccccgctgccagtgaccacgacaccgctatcgcactcaaggatacggagggcagaagcctggcaacacaggagttgggcagattgaaactgtgtgagggcgctggaagcctccacttcgtggacgcatttttgtggaacgggtctatatacttcccctattacccatataactacaccagcggcgcagccactggctggccctccatggcacggatcgctcaatctaccgaggtgctgtttcaaggccaggcttcactcgattgcggacatggccatcccgacggcagacgacttctattgtcttctagtctggtcgaagcgctagacgtgtgggcgggagtgttctcagcagctgccggtgagggacaggaaaggcgctcccccactacgactgcactatgtcttttcagaatgtctgagattcaggccagggcaaaaagagtgagctgggatttcaaaacagccgagtcccattgcaaagagggcgaccaacctgaacgagtccagcccatcgcttcctctactcttattcactccgatttgacctccgtctatgggactgtggtcatgaaccggactgtgctcttcctgggaaccggtgacggacaactgctgaaagttatcttgggcgagaatctcacttcaaactgccccgaagtgatctacgagattaaagaggagacacccgtcttttataagctggtgcctgacccagtgaagaacatttacatctatctaacagctggaaaagaggttcgcagaatccgcgtcgccaactgtaacaagcataaatcgtgtagtgaatgtctgacagctaccgacccacactgcggatggtgccactcccttcagcgctgtacatttcagggagactgcgtgcactcagaaaacctggagaattggctcgatattagctcaggtgcaaaaaagtgcccgaagatccaaataattcgatcctctaaggaaaaaacaactgtcacgatggttgggtctttcagccccaggcacagtaaatgcatggtgaagaacgtggacagttctagagagctctgccaaaacaagtctcagcctaaccgcacatgtacttgcagtatacccacccgggccacatacaaggacgtaagtgttgtcaatgtaatgttttctttcggctcctggaatctgagtgaccgtttcaattttaccaactgcagtagtctgaaggaatgcccagcttgcgtcgagaccggctgtgcatggtgcaagagtgcccgaaggtgtatccatccctttacggcctgcgaccctagtgactacgagcggaatcaagagcagtgccccgtggctgtggaaaaaacatccggtgggggcagacccaaagagaacaaaggcaacagaacaaatcaggccctgcaggtcttctacatcaagtcaatcgagcctcaaaaggtaagcacactggggaaatcaaacgtgatcgtgacaggcgcaaacttcacccgtgcttcaaacatcacaatgatcttgaagggaacgtccacatgcgacaaggatgtcattcaggtctctcatgtactgaatgacacacacatgaagttcagtttgccatcaagtagaaaggagatgaaggacgtgtgcattcagttcgacggggggaattgttctagcgtgggctcactttcttacatagcgctgccacactgtagtctgatctttcctgcaactacctggatctccggagggcaaaacatcacaatgatgggaagaaacttcgacgtgatcgacaatctgatcatcagtcacgaattgaagggcaacataaatgtgtcggaatactgcgtggcaacttattgcggcttcttggccccttcactgaagagcagtaaggtgaggacaaatgtgaccgtcaagttgcgcgtgcaggatacatatttagattgcggtactctgcagtacagagaggatcctaggttcaccggttaccgggttgagagtgaggtggacacagaattggaagttaagattcagaaggagaatgacaacttcaatatatccaagaaagacattgaaatcaccctgttccacggggagaatggacaactgaattgctcattcgaaaacattaccagaaaccaggatttgaccaccatcctatgtaaaattaagggcatcaaaacagcaagcaccatcgccaattcatcaaaaaaggtgcgtgtgaaactcggcaacctggagctgtatgtagagcaggagtcagtgcccagcacttggtattttctcattgtgctgcctgtgctcttggtcatcgtgatctttgccgcggtcggggtgaccagacataagtccaaagagctgagcaggaagcagagccagcaactggagctgctggagtcagagcttcggaaagagataagggatgggttcgccgaattgcagatggataaactcgacgttgtggactctttcggcactgtccctttcctcgattacaagcacttcgcccttagaacattttttcccgagtcaggcgggtttacacacattttcaccgaggacatgcataaccgggatgccaacgataaaaatgagtcactgactgctctcgacgcacttatctgcaataagtccttcttagttaccgtgattcacaccctcgaaaaacagaagaacttttccgttaaggatcggtgtctgtttgcttcatttctcaccatagctttgcaaacaaagctcgtttacctgacaagtatattagaggtactgacacgagacctgatggagcagtgctcgaacatgcagcctaaattgatgctgcgtcgcaccgagagcgtggtggagaaacttttaaccaactggatgtccgtctgcctctctggatttctcagggagaccgttggggagcccttctacctgttagttactacgctgaatcagaaaatcaataaaggccccgtcgacgttataacttgtaaggcactttatacgctaaacgaggactggcttttgtggcaagtgccagagttttcaaccgtggccctcaacgtcgtgttcgagaagattcctgagaacgaaagtgctgacgtatgtaggaatatttcagtgaacgtgctagattgcgataccatcggtcaggcaaaggagaagatctttcaggctttcctcagtaagaatgggtcaccttacggcttgcagctcaacgagattggtctcgagctccagatgggcacaagacagaaggagttgctggacattgacagctctagtgtgatacttgaggatggcattacaaagcttaatacaatcggccactacgagatctccaatggatctacaattaaggtgttcaagaaaattgccaacttcacctccgacgtagagtactctgacgatcattgtcaccttatcctccccgacagcgaggcttttcaagacgttcaaggtaaacgacaccggggcaaacacaagtttaaggtcaaggaaatgtatctgacaaagctcctgagtaccaaggtggcaattcactctgtcctggagaagcttttcaggagtatctggagtttgcccaactcgagagcccccttcgcaattaagtactttttcgacttccttgatgcccaggcagagaacaagaaaattactgaccccgacgtagtgcacatctggaaaaccaatagcttgcccttgcggttctgggtcaacattctgaagaatcctcagttcgtgtttgatatcaagaagacacctcacattgatggatgtcttagcgtgattgctcaagcctttatggatgcattctccctgacagaacagcagctgggcaaggaggctcctacgaataaacttctgtatgccaaagacattcccacctacaaggaggaggtgaaatcctactataaggcgatccgagacctcccacccctctcatccagcgaaatggaggagtttcttacacaggaatctaagaagcatgagaatgaattcaacgaggaggtggcgctcacagaaatctacaaatacattgtgaagtacttcgatgagatattaaataaactggaacgggagaggggcttggaagaagcccaaaaacaactgcttcacgtcaaggtgctgtttgatgagaagaaaaaatgcaaatggatgtag

SEQ ID NO: 159017 - DNA, 1848 bp, Artificial Sequence
  derived and/or modified sequence
atgcaacacctctgccttctagctgccgtcggggttacccgacacaaaagcaaagagctgagccgcaaacagtcacagcagcttgagcttttagaatctgaactaaggaaggagatcagagatggctttgctgaattgcagatggataagttagacgtagtggattcatttggaacagtaccctttctcgattataaacacttcgctctgagaacattttttccagagtctggaggattcactcacattttcacggaggacatgcacaaccgagacgctaacgataaaaatgagtcgctcacagccctggacgctttgatctgcaacaagtcattcctggttacagtcatccatacgctggagaaacagaagaatttctccgttaaggatcgatgtttatttgcttcttttttaaccatcgcgttgcagacaaagctggtgtacttgacgtccattctcgaagtgcttactcgcgaccttatggagcagtgtagcaacatgcagcctaaattgatgttgcgtagaactgagtccgtggtggagaagttgttgaccaattggatgtccgtatgtttgtccggcttcctgagggaaacagtcggagagcctttctaccttcttgtcacaactttgaatcagaagatcaacaaggggccagttgatgttatcacgtgtaaagccctctatacactcaacgaagattggttgctgtggcaagtgccagaattctctacagtggccttgaatgtcgtgtttgagaaaattcccgagaacgaaagcgccgatgtgtgtagaaatatcagcgtgaacgtgctagactgcgatacaataggacaggctaaagaaaagattttccaagcatttctctctaaaaacggctccccctacggactccagctcaacgaaatagggctggagctgcagatgggcacccgtcagaaggagcttctggacatcgacagctcgagtgtgattctagaggacggcattactaagctcaacacaatagggcattacgagataagtaatggctcgactattaaggtctttaaaaagatcgccaattttacgtccgacgtggaatactcagacgaccactgtcatctcatcctgcctgattcagaagccttccaggatgtgcagggcaaacggcaccgagggaagcataagttcaaagttaaggagatgtatctgacaaaactcctaagcacgaaagtagccatacacagcgtgcttgaaaagttgttcagatcaatttggagcctcccaaatagtcgcgcaccatttgcaatcaagtatttttttgactttctggacgctcaggccgagaacaagaaaataacggaccccgatgtcgtgcacatatggaagacgaactcgctgccactgcgcttctgggtgaacatccttaaaaatcctcaattcgtattcgacatcaagaagactcctcatattgacggctgcctgtcagtgattgcccaggcatttatggacgccttcagtcttaccgagcaacaactgggaaaagaggcaccaactaataaactgctgtatgctaaggacattcccacctacaaagaggaagttaagtcatactacaaggcaatccgggatctgccacctttatctagttctgagatggaagagtttctcacacaagagagtaaaaagcatgaaaatgaattcaatgaggaggtggctctgactgaaatttataagtatattgtgaagtacttcgacgagatcctgaataaactggaacgtgaacgtgggttagaggaggcgcagaagcagctcctccatgttaaggtcttattcgatgagaagaaaaaatgtaaatggatgtag

SEQ ID NO: 159018 - DNA, 4707 bp, Artificial Sequence
  derived and/or modified sequence
atggaggtgtccaggaggaaggccccaccccggccccccaggcctgctgcccccctgcccctgctggcctacctgctggccctggccgcccctggaagaggagcagatgagcctgtgtggaggtctgagcaggccatcggggccatcgccgccagccaggaggatggagtgtttgtggccagcggcagctgcctggaccagctggactacagcctggagcacagcctgagccggctgtacagagaccaggccggcaactgcacagagcctgtgtccctggcccccccagcccggcccaggcctggcagcagcttcagcaagctgctgctgccctaccgggagggcgctgctggcctgggcggcctgctgctgaccggctggacctttgacagaggagcctgtgaggtgcggcccctgggcaacctgagcaggaacagcctgagaaatggaacagaggtggtgtcctgccacccccagggcagcacagctggggtggtgtacagagctggaagaaacaaccgctggtacctggccgtggccgccacctacgtgctgcctgagcctgagacagccagccgctgcaacccagctgccagtgaccatgacacagccatcgccctgaaggacacagagggccgcagcctggccacccaggagctgggccgcctgaagctgtgtgagggcgccggcagcctgcactttgtggatgccttcctgtggaatggcagcatctacttcccctactacccctacaactacaccagcggggccgccaccggctggcccagcatggccagaattgcccagagcacagaggtgctcttccagggccaggccagcctggactgtggccacggccacccagatggaagaaggctgctgctgagcagcagcctggtggaggccctggatgtgtgggccggggtcttctctgctgctgctggggagggccaggagcggcgcagccccaccaccacagccctgtgcctcttcaggatgtctgagatccaggcccgggccaagagggtgtcctgggacttcaagacagctgagagccactgcaaggagggggaccagcctgagcgggtgcagcccatcgccagcagcaccctcatccacagcgacctgacctctgtgtatggcaccgtggtgatgaacagaacagtgctcttcctgggcactggagatggccagctgctgaaggtgatcctgggggagaacctgaccagcaactgcccagaggtgatctatgagatcaaggaggagacccctgtgttctacaagctggtgcctgaccctgtgaagaacatctacatctacctgacagctgggaaggaggtgcggcgcatccgggtggccaactgcaacaagcacaagagctgcagtgaatgtctgacagccacagacccccactgcggctggtgccacagcctgcagcgctgcaccttccagggcgactgtgtgcacagcgagaacctggagaactggctggacatcagcagcggggccaagaagtgccccaagatccagatcatccgcagcagcaaggagaagaccaccgtgaccatggtgggcagcttcagccccaggcacagcaagtgcatggtgaagaatgtggacagcagccgggagctgtgccagaacaagagccagcccaacagaacctgcacctgcagcatccccacccgggccacctacaaggatgtgtctgtggtgaatgtgatgttctcctttggctcctggaacctgagtgaccgcttcaacttcaccaactgcagcagcctgaaggaatgtcctgcctgtgtggagaccggctgtgcctggtgcaagagcgcccggcgctgcatccaccccttcaccgcctgtgaccccagcgactatgaaagaaaccaggagcagtgccctgtggccgtggagaagaccagcggcggcggccggcccaaggaaaataaaggaaacagaaccaaccaggccctgcaggtgttctacatcaagagcattgagccccagaaggtgtccaccctgggcaagagcaatgtgattgtgactggagccaacttcacccgggccagcaacatcaccatgatcctgaagggcaccagcacctgtgacaaggatgtgatccaggtgagccacgtgctgaatgacacccacatgaagttcagcctgcccagcagcaggaaggagatgaaggatgtgtgcatccagtttgatggcggcaactgcagctctgtgggcagcctgagctacatcgccctgccccactgcagcctcatcttccctgccaccacctggatcagcggcggccagaacatcaccatgatgggcaggaactttgatgtgattgacaacctgatcatcagccatgagctgaagggcaacatcaacgtgtctgagtactgtgtggccacctactgcggcttcctggcccccagcctgaagagcagcaaggtgaggaccaacgtgacagtgaagctgcgggtgcaggacacctacctggactgtggcaccctgcagtaccgggaggacccccgcttcaccggctacagagtggagagcgaggtggacacagagctggaggtgaagatccagaaggaaaatgacaacttcaacatcagcaagaaggacatcgagatcaccctcttccatggagaaaatggccagctgaactgcagctttgagaacatcaccaggaaccaggacctgaccaccatcctgtgcaagatcaagggcatcaagacagccagcaccatcgccaacagcagcaagaaggtgcgggtgaagctgggcaacctggagctgtatgtggagcaggagagcgtgcccagcacctggtacttcctgattgtgctgcctgtgctgctggtgattgtcatctttgctgctgtgggcgtgaccaggcacaagagcaaggagctgagcaggaagcagagccagcagctggagctgctggagagcgagctgaggaaggagatcagagatggctttgctgagctgcagatggacaagctggatgtggtggacagctttggcaccgtgcccttcctggactacaagcactttgccctgcggaccttcttccctgagagcggcggcttcacccacatcttcacagaggacatgcacaacagagatgccaatgacaagaatgaaagcctgacagccctggatgccctgatctgcaacaagagcttcctggtgaccgtcatccacaccctggagaagcagaagaacttctctgtgaaggaccgctgcctgtttgccagcttcctgaccatcgccctgcagaccaagctggtgtacctgaccagcatcctggaggtgctgacccgggacctgatggagcagtgcagcaacatgcagcccaagctgatgctgcggaggacagaatctgtggtggagaagctgctgaccaactggatgtctgtgtgcctgagcggcttcctgcgggagaccgtgggggagcccttctacctgctggtgaccaccctgaaccagaagatcaacaagggccctgtggatgtgatcacctgcaaggccctgtacaccctgaatgaagactggctgctgtggcaggtgcctgagttcagcacagtggccctgaatgtggtgtttgagaagatcccagaaaatgaatctgcagatgtgtgcaggaacatctctgtgaatgtgctggactgtgacaccatcggccaggccaaggagaagatcttccaggccttcctgagcaagaatggcagcccctacggcctgcagctgaatgagatcggcctggagctgcagatgggcacccggcagaaggagctgctggacatcgacagcagcagcgtcatcctggaggatggcatcaccaagctgaacaccatcggccactatgagatcagcaatggcagcaccatcaaggtgttcaagaagatcgccaacttcaccagtgatgtggagtacagtgatgaccactgccacctgatcctgcctgattctgaggccttccaggatgtgcagggcaagaggcaccggggcaagcacaagttcaaggtgaaggagatgtacctgaccaagctgctgagcaccaaggtggccatccacagcgtgctggagaagctgttccgcagcatctggagcctgcccaacagccgggccccctttgccatcaagtacttctttgacttcctggatgcccaggccgagaacaagaagatcacagatcctgatgtggtgcacatctggaagaccaacagcctgcccctgcgcttctgggtgaacatcctgaagaacccccagtttgtgtttgacatcaagaagaccccccacattgatggctgcctgtctgtgattgcccaggccttcatggatgccttcagcctgacagagcagcagctgggcaaggaggcccccaccaacaagctgctgtatgccaaggacatccccacctacaaggaggaggtgaagagctactacaaggccatccgggacctgccccccctgagcagcagcgagatggaggagttcctgacccaggagagcaagaagcatgaaaatgagttcaatgaggaggtggccctgacagagatctacaagtacatcgtgaagtactttgatgagatcctgaacaagctggagcgggagcggggcctggaggaggcccagaagcagctgctgcacgtgaaggtgctgtttgatgagaagaagaagtgcaagtggatgtag

SEQ ID NO: 159019 - DNA, 1848 bp, Artificial Sequence
  derived and/or modified sequence
atgcagcacctgtgcctgctggccgctgtgggcgtgaccaggcacaagagcaaggagctgagcaggaagcagagccagcagctggagctgctggagagcgagctgaggaaggagatcagagatggctttgctgagctgcagatggacaagctggatgtggtggacagctttggaacagtgcccttcctggactacaagcactttgccctgcggaccttcttccctgagagcggcggcttcacccacatcttcacagaggacatgcacaacagagatgccaatgacaagaatgaaagcctgacagccctggatgccctgatctgcaacaagagcttcctggtgaccgtcatccacaccctggagaagcagaagaacttctctgtgaaggaccgctgcctgtttgccagcttcctgaccatcgccctgcagaccaagctggtgtacctgaccagcatcctggaggtgctgacccgggacctgatggagcagtgcagcaacatgcagcccaagctgatgctgcggaggacagagagcgtggtggagaagctgctgaccaactggatgtctgtgtgcctgagcggcttcctgcgggagaccgtgggggagcccttctacctgctggtgaccaccctgaaccagaagatcaacaagggccctgtggatgtgatcacctgcaaggccctgtacaccctgaatgaagactggctgctgtggcaggtgcctgagttcagcacagtggccctgaatgtggtgtttgagaagatcccagaaaatgaatctgcagatgtgtgcaggaacatctctgtgaatgtgctggactgtgacaccatcggccaggccaaggagaagatcttccaggccttcctgagcaagaatggcagcccctacggcctgcagctgaatgaaattggcctggagctgcagatgggcacccggcagaaggagctgctggacatcgacagcagcagcgtcatcctggaggatggcatcaccaagctgaacaccatcggccactatgagatcagcaatggcagcaccatcaaggtgttcaagaagatcgccaacttcaccagtgatgtggagtacagtgatgaccactgccacctgatcctgcctgacagcgaggccttccaggatgtgcagggcaagaggcaccggggcaagcacaagttcaaggtgaaggagatgtacctgaccaagctgctgagcaccaaggtggccatccacagcgtgctggagaagctgttccgcagcatctggagcctgcccaacagccgggccccctttgccatcaagtacttctttgacttcctggatgcccaggccgagaacaagaagatcacagatcctgatgtggtgcacatctggaagaccaacagcctgcccctgcgcttctgggtgaacatcctgaagaacccccagtttgtgtttgacatcaagaagaccccccacattgatggctgcctgagcgtcatcgcccaggccttcatggatgccttcagcctgacagagcagcagctgggcaaggaggcccccaccaacaagctgctgtatgccaaggacatccccacctacaaggaggaggtgaagagctactacaaggccatccgggacctgccccccctgagcagcagcgagatggaggagttcctgacccaggagagcaagaagcatgaaaatgagttcaatgaggaggtggccctgacagagatctacaagtacatcgtgaagtactttgatgagatcctgaacaagctggagcgggagcggggcctggaggaggcccagaagcagctgctgcacgtgaaggtgctgtttgatgagaagaagaagtgcaagtggatgtag

SEQ ID NO: 159020 - DNA, 4707 bp, Artificial Sequence
  derived and/or modified sequence
atggaggtgagccggcggaaggcccccccccggcccccccggcccgctgctccactgcccctgctcgcatatctgctggcattggccgctcctgggaggggtgctgatgaacctgtgtggagatctgaacaggccatcggcgcaattgctgcttcccaggaggatggggtattcgtggcaagcggatcctgtctcgatcagctggactacagccttgagcacagtctgtctcgtctttatcgtgaccaggctggaaactgtacagagccagtcagtctggctccccctgctagacctagacctggctcatcgttttctaaacttcttttgccatatagggagggcgccgcaggcctgggggggttgctactgaccggatggacattcgatcggggagcatgcgaggtcaggccactgggcaaccttagccggaattcactgaggaatggaaccgaggtggtttcttgccacccacagggctccacggccggcgtcgtctaccgggctggccgaaataacagatggtacctcgccgtggccgctacatacgtgctgcctgaacccgagaccgcttctagatgcaacccagccgccagcgaccatgataccgccatagccctgaaggacactgaaggacggtccttagccactcaggagctgggtcgactaaagttatgtgagggtgctggatcactccattttgtggacgcatttctgtggaacggctccatctatttcccatactacccatacaattacaccagcggggctgccacaggttggccgtcgatggcccgcatcgctcaatcaacagaggttttgttccagggtcaggcttctctcgattgtgggcatggccatcccgacggtcgcagattactattaagctcctccctggtggaggcattggatgtgtgggccggggtcttcagtgctgcggccggggagggtcaggagagaagatccccaacgaccactgctctctgcctcttccgcatgagcgagattcaggctcgtgccaagcgtgtctcctgggacttcaagacagccgaatctcattgtaaagagggtgatcagcccgaaagagttcagcctattgccagtagcacgctgattcattcggacctcacaagcgtttatggtaccgtggtgatgaaccggactgtccttttcttgggtaccggcgatggccagttgttaaaagtgattttaggtgagaacctgacatcaaactgtccagaggtgatctacgagattaaagaagagaccccagtgttctataagctcgtgcctgacccagtaaagaacatttatatttaccttacagccgggaaagaagttcggagaatcagggtggctaattgcaacaaacacaaatcgtgtagcgagtgcctgacagctaccgacccccattgtgggtggtgtcactcccttcagagatgcacgttccaaggagactgtgtgcattccgagaatttggagaattggctggacatcagtagcggagctaaaaaatgccccaagattcagatcattcggtccagcaaggaaaagactaccgtgacaatggtgggatctttcagccccagacattcgaagtgcatggtgaagaatgtagatagttctcgagaactgtgccagaataagtcccagcccaaccgtacctgcacttgttctatccctacccgggccacctataaggatgtctccgtagtcaatgtcatgttctcttttgggagctggaatttatccgacagattcaacttcaccaattgctctagcttgaaagagtgtccagcgtgtgttgaaacgggctgcgcttggtgcaaatccgcaagacgttgtattcacccctttaccgcttgcgatccttcagactacgagaggaatcaggaacaatgtccagtcgccgtcgaaaagacaagcggcggggggagaccaaaggagaataaaggtaatcgaactaaccaagccctgcaggttttttatataaagtctatcgagccacagaaagtgtctaccttgggcaaaagcaatgttatcgtcaccggcgccaactttacaagggcttctaacattaccatgatacttaaggggacaagtacatgcgataaagacgtaatacaggtttcacacgttctcaatgacacacatatgaagttctcattgccatccagcagaaaagagatgaaagatgtttgcattcagttcgacgggggcaattgcagttctgtgggatctctgtcatacatcgctctgccccactgcagtctgatttttccagccacaacttggattagcgggggccagaacatcactatgatggggcgcaattttgacgtaattgataatctgatcatctcccacgaattgaagggcaatatcaacgtgtctgagtattgtgtcgccacatattgcggattcctggccccaagcctaaagagttccaaagttagaaccaacgtcaccgtcaaacttcgagttcaggatacatatctggactgtggaaccttgcagtatcgcgaggaccctaggttcacaggttatcgggtcgagagtgaggtggatactgaactggaggtgaaaatccagaaagaaaacgataacttcaacatcagtaagaaggatatcgaaattaccctgtttcacggagagaacggacagttgaactgctcattcgagaatatcacgagaaaccaagacctgacaacaattttatgcaagattaaggggattaaaaccgcatccactattgcaaactccagcaaaaaggtccgggtcaagcttggcaacctggagctttacgtggagcaagagtccgtaccttctacctggtactttctgattgtgctgccagtgttgctagtgatcgtgattttcgccgctgtcggggtaacgaggcataagtcaaaggagctgagcagaaaacaaagccagcagttggagctcctggagagcgagcttcgaaaggaaattcgagacggattcgctgagttgcaaatggacaaactggatgtcgtggactctttcggtacagtgccctttcttgattacaaacactttgcattacggacattctttcctgagtccggtggcttcactcacatcttcacggaggacatgcataaccgcgatgccaacgacaagaacgaatcactgactgcactggacgcgcttatttgcaataagagctttttggtaactgtgatccatacattggagaagcaaaaaaacttttccgtgaaagatcggtgcctttttgccagctttctcaccatcgctctgcaaactaagcttgtgtacctgacttcaatcctcgaagttcttacacgggatctgatggagcaatgcagtaatatgcaacctaagctgatgctgagacggacagagtcagtggtggagaagttactgaccaactggatgagtgtgtgcctatctggcttcctgcgtgagaccgtgggtgagcctttctacctattggtgactacccttaatcagaagatcaacaaaggcccggtggacgtaatcacgtgtaaggctctttacactctcaatgaggattggctgttgtggcaggttcctgaatttagtacagtagctctgaacgtggtgtttgagaaaatccccgagaatgagtcagcagacgtgtgccgtaacatcagcgtgaatgtgctcgattgcgacaccattggccaggctaaagagaagattttccaagcattcctctcgaagaatggatctccttacggactgcagctaaatgaaattgggctcgaactgcagatgggcactcgacagaaggagcttctcgatattgattcctccagtgttattcttgaggatgggattactaagctgaacacaataggacactacgagatcagtaacgggtctacgatcaaagtgttcaagaaaatagcgaatttcactagcgacgtcgagtatagtgacgatcattgccacctgatcctacccgacagcgaagcattccaggacgtgcaaggcaaaaggcatcgagggaagcacaagtttaaagtgaaagaaatgtacctcaccaaactgttgagcactaaggtggctatccactctgtacttgaaaagctgttccgctctatttggtctctccccaattcccgagctccttttgcaattaaatacttcttcgactttcttgatgcccaggcagagaataaaaagattacggatcctgacgtggtacacatttggaagaccaatagtcttcctctacggttctgggtgaacatcctgaaaaatccccaattcgtgttcgacattaaaaaaacgccccacattgatggctgcctgtccgttatcgcgcaggcttttatggatgcttttagtctgactgaacagcaactcggaaaagaggctccgacgaataagctgttgtatgctaaggatatccctacatacaaggaggaggttaaaagttactataaagccattagggacctcccacctctaagcagctctgagatggaagagtttctgacgcaggagtccaaaaagcacgagaatgaattcaacgaggaggtcgctctcacagaaatctataaatacattgtgaaatatttcgacgaaattctgaacaagctcgagcgggaacgggggctcgaggaagctcagaaacagctgctgcacgtgaaggttttgttcgacgagaagaagaagtgtaagtggatgtag

SEQ ID NO: 159021 - DNA, 1848 bp, Artificial Sequence
  derived and/or modified sequence
atgcagcacctgtgcctgctggccgccgtgggcgtgacccggcacaagagtaaagagctgtctagaaaacagagccaacaactggagttgctggagtccgaactcagaaaggagatccgagatgggttcgctgagctccagatggataagctggatgtggtagatagctttggcacggttccattcctggattacaaacatttcgccctccggaccttttttcccgaatcgggggggtttactcatattttcactgaagacatgcacaatcgcgacgcaaatgacaaaaacgaatctttgacggcactagacgcgttgatttgcaacaagtccttcctggtgactgtcatccacaccctggagaaacagaagaattttagcgtaaaagaccgctgcctgttcgccagctttctgactatcgccctccaaactaagctggtctacctgacttcaatcctggaggtgctgacccgtgaccttatggaacaatgttctaatatgcaaccaaagctgatgttaaggagaaccgagtcagtggtcgagaaactgctgacaaattggatgtcagtatgcctgtcagggtttctgagggagaccgtgggggaacctttttacttgctggttaccacactgaaccagaagattaataaaggccccgtggatgtcattacctgtaaggcactctacaccttaaacgaggactggctcctgtggcaggtgccggaattctccacagtagccctgaatgtggtctttgagaagatccccgaaaatgaatctgccgacgtgtgtagaaatatatcagtgaacgtcctagactgcgacacaatcggtcaagccaaggaaaagatcttccaggcatttctgtcaaaaaatgggagcccatacggcctgcagttgaatgaaatcggcctggagctgcagatggggacccggcagaaggaactactggacattgattccagctctgttatcctggaagacggcattactaaattaaacacaatcggacattatgagatctccaatggtagcaccatcaaggtgtttaagaagatcgcaaatttcacaagcgacgtcgagtatagcgatgaccactgccatttaatcctgccagacagcgaggcgttccaggatgttcagggcaaacgccacagagggaaacacaagttcaaagtgaaggagatgtacctgaccaaactattatccactaaagtggcaatacattcagtgctagagaaactgttcaggtctatctggagcctcccaaactcaagggcccctttcgctattaagtacttctttgacttcctcgacgcccaggcagaaaataaaaagatcactgatccagacgtcgtgcatatctggaagactaactcccttcccctccggttctgggttaatatccttaagaacccccagtttgttttcgacattaagaagactccgcacatcgacggatgcctgagtgtcattgcacaggctttcatggacgcattcagtctcaccgaacagcaacttggcaaagaagctccaacaaataaactgttgtatgctaaggacatcccgacctataaggaggaagtcaagagttactacaaagcaataagagacttgccacctctctccagttcagaaatggaagaattcctcacccaggaatccaagaaacatgaaaacgaatttaacgaggaggtcgctcttaccgaaatatataagtatattgtgaagtacttcgatgagatcctgaataaactggagagagaacggggactcgaggaagctcagaagcagctactgcacgttaaagttctgttcgatgaaaaaaaaaaatgcaagtggatgtag

SEQ ID NO: 159022 - DNA, 7346 bp, Artificial Sequence
  derived and/or modified sequence
gcgaggaggaaacggtgccggagcgcgcagggcttgctgccgccaccgccgctgcacaggctgccggagcgagcctgccgcgcgccgccctccccgctctccttcctgggcgagctgcggggatggggcggccgcgggagcccgagcgcgcgcaggaaccgccgccgccgccgcccgcgtctccgttgccgcgcgcctgagccgccgtcgccgccgcgcgccctgcccgggggcggcccccccagccccatggaggtctcccggaggaaggcgccgccgcgccccccgcgccccgcagcgccactgcccctgctcgcctatctgctggcactggcggctcccggccggggcgcggacgagcccgtgtggcggtcggagcaagccatcggagccatcgcggcgagccaggaggacggcgtgtttgtggcgagcggcagctgcctggaccagctggactacagcctggagcacagcctctcgcgcctgtaccgggaccaagcgggcaactgcacagagccggtctcgctggcgccccccgcgcggccccggcccgggagcagcttcagcaagctgctgctgccctaccgcgagggggcggccggcctcggggggctgctgctcaccggctggaccttcgaccggggcgcctgcgaggtgcggcccctgggcaacctgagccgcaactccctgcgcaacggcaccgaggtggtgtcgtgccacccgcagggctcgacggccggcgtggtgtaccgcgcgggccggaacaaccgctggtacctggcggtggccgccacctacgtgctgcctgagccggagacggcgagccgctgcaaccccgcggcatccgaccacgacacggccatcgcgctcaaggacacggaggggcgcagcctggccacgcaggagctggggcgcctcaagctgtgcgagggcgcgggcagcctgcacttcgtggacgcctttctctggaacggcagcatctacttcccctactacccctacaactacacgagcggcgctgccaccggctggcccagcatggcgcgcatcgcgcagagcaccgaggtgctgttccagggccaggcatccctcgactgcggccacggccaccccgacggccgccgcctgctcctctcctccagcctagtggaggccctggacgtctgggcgggagtgttcagcgcggccgctggagagggccaggagcggcgctcccccaccaccacggcgctctgcctcttcagaatgagtgagatccaggcgcgcgccaagagggtcagctgggacttcaagacggccgagagccactgcaaagaaggggatcaacctgaaagagtccaaccaatcgcatcatctaccttgatccattccgacctgacatccgtttatggcaccgtggtaatgaacaggactgttttattcttggggactggagatggccagttacttaaggttattcttggtgagaatttgacttcaaattgtccagaggttatctatgaaattaaagaagagacacctgttttctacaaactcgttcctgatcctgtgaagaatatctacatttatctaacagctgggaaagaggtgaggagaattcgtgttgcaaactgcaataaacataaatcctgttcggagtgtttaacagccacagaccctcactgcggttggtgccattcgctacaaaggtgcacttttcaaggagattgtgtacattcagagaacttagaaaactggctggatatttcgtctggagcaaaaaagtgccctaaaattcagataattcgaagcagtaaagaaaagactacagtgactatggtgggaagcttctctccaagacactcaaagtgcatggtgaagaatgtggactctagcagggagctctgccagaataaaagtcagcccaaccggacctgcacctgtagcatcccaaccagagcaacctacaaagatgtttcagttgtcaacgtgatgttctccttcggttcttggaatttatcagacagattcaactttaccaactgctcatcattaaaagaatgcccagcatgcgtagaaactggctgcgcgtggtgtaaaagtgcaagaaggtgtatccaccccttcacagcttgcgacccttctgattatgagagaaaccaggaacagtgtccagtggctgtcgagaagacatcaggaggaggaagacccaaggagaacaaggggaacagaaccaaccaggctttacaggtcttctacattaagtccattgagccacagaaagtatcgacattagggaaaagcaacgtgatagtaacgggagcaaactttacccgggcatcgaacatcacaatgatcctgaaaggaaccagtacctgtgataaggatgtgatacaggttagccatgtgctaaatgacacccacatgaaattctctcttccatcaagccggaaagaaatgaaggatgtgtgtatccagtttgatggtgggaactgctcttctgtgggatccttatcctacattgctctgccacattgttcccttatatttcctgctaccacctggatcagtggtggtcaaaatataaccatgatgggcagaaattttgatgtaattgacaacttaatcatttcacatgaattaaaaggaaacataaatgtctctgaatattgtgtggcgacttactgcgggtttttagcccccagtttaaagagttcaaaagtgcgcacgaatgtcactgtgaagctgagagtacaagacacctacttggattgtggaaccctgcagtatcgggaggaccccagattcacggggtatcgggtggaatccgaggtggacacagaactggaagtgaaaattcaaaaagaaaatgacaacttcaacatttccaaaaaagacattgaaattactctcttccatggggaaaatgggcaattaaattgcagttttgaaaatattactagaaatcaagatcttaccaccatcctttgcaaaattaaaggcatcaagactgcaagcaccattgccaactcttctaagaaagttcgggtcaagctgggaaacctggagctctacgtcgagcaggagtcagttccttccacatggtattttctgattgtgctccctgtcttgctagtgattgtcatttttgcggccgtgggggtgaccaggcacaaatcgaaggagctgagtcgcaaacagagtcaacaactagaattgctggaaagcgagctccggaaagagatacgtgacggctttgctgagctgcagatggataaattggatgtggttgatagttttggaactgttcccttccttgactacaaacattttgctctgagaactttcttccctgagtcaggtggcttcacccacatcttcactgaagatatgcataacagagacgccaacgacaagaatgaaagtctcacagctttggatgccctaatctgtaataaaagctttcttgttactgtcatccacacccttgaaaagcagaagaacttttctgtgaaggacaggtgtctgtttgcctccttcctaaccattgcactgcaaaccaagctggtctacctgaccagcatcctagaggtgctgaccagggacttgatggaacagtgtagtaacatgcagccgaaactcatgctgagacgcacggagtccgtcgtcgaaaaactcctcacaaactggatgtccgtctgcctttctggatttctccgggagactgtcggagagcccttctatttgctggtgacgactctgaaccagaaaattaacaagggtcccgtggatgtaatcacttgcaaagccctgtacacacttaatgaagactggctgttgtggcaggttccggaattcagtactgtggcattaaacgtcgtctttgaaaaaatcccggaaaacgagagtgcagatgtctgtcggaatatttcagtcaatgttctcgactgtgacaccattggccaagccaaagaaaagattttccaagcattcttaagcaaaaatggctctccttatggacttcagcttaatgaaattggtcttgagcttcaaatgggcacacgacagaaagaacttctggacatcgacagttcctccgtgattcttgaagatggaatcaccaagctaaacaccattggccactatgagatatcaaatggatccactataaaagtctttaagaagatagcaaattttacttcagatgtggagtactcggatgaccactgccatttgattttaccagattcggaagcattccaagatgtgcaaggaaagagacatcgagggaagcacaagttcaaagtaaaagaaatgtatctgacaaagctgctgtcgaccaaggtggcaattcattctgtgcttgaaaaactttttagaagcatttggagtttacccaacagcagagctccatttgctataaaatacttttttgactttttggacgcccaggctgaaaacaaaaaaatcacagatcctgacgtcgtacatatttggaaaacaaacagccttcctcttcgcttctgggtaaacatcctgaagaaccctcagtttgtctttgacattaagaagacaccacatatagacggctgtttgtcagtgattgcccaggcattcatggatgcattttctctcacagagcagcaactagggaaggaagcaccaactaataagcttctctatgccaaggatatcccaacctacaaagaagaagtaaaatcttattacaaagcaatcagggatttgcctccattgtcatcctcagaaatggaagaatttttaactcaggaatctaagaaacatgaaaatgaatttaatgaagaagtggccttgacagaaatttacaaatacatcgtaaaatattttgatgagattctaaataaactagaaagagaacgagggctggaagaagctcagaaacaactcttgcatgtaaaagtcttatttgatgaaaagaagaaatgcaagtggatgtaagcactctggggcctggcttaatctggcaaagttcttcagacgacttgggagcaaaatggctgcttgagctactctgtgtcgttaatttgttgtttgcacataggttccactttgggcactgtctttttaagagaccaaggcacatgcacagcttttagaaagcataccaacccttgtgcctgtgtgtataccgtgggaacccttctgtaaatagagttgaagtggttgttgcaaacagcctccttgtttacagagaatacaaggccagtaagcgaatgtcagtattgtaactacagtctccacttaagcacaatgatataagtggttttgtttgaaaactacagctatgtagcacttgtgctacactgcacctctgcattgtaaagggatactgccagtgctcaaaacaaaatgtgaaatgagtcatttggaaacaaggtgggggtgttagggcaacctcgaggatttgcagcattgaaactttccccagtagttcttggaaaagctgaccgcagaatttggtagtgtacacttagcatttgtgagtgtgtgtgtgtgtttaaaccaaaaactaacagtgttgcaacattgttgaaagggctcgtgtttttcagtggtcatcaactgcactccatcaaactcacctccatttcaccaaggagctctaaagtaaggagagtgggctttatttaaatgaacagcattttaaccagatactttgtcctaatgtatgttccttttcttcatctgttttttcatactaaatgtatttgatagtggacatgttggatattatacaaaaaaatcattaattcatttctgttccaaaacctttgatcagaacgatctgtggaagagtaactccatttctatatgagtgagtgtctccttgctttagatttctggtgaaccctgtggttatgaatacttgtgtgtgatttaaaaaaaaaaagatacattttacattttatcgaattgctgttcacactggagtattatatataaatatatatatttgaggcccaaggcctgaaaaatattagtatacaacttggtatcttagtcttactatgtactttttgaaagtattcctcgcaggagaaagaatttaaaatacccattttattcatgcctttctttttaaagaattctctatccagttatactgtagtctttttagtgctgattttttaattcctgaatttttgctgctcatgaccagttttaataccactgtgttttccttctattaaaccagaagaagtaaacagcataattggcaactcttgagcttttcttgtggcaggcaccttttacccttggtgctccaaatcccccatctaggaaagaaaattttttcaagtcaaataacattgatcacatattccttgaaatcatttaccaacactgtatggagcattaggatttaaatatgaatttgtcttaaaggcaattcctttttgcttctgtattatctggaaaagcatgagagaggtgacacctcaacaaactgatcagagaaaataagcagttactaccctgataggcaccttcccaatcctgttgcttttgaccattgtctgtccaacggacacacctcaaacaaacaaaactaccaaatagatgacagatcagaataaaggtgagaggtctggtccccattgaaggctgctacagtcttcaaagaggtgaaggagttcataagagaacaacagtaggaaagttgagagccaagggtaggagagttgcccaaaagacttcccctactactttagggtactgaaaactcaaaggatcagctacagctttatctaagtatttactaaatgctacatgagggtgtccctgtccagctttctggcacatgagtcctgtgtggagagttacctcctcttccagggactgtgctgttgggaactttgggcaagtcacttacctctttgtgcctcaatttctgtataatatttctaagctacctcactgaggtggtatgaagattcactaatgtatgtagcgtgtttgtcaatcctccagtgaaaagcactatctagatcacattttggatcacattagccaaatgcagtaaatggccaaattagatgtgtgctgaagacaatcagtcactgggtctatattaaacagcaaccagagcaacaaatggcaaacaatttctattttcaagtttctttgcatatttttttggtgcaaaaccatttataaacttttttttctaacactagtgtctacagcagcattcaaaaaaattctgttaccttttctgtattaggatttaaagtctatttcttattgtatacctgattgaagctgttcttggagatgaatgttttaaatgtctatatccaaaaaataaacattttgatgtaactgtg

SEQ ID NO: 159023 - DNA, 2455 bp, Artificial Sequence
  derived and/or modified sequence
acttgtaaaatgagtaaggttttggtttttttctgctgcattttggcatcttcctcttcagagtgacccctcactgggaaattttcttataagatccagctttttaatgctattttctagtttcattctagctcctgctctctgtccctatctgttttgtttttgtttttgtttttaagaactgtaaagattgctatttgttttcatttttggtttttgagttaccatgtccctctgatgcagcatctctgtctcttagcggccgtgggggtgaccaggcacaaatcgaaggagctgagtcgcaaacagagtcaacaactagaattgctggaaagcgagctccggaaagagatacgtgacggctttgctgagctgcagatggataaattggatgtggttgatagttttggaactgttcccttccttgactacaaacattttgctctgagaactttcttccctgagtcaggtggcttcacccacatcttcactgaagatatgcataacagagacgccaacgacaagaatgaaagtctcacagctttggatgccctaatctgtaataaaagctttcttgttactgtcatccacacccttgaaaagcagaagaacttttctgtgaaggacaggtgtctgtttgcctccttcctaaccattgcactgcaaaccaagctggtctacctgaccagcatcctagaggtgctgaccagggacttgatggaacagtgtagtaacatgcagccgaaactcatgctgagacgcacggagtccgtcgtcgaaaaactcctcacaaactggatgtccgtctgcctttctggatttctccgggagactgtcggagagcccttctatttgctggtgacgactctgaaccagaaaattaacaagggtcccgtggatgtaatcacttgcaaagccctgtacacacttaatgaagactggctgttgtggcaggttccggaattcagtactgtggcattaaacgtcgtctttgaaaaaatcccggaaaacgagagtgcagatgtctgtcggaatatttcagtcaatgttctcgactgtgacaccattggccaagccaaagaaaagattttccaagcattcttaagcaaaaatggctctccttatggacttcagcttaatgaaattggtcttgagcttcaaatgggcacacgacagaaagaacttctggacatcgacagttcctccgtgattcttgaagatggaatcaccaagctaaacaccattggccactatgagatatcaaatggatccactataaaagtctttaagaagatagcaaattttacttcagatgtggagtactcggatgaccactgccatttgattttaccagattcggaagcattccaagatgtgcaaggaaagagacatcgagggaagcacaagttcaaagtaaaagaaatgtatctgacaaagctgctgtcgaccaaggtggcaattcattctgtgcttgaaaaactttttagaagcatttggagtttacccaacagcagagctccatttgctataaaatacttttttgactttttggacgcccaggctgaaaacaaaaaaatcacagatcctgacgtcgtacatatttggaaaacaaacagccttcctcttcgcttctgggtaaacatcctgaagaaccctcagtttgtctttgacattaagaagacaccacatatagacggctgtttgtcagtgattgcccaggcattcatggatgcattttctctcacagagcagcaactagggaaggaagcaccaactaataagcttctctatgccaaggatatcccaacctacaaagaagaagtaaaatcttattacaaagcaatcagggatttgcctccattgtcatcctcagaaatggaagaatttttaactcaggaatctaagaaacatgaaaatgaatttaatgaagaagtggccttgacagaaatttacaaatacatcgtaaaatattttgatgagattctaaataaactagaaagagaacgagggctggaagaagctcagaaacaactcttgcatgtaaaagtcttatttgatgaaaagaagaaatgcaagtggatgtaagcactctggggcctggcttaatctggcaaagttcttcagacgacttgggagcaaaatggctgcttgagctactctgtgtcgttaatttgttgtttgcacataggttccactttgggcactgtctttttaagagaccaaggcacatgcacagcttttagaaagcataccaacccttgtgcctgtgtgtataccgtgggaacccttctgtaaatagagttgaagtggttgttgcaaacagcctccttgtttacagagaatacaaggccagtaagcgaatgtcagtattgtaactacagtctccacttaagcacaatgatataagtggttttgtttgaaaactacagctatgtagcacttgtgctacactgca

SEQ ID NO: 159024 - DNA, 4707 bp, Artificial Sequence
  derived and/or modified sequence
atggaggtgtcccgcagaaaagcccctcctcggccaccaaggcctgccgctccactcccattgctcgcatatctgttggccttggctgctcctgggagaggggcagatgaacccgtgtggcggagcgaacaggccattggggctattgccgctagtcaggaagatggagtgtttgttgcctctggatcctgcctggaccagctcgactactccctggaacatagcctatctcgactgtacagagatcaagccggtaattgcaccgagcctgtttctctagctccccctgctcgtcccagaccaggaagttccttcagtaagttgctcctgccttacagggaaggggctgccggactagggggattgctgttaactgggtggacatttgacaggggcgcttgcgaagtccggccattggggaacttgtcgcgcaatagcttgcgcaacggtaccgaggttgtgtcatgtcatccacaggggagcaccgctggcgtggtctatcgtgccggaaggaataatcgctggtacctggctgtcgcggcaacttacgtgttgccggagcccgaaaccgcttcccggtgcaatccagcagcatctgaccatgacacggccatcgctctgaaggatacagagggcagatcactcgctacccaggagctgggacgcctcaaactgtgtgaaggcgctgggtccctgcattttgtcgatgccttcctgtggaatggatccatttacttcccatattacccttataactacactagtggggcagccacggggtggccttccatggccagaatcgcccaaagtacggaggtgctgttccagggacaagctagtctggattgtgggcacggtcaccctgacggaagaagactccttctttcttcttcccttgtcgaggcactggacgtgtgggctggtgttttctccgcagcagcaggagagggccaggagcggagatcgcccaccacaactgcactgtgcctttttcggatgagtgaaattcaggcgagagcaaaaagagtgagctgggactttaaaactgccgagtctcactgcaaggaaggtgatcagccggagcgtgtgcagcccattgcttccagtactctgattcatagcgatctgacaagcgtgtacggaactgtggtgatgaatcgcactgtgctgttcctcggtactggggacggccaactcctcaaggtgattctcggggagaatctgacatcaaactgccccgaggtgatttacgagataaaggaggaaacaccggtgttctacaaattggtgcctgatccagtgaagaacatttatatttatctgactgctggtaaggaggtcagaagaattcgagtggccaattgtaataagcacaagtcgtgctcggaatgcttaactgccactgatcctcactgtgggtggtgtcacagcttacagagatgcaccttccagggtgactgtgttcactccgagaacttggagaattggctcgatatcagctcaggggctaagaagtgccccaaaatccaaattataaggtctagcaaggaaaaaaccacggtgacaatggtgggctctttctcaccacggcatagcaaatgtatggttaaaaacgtagacagttcacgagagctctgccagaataagtcacagcccaataggacctgcacctgctcaattcctactcgcgcaacgtacaaggacgtctctgtggtcaacgttatgttcagctttggctcatggaacctctctgatagatttaatttcactaactgtagctccctcaaggaatgtcctgcctgcgtcgagactggatgtgcctggtgcaagagcgcaagaaggtgtatacacccattcactgcgtgcgatccctctgattacgagagaaatcaggaacagtgccccgtcgctgtggagaagacaagtgggggaggcagaccgaaagaaaacaagggcaacaggacaaatcaggccctccaggttttttatattaaatccatcgaaccccaaaaagtgtctacactgggtaaatctaacgtgatcgtgacaggcgctaattttacccgggcaagcaacattaccatgattcttaaagggacttctacatgcgacaaagacgtgattcaagtttcccatgtgctgaatgatacacatatgaaattcagcctgccgtcatcccggaaagagatgaaggatgtctgcatccagttcgacggcggaaattgctcctccgttgggtccctgtcttatatcgccttgccccactgctctctgatttttccggcaactacctggatctccggcggacagaatatcaccatgatggggagaaacttcgacgtcattgataatcttatcatctcacacgagttgaagggcaatattaatgttagtgaatattgtgtggcaacctattgtgggtttctagcgccttcacttaagagctctaaggtgcgaaccaatgtgacggtgaaattaagagtacaggacacgtatctggactgtggtaccctccaatacagggaggacccacgcttcaccggctaccgggtggagagcgaagtagatacagagctggaggtgaagattcagaaggaaaatgataattttaacatcagcaagaaggatatcgaaatcaccctttttcatggagagaatgggcagttgaactgctcgtttgaaaatataactagaaatcaggacctgaccacaattctgtgcaaaatcaagggaattaaaactgcctccaccatcgccaacagttccaagaaagtccgcgtaaagcttggtaatctcgagctgtacgtcgagcaggagagcgtcccctcaacctggtacttcctaatcgtgcttcccgtgcttctggtcatcgtcatcttcgctgccgtgggtgtgacaaggcacaaaagtaaggagcttagtcgaaagcagtcccagcaattagagttactagagagcgagctgaggaaggagatcagggatgggttcgctgaactgcaaatggacaaactcgatgttgtcgacagctttggaaccgtaccgttcctggattacaagcacttcgccctgaggacctttttcccagagagtggaggattcactcacatttttacggaagacatgcataacagggacgccaacgataagaatgaatcccttaccgccctagacgcactcatttgcaataaatcgttccttgtcaccgtgatccacaccttggaaaagcagaagaatttctccgtcaaggatcgttgcctgtttgcttccttcctgactatcgcccttcaaacgaaattggtatacctgacttcgattctcgaggtcctcacgagagatctgatggagcagtgttctaatatgcaacctaagcttatgctccgaaggaccgaaagcgtggtggagaagttgctgactaactggatgagcgtgtgcctctcaggcttcttacgcgagaccgttggagaacccttttatctgctagtgaccaccctgaatcagaaaattaacaagggtcctgtggatgttattacttgtaaggcactctacactctgaatgaggactggttactgtggcaggtgccagaatttagcaccgtggcactgaatgtggtgttcgaaaagattcccgagaacgaaagcgccgatgtttgtagaaacatatccgtgaacgtattggactgcgacactattggacaggctaaggaaaaaattttccaggctttcctgtccaaaaatgggagcccatatggtttgcaactgaacgagatcgggctggagttacagatgggcacccgccagaaggaactactggatattgacagcagctcagtcatactggaagatgggattaccaaacttaacaccatcggtcactacgaaatttctaatgggtccaccatcaaggtcttcaagaagatagccaacttcacaagtgatgtggagtacagtgatgaccactgccatctgattttgccagattctgaggccttccaggatgttcaagggaaaaggcaccggggaaagcataaatttaaggtcaaggagatgtacctgacaaagttgttaagcacaaaggtcgcgatccattctgttctcgaaaagctgttccggagcatctggtccctgcctaattctcgagcacccttcgccatcaagtatttctttgattttctggatgctcaggccgaaaataagaagattacagacccggacgttgtgcacatttggaagaccaacagtctgccactgcggttctgggttaacatcctcaagaatccccaatttgtgttcgatattaagaaaactccccatatcgatggttgtctgagtgtgatcgcacaggcgtttatggacgcgttttctctaaccgagcaacagctaggcaaggaggcccctacaaataagctgctctacgccaaagacatccccacatacaaagaagaggtgaaaagctattacaaggccatcagagacttgcctcctctatccagcagcgaaatggaagagttccttacccaggagagcaagaagcatgaaaacgaattcaatgaggaagtagcactgacagagatctataagtacatcgtcaaatacttcgatgagatcctgaataaactggaaagagaacggggtctggaagaggcacagaagcagctgctccacgtgaaggttctcttcgacgagaagaagaaatgcaaatggatgtag

SEQ ID NO: 159025 - DNA, 1848 bp, Artificial Sequence
  derived and/or modified sequence
atgcagcacctgtgtttgctggctgcggtaggggtcacgaggcataagtctaaagagctgtcccgcaagcagtcacaacagttagagctgctggaatctgagctgaggaaggaaatccgcgacgggttcgctgaactgcagatggataaacttgacgttgtcgactcttttggaacagtgccgtttctggattacaagcactttgctctgaggactttcttccctgaatctggtgggtttacccacatttttactgaggacatgcacaaccgggatgccaatgataagaacgagtccctgaccgccctcgacgcactcatttgcaataaatcttttcttgtcactgtcattcacaccctggaaaaacagaagaatttttcagtcaaagacaggtgtctcttcgcctccttcctgaccatcgctctccagacgaaattggtctatctgacaagcatactggaggtcctgacacgagacctcatggagcaatgctctaatatgcagcccaagctcatgttgcgtcgaactgagtcggtcgtggagaagctcctcacgaactggatgagcgtttgcttgtccggctttctccgggagaccgtcggggagcctttctatctgttggttactactttgaaccaaaaaataaataaggggccagtagatgtaatcacctgtaaggctctgtatactctaaatgaggactggctgctctggcaagtcccagagttttcaaccgtagcattaaacgtcgtgttcgaaaagatcccagaaaatgagagtgccgacgtttgtcgaaacatctcagtcaacgtactggactgcgacaccatcggacaggccaaggaaaaaatcttccaggcgttcctttctaaaaacggcagtccatatgggctacagctgaatgagattgggctcgagctgcaaatgggaacccgtcagaaggaactgctcgacatagattcttcctcggtgatcctagaggatggaataacaaagctgaatactatcgggcattacgagatttcaaatggaagtactattaaagtgtttaagaagattgcgaatttcaccagcgacgtggagtactccgatgaccactgtcatctgatcttgccagattctgaagccttccaggatgtacagggaaagcgccatagaggtaaacacaagttcaaggtgaaggagatgtatctgacgaagctgctcagcacaaaagtcgcgattcacagtgtcttagagaagttattcagatctatatggtcactgccaaacagtagagcaccctttgcaattaagtactttttcgatttcctagacgcccaggccgagaacaagaagatcacagatccagacgtggtgcatatatggaagaccaactctctgcctctccggttctgggtgaacatattaaagaatcctcaatttgtcttcgatatcaaaaaaacaccccacatcgatggatgcctcagcgttattgcccaggcctttatggacgctttttcccttacggagcagcagctggggaaggaggctccaaccaacaagctcctgtacgctaaggacattcctacttacaaggaggaggtaaaatcctactacaaagccattcgcgacctgccacctttgagctcttcagagatggaagagttcctgactcaagagagcaaaaaacacgagaatgaatttaacgaggaggtcgctctcactgaaatctataagtacatagtaaagtatttcgacgagatactcaataagctcgaaagggagcgtggcctggaggaggcccaaaagcagctgctacatgtcaaagtgctttttgacgagaaaaagaaatgcaagtggatgtag

SEQ ID NO: 159026 - protein, 835 aa, Artificial Sequence
  derived and/or modified sequence
MAASAAAASAAAASAASGSPGPGEGSAGGEKRSTAPSAAASASASAAASSPAGGGAEALELLEHCGVCRERLRPEREPRLLPCLHSACSACLGPAAPAAANSSGDGGAAGDGTVVDCPVCKQQCFSKDIVENYFMRDSGSKAATDAQDANQCCTSCEDNAPATSYCVECSEPLCETCVEAHQRVKYTKDHTVRSTGPAKSRDGERTVYCNVHKHEPLVLFCESCDTLTCRDCQLNAHKDHQYQFLEDAVRNQRKLLASLVKRLGDKHATLQKSTKEVRSSIRQVSDVQKRVQVDVKMAILQIMKELNKRGRVLVNDAQKVTEGQQERLERQHWTMTKIQKHQEHILRFASWALESDNNTALLLSKKLIYFQLHRALKMIVDPVEPHGEMKFQWDLNAWTKSAEAFGKIVAERPGTNSTGPAPMAPPRAPGPLSKQGSGSSQPMEVQEGYGFGSGDDPYSSAEPHVSGVKRSRSGEGEVSGLMRKVPRVSLERLDLDLTADSQPPVFKVFPGSTTEDYNLIVIERGAAAAATGQPGTAPAGTPGAPPLAGMAIVKEEETEAAIGAPPTATEGPETKPVLMALAEGPGAEGPRLASPSGSTSSGLEVVAPEGTSAPGGGPGTLDDSATICRVCQKPGDLVMCNQCEFCFHLDCHLPALQDVPGEEWSCSLCHVLPDLKEEDGSLSLDGADSTGVVAKLSPANQRKCERVLLALFCHEPCRPLHQLATDSTFSLDQPGGTLDLTLIRARLQEKLSPPYSSPQEFAQDVGRMFKQFNKLTEDKADVQSIIGLQRFFETRMNEAFGDTKFSAVLVEPPPMSLPGAGLSSQELSGGPGDGP

SEQ ID NO: 159027 - protein, 753 aa, Artificial Sequence
  derived and/or modified sequence
MAASAAAASAAAASAASGSPGPGEGSAGGEKRSTAPSAAASASASAAASSPAGGGAEALELLEHCGVCRERLRPEREPRLLPCLHSACSACLGPAAPAAANSSGDGGAAGDGTGPAKSRDGERTVYCNVHKHEPLVLFCESCDTLTCRDCQLNAHKDHQYQFLEDAVRNQRKLLASLVKRLGDKHATLQKSTKEVRSSIRQVSDVQKRVQVDVKMAILQIMKELNKRGRVLVNDAQKVTEGQQERLERQHWTMTKIQKHQEHILRFASWALESDNNTALLLSKKLIYFQLHRALKMIVDPVEPHGEMKFQWDLNAWTKSAEAFGKIVAERPGTNSTGPAPMAPPRAPGPLSKQGSGSSQPMEVQEGYGFGSGDDPYSSAEPHVSGVKRSRSGEGEVSGLMRKVPRVSLERLDLDLTADSQPPVFKVFPGSTTEDYNLIVIERGAAAAATGQPGTAPAGTPGAPPLAGMAIVKEEETEAAIGAPPTATEGPETKPVLMALAEGPGAEGPRLASPSGSTSSGLEVVAPEGTSAPGGGPGTLDDSATICRVCQKPGDLVMCNQCEFCFHLDCHLPALQDVPGEEWSCSLCHVLPDLKEEDGSLSLDGADSTGVVAKLSPANQRKCERVLLALFCHEPCRPLHQLATDSTFSLDQPGGTLDLTLIRARLQEKLSPPYSSPQEFAQDVGRMFKQFNKLTEDKADVQSIIGLQRFFETRMNEAFGDTKFSAVLVEPPPMSLPGAGLSSQELSGGPGDGP

SEQ ID NO: 159028 - DNA, 2989 bp, Artificial Sequence
  derived and/or modified sequence
ggcgcgcgggcgagcggttgtgcttgtgcttgtggcgcgtggtgcgggtttcggcggcggctgaggaagaagcgcgggcggcgccttcgggaggcgagcaggcagcagttggccgtgccgtagcagcgtcccgcgcgcggcgggcagcggcccaggaggcgcgtggcggcgctcggcctcgcggcggcggcggcggcagcggcccagcagttggcggcgagcgcgtctgcgcctgcgcggcgggccccgcgcccctcctccccccctgggcgcccccggcggcgtgtgaatggcggcctccgcggcggcagcctcggcagcagcggcctcggccgcctctggcagcccgggcccgggcgagggctccgctggcggcgaaaagcgctccaccgccccttcggccgcagcctcggcctctgcctcagccgcggcgtcgtcgcccgcggggggcggcgccgaggcgctggagctgctggagcactgcggcgtgtgcagagagcgcctgcgacccgagagggagccccgcctgctgccctgtttgcactcggcctgtagtgcctgcttagggcccgcggcccccgccgccgccaacagctcgggggacggcggggcggcgggcgacggcaccgtggtggactgtcccgtgtgcaagcaacagtgcttctccaaagacatcgtggagaattatttcatgcgtgatagtggcagcaaggctgccaccgacgcccaggatgcgaaccagtgctgcactagctgtgaggataatgccccagccaccagctactgtgtggagtgctcggagcctctgtgtgagacctgtgtagaggcgcaccagcgggtgaagtacaccaaggaccatactgtgcgctctactgggccagccaagtctcgggatggtgaacgtactgtctattgcaacgtacacaagcatgaaccccttgtgctgttttgtgagagctgtgatactctcacctgccgagactgccagctcaatgcccacaaggaccaccagtaccagttcttagaggatgcagtgaggaaccagcgcaagctcctggcctcactggtgaagcgccttggggacaaacatgcaacattgcagaagagcaccaaggaggttcgcagctcaatccgccaggtgtctgacgtacagaagcgtgtgcaagtggatgtcaagatggccatcctgcagatcatgaaggagctgaataagcggggccgtgtgctggtcaatgatgcccagaaggtgactgaggggcagcaggagcgcctggagcggcagcactggaccatgaccaagatccagaagcaccaggagcacattctgcgctttgcctcttgggctctggagagtgacaacaacacagcccttttgctttctaagaagttgatctacttccagctgcaccgggccctcaagatgattgtggatcccgtggagccacatggcgagatgaagtttcagtgggacctcaatgcctggaccaagagtgccgaggcctttggcaagattgtggcagagcgtcctggcactaactcaacaggccctgcacccatggcccctccaagagccccagggcccctgagcaagcagggctctggcagcagccagcccatggaggtgcaggaaggctatggctttgggtcaggagatgatccctactcaagtgcagagccccatgtgtcaggtgtgaaacggtcccgctcaggtgagggcgaggtgagcggccttatgcgcaaggtgccacgagtgagccttgaacgcctggacctggacctcacagctgacagccagccacccgtcttcaaggtcttcccaggcagtaccactgaggactacaaccttattgttattgaacgtggcgctgccgctgcagctaccggccagccagggactgcgcctgcaggaacccctggtgccccacccctggctggcatggccattgtcaaggaggaggagacggaggctgccattggagcccctcctactgccactgagggccctgagaccaaacctgtgcttatggctcttgcggagggtcctggtgctgagggtccccgcctggcctcacctagtggcagcaccagctcagggctggaggtggtggctcctgagggtacctcagccccaggtggtggcccgggaaccctggatgacagtgccaccatttgccgtgtctgccagaagccaggcgatctggttatgtgcaaccagtgtgagttttgtttccacctggactgtcacctgccggccctgcaggatgtaccaggggaggagtggagctgctcactctgccatgtgctccctgacctgaaggaggaggatggcagcctcagcctggatggtgcagacagcactggcgtggtggccaagctctcaccagccaaccagcggaaatgtgagcgtgtactgctggccctattctgtcacgaaccctgccgccccctgcatcagctggctaccgactccaccttctccctggaccagcccggtggcaccctggatctgaccctgatccgtgcccgcctccaggagaagttgtcacctccctacagctccccacaggagtttgcccaggatgtgggccgcatgttcaagcaattcaacaagttaactgaggacaaggcagacgtgcagtccatcatcggcctgcagcgcttcttcgagacgcgcatgaacgaggccttcggtgacaccaagttctctgctgtgctggtggagcccccgccgatgagcctgcctggtgctggcctgagttcccaggagctgtctggtggccctggtgatggcccctgaggctggagcccccatggccagcccagcctggctctgttctctgtcctgtcaccccatccccactcccctggtggcctgactcccactccctggtggccccatcccccagttcctcacgatatggtttttacttctgtggatttaataaaaacttcaccagttaaaaaaaaaaaaaaaaaaaaaaaaaaaaaa

SEQ ID NO: 159029 - DNA, 2508 bp, Artificial Sequence
  derived and/or modified sequence
atggctgcttctgcggcggcagcatctgccgcggcagcgtcggccgcgagcggaagcccagggcccggggaggggtccgcggggggagagaaaagatcgacagctccatctgcagccgccagcgcaagtgcatcagccgccgcatccagcccagctggcgggggcgccgaagccctggaactcttggagcactgcggggtgtgtagagagcgtctcaggccagagcgcgagcctaggctcctaccatgcttgcactccgcctgctccgcatgccttgggccagccgccccggctgccgccaacagctcaggagacggtggcgcagccggcgacggaactgtggtcgattgtcctgtctgcaaacagcaatgtttctccaaggatatagtggagaactattttatgagggatagtggctctaaggctgccaccgacgcacaggatgctaaccagtgctgcacctcctgtgaggacaatgcccccgctaccagctattgtgtggaatgcagtgaacccctttgtgagacttgtgttgaggcccatcaaagagtgaaatatacaaaggaccacacagtccggagcacagggcccgccaagagtcgagatggagaacgcacagtgtattgcaatgtgcacaagcacgagcccttggtcctcttctgtgaatcctgcgacactctgacatgcagggattgtcagctgaatgcccacaaggaccatcagtaccagttccttgaagacgcagtgcgaaaccagcgaaaactgctggcatccctcgtgaagagattaggcgacaaacacgctacactgcagaaaagtaccaaagaagtgagaagcagcattcggcaagtatcagatgttcaaaagagagtccaagtggatgtcaagatggcaattctccagattatgaaggagctgaataaacgaggcagagtgctcgtgaatgatgcccagaaggtcaccgaggggcagcaagaaagactggagcggcagcactggaccatgacaaagatccaaaagcaccaggagcacattctccgcttcgccagctgggctctggaaagcgacaacaacacagcattactgctaagcaagaagctgatttatttccaactgcatcgcgcactgaagatgatcgtggaccctgtggagccccacggagagatgaagttccaatgggatctaaacgcatggaccaagagcgccgaagcgtttgggaagatcgttgccgagcgcccaggaactaatagtacagggccagcacctatggcgcctccacgtgcccccggtcctctgagcaaacagggatcagggtccagccagcccatggaagtccaggaggggtacggcttcggaagtggcgatgatccgtattcaagcgcagaaccacacgtcagtggcgttaagcgaagtagaagcggcgaaggagaggtctccggactgatgaggaaggtgccacgcgtgtccttggagcgcctggatcttgatcttacagctgattcacagcctcccgtgttcaaggtgtttcccggcagcaccaccgaggactacaatctgatagtcattgagcggggagcggctgccgccgctacaggccagcccgggacagcccctgccggtaccccgggcgccccccccctggctggcatggcaattgtgaaggaggaagaaaccgaagctgcgattggcgcacccccaacagccacggaggggcctgagaccaagcctgttctgatggcgctggcagagggacctggcgctgaagggccccggcttgcatctccttctggctctacatcctccgggctggaagtggtcgctcccgaaggaactagcgcaccagggggtggccctggcactctggacgactccgccaccatctgcagagtatgtcagaagcccggggacctggttatgtgcaaccagtgcgaattttgttttcacctggactgtcacttacctgcactgcaagatgttccgggcgaagagtggtcctgctcactctgtcatgtgctgcctgacctaaaggaggaggatggatccctgagcctggacggagccgattcaaccggcgttgtcgccaagttgtctcctgccaaccagaggaagtgcgaaagagtccttctggcactgttctgccatgagccctgccgacccctgcatcagctggccacggactccactttctcgctagatcaaccgggcggcaccttagacctgaccttgatacgagcccggctccaggagaagctttcaccaccttacagctccccccaagaatttgcccaggatgttgggaggatgtttaaacaattcaataaactcaccgaagacaaagctgatgtgcagtcgatcattgggcttcagagatttttcgaaaccagaatgaacgaagcctttggcgacaccaaatttagcgctgtgctggtcgaaccccccccaatgagccttcccggggccgggctgtctagccaagagctgtcgggaggtccgggcgacggcccttag

SEQ ID NO: 159030 - DNA, 2262 bp, Artificial Sequence
  derived and/or modified sequence
atggccgcctctgccgctgccgcctccgccgcggccgccagcgctgcctccggcagcccaggccccggcgagggtagtgcgggcggagagaagcggtcaacagccccaagcgcggctgccagcgcttccgcctcagcagcagcctcttcccccgcgggcggtggggccgaggccctcgagttgctcgagcattgcggtgtatgcagagaacggctgagaccggagcgcgaacctcggctcctgccctgtctgcactccgcctgtagcgcttgtctgggccccgccgcacctgcagcagctaattccagtggcgatggaggtgcggctggtgacgggactggacctgcgaaatcccgcgatggtgagcggactgtgtactgcaatgtgcataaacatgagcctcttgtccttttctgtgagagttgtgacacactgacttgccgagattgccagctgaacgcccacaaagaccaccagtaccagttcctcgaagatgcagtgagaaatcagaggaagttgctggccagcttggtcaaaagactgggcgacaagcacgccactctgcagaagagtacgaaggaggtgcgttcttcgatccgccaagtttccgacgtccagaagcgggttcaggttgacgtgaagatggcaatcctccaaatcatgaaggaactcaacaagcgagggagagtactggtaaacgacgcacagaaggtgacggagggacaacaggagcgactggaacggcaacattggacgatgactaagattcaaaaacaccaggagcacatcctgagattcgcttcctgggccctagagtcagataacaacacggctctcctgctctccaagaagttaatttacttccaactgcaccgcgctctaaaaatgatcgtcgatcccgttgagccccatggcgagatgaaattccagtgggacctaaatgcttggactaaatctgcggaggcctttgggaagatcgtagctgagaggcctggcaccaattcaactggacctgcccccatggcccctccaagggcacccggcccattgtctaaacagggatccggctcctcgcaacccatggaagtgcaggaggggtacgggttcggttcgggggacgatccttacagctctgccgagccccacgtgagtggagtcaagagatctagatcaggcgagggggaggtttccggcctcatgagaaaggtccctcgcgtgtcattagaacggctggacttggacctcaccgctgacagccagccccccgtgttcaaggtattcccggggtctaccacagaagactataacttgatcgtgatcgaaagaggtgctgccgcagcagcaaccggccagcctgggactgcaccggccggcacccccggggcgcctccactggctggcatggcaattgtcaaggaggaggagactgaagccgctattggagcaccccctactgcaacagaaggtccagagaccaaacccgtcttgatggcgctcgctgagggccccggagcggaaggacctaggcttgcctctccatctggcagtacctctagcggtctcgaagtggtcgcccctgaggggacttctgccccaggaggcggacctggcacactggatgacagtgcaactatttgtcgcgtgtgccaaaagcccggggacctggttatgtgtaaccaatgcgaattttgcttccacctcgattgtcacctccccgctctgcaggacgtgcctggtgaagagtggagctgctccttatgccacgttctgcctgacctaaaggaggaggacgggtctctgtccttggacggggccgatagcaccggcgtggtagccaaactctctcctgccaaccaacgcaagtgtgagagagttttgctggctctattctgtcatgaaccatgcagacctcttcatcagttagcgactgactccacattctctctggaccagcccggtggaaccttggatctcaccttgatccgggcccgtctgcaggagaaactctctcctccctacagctccccacaggaatttgcgcaggatgtgggccgaatgttcaaacaattcaataaacttactgaagataaggctgatgtacaaagtatcatcggcctccagaggttttttgagactagaatgaacgaagctttcggcgatacaaagttttctgccgtcctggtcgagccgcccccaatgagcctgccaggcgcaggcctcagtagccaagagttatccggtgggccaggcgatggcccctag

SEQ ID NO: 159031 - DNA, 2508 bp, Artificial Sequence
  derived and/or modified sequence
atggccgccagcgctgctgctgccagcgctgctgctgccagcgctgccagcggcagccctggccctggagagggcagcgctggaggagagaagaggagcacagcccccagcgctgctgccagcgccagcgccagcgctgctgccagcagccctgctgggggcggcgctgaggccctggagctgctggagcactgcggcgtgtgccgggagcggctgcggcctgagcgggagccccggctgctgccctgcctgcacagcgcctgcagcgcctgcctgggccctgctgccccagctgctgccaacagcagtggagatggaggagctgctggagatggcaccgtggtggactgccctgtgtgcaagcagcagtgcttcagcaaggacatcgtggagaactacttcatgagggacagcggcagcaaggccgccacagatgcccaggatgccaaccagtgctgcaccagctgtgaagataatgccccagccaccagctactgtgtggagtgcagcgagcccctgtgtgagacctgtgtggaggcccaccagagggtgaagtacaccaaggaccacacagtgcgcagcactggacctgccaagagcagagatggagagaggacagtgtactgcaatgtgcacaagcatgagcccctggtgctcttctgtgagagctgtgacaccctgacctgccgggactgccagctgaatgcccacaaggaccaccagtaccagttcctggaggatgctgtgaggaaccagaggaagctgctggccagcctggtgaagaggctgggggacaagcacgccaccctgcagaagagcaccaaggaggtgcgcagcagcatccggcaggtgtctgatgtgcagaagagggtgcaggtggatgtgaagatggccatcctgcagatcatgaaggagctgaacaagaggggccgggtgctggtgaatgatgcccagaaggtgacagagggccagcaggagcggctggagcggcagcactggaccatgaccaagatccagaagcaccaggagcacatcctgcgctttgcctcctgggccctggagagtgacaacaacacagccctgctgctgagcaagaagctgatctacttccagctgcaccgggccctgaagatgattgtggaccctgtggagccccacggggagatgaagttccagtgggacctgaatgcctggaccaagtctgctgaggccttcggcaagatcgtggccgagaggcctggcaccaacagcacaggccctgcccccatggccccaccccgggcccctggccccctgagcaagcagggcagcggcagcagccagcccatggaggtgcaggagggctacggctttggaagtggagatgacccctacagcagcgctgagccccacgtgtctggagtgaagaggagccgctctggagagggggaggtgtctggcctgatgaggaaggtgccccgggtgtccctggagcggctggacctggacctgacagctgacagccagccccctgtgttcaaggtgtttcctggcagcaccacagaggactacaacctgattgtcatcgagagaggagctgctgctgctgccaccggccagcccggcacagccccagctggcacccctggggccccacccctggccggcatggccatcgtgaaggaggaggagacagaggccgccatcggggccccacccacagccacagagggccctgagaccaagcctgtgctgatggccctggccgagggccctggagctgagggcccccggctggccagccccagcggcagcaccagcagcggcctggaggtggtggcccctgagggcaccagcgcccctgggggcggccctggcaccctggatgacagcgccaccatctgccgggtgtgccagaagccaggggacctggtgatgtgcaaccagtgtgagttctgcttccacctggactgccacctgcctgccctgcaggatgtgcctggagaggagtggagctgcagcctgtgccacgtgctgcctgacctgaaggaggaggatggcagcctgagcctggatggagctgacagcactggagtggtggccaagctgagccctgccaaccagaggaaatgtgagcgggtgctgctggccctcttctgccacgagccctgccggcccctgcaccagctggccacagacagcaccttcagcctggaccagcccggcggcaccctggacctgaccctcatccgggcccggctgcaggagaagctgagccccccctacagcagcccccaggagtttgcccaggatgtgggccgcatgttcaagcagttcaacaagctgacagaggacaaggcagatgtgcagagcatcatcggcctgcagcgcttctttgagaccaggatgaatgaggccttcggggacaccaagttctctgctgtgctggtggagcccccacccatgagcctgcccggggccggcctgagcagccaggagctgagcggcggccctggagatggcccctag

SEQ ID NO: 159032 - DNA, 2262 bp, Artificial Sequence
  derived and/or modified sequence
atggccgccagcgctgctgctgccagcgctgctgctgccagcgctgccagcggcagccctggccctggagagggcagcgctggaggagagaagaggagcacagcccccagcgctgctgccagcgccagcgccagcgctgctgccagcagccctgctgggggcggcgctgaggccctggagctgctggagcactgcggcgtgtgccgggagcggctgcggcctgagcgggagccccggctgctgccctgcctgcacagcgcctgcagcgcctgcctgggccctgctgccccagctgctgccaacagcagtggagatggaggagctgctggagatggcactggacctgccaagagcagagatggagagaggacagtgtactgcaatgtgcacaagcatgagcccctggtgctcttctgtgagagctgtgacaccctgacctgccgggactgccagctgaatgcccacaaggaccaccagtaccagttcctggaggatgctgtgaggaaccagaggaagctgctggccagcctggtgaagaggctgggggacaagcacgccaccctgcagaagagcaccaaggaggtgcgcagcagcatccggcaggtgtctgatgtgcagaagagggtgcaggtggatgtgaagatggccatcctgcagatcatgaaggagctgaacaagaggggccgggtgctggtgaatgatgcccagaaggtgacagagggccagcaggagcggctggagcggcagcactggaccatgaccaagatccagaagcaccaggagcacatcctgcgctttgcctcctgggccctggagagtgacaacaacacagccctgctgctgagcaagaagctgatctacttccagctgcaccgggccctgaagatgattgtggaccctgtggagccccacggggagatgaagttccagtgggacctgaatgcctggaccaagtctgctgaggccttcggcaagatcgtggccgagaggcctggcaccaacagcacaggccctgcccccatggccccaccccgggcccctggccccctgagcaagcagggcagcggcagcagccagcccatggaggtgcaggagggctacggctttggaagtggagatgacccctacagcagcgctgagccccacgtgtctggagtgaagaggagccgctctggagagggggaggtgtctggcctgatgaggaaggtgccccgggtgtccctggagcggctggacctggacctgacagctgacagccagccccctgtgttcaaggtgtttcctggcagcaccacagaggactacaacctgattgtcatcgagagaggagctgctgctgctgccaccggccagcccggcacagccccagctggcacccctggggccccacccctggccggcatggccatcgtgaaggaggaggagacagaggccgccatcggggccccacccacagccacagagggccctgagaccaagcctgtgctgatggccctggccgagggccctggagctgagggcccccggctggccagccccagcggcagcaccagcagcggcctggaggtggtggcccctgagggcaccagcgcccctgggggcggccctggcaccctggatgacagcgccaccatctgccgggtgtgccagaagccaggggacctggtgatgtgcaaccagtgtgagttctgcttccacctggactgccacctgcctgccctgcaggatgtgcctggagaggagtggagctgcagcctgtgccacgtgctgcctgacctgaaggaggaggatggcagcctgagcctggatggagctgacagcactggagtggtggccaagctgagccctgccaaccagaggaaatgtgagcgggtgctgctggccctcttctgccacgagccctgccggcccctgcaccagctggccacagacagcaccttcagcctggaccagcccggcggcaccctggacctgaccctcatccgggcccggctgcaggagaagctgagccccccctacagcagcccccaggagtttgcccaggatgtgggccgcatgttcaagcagttcaacaagctgacagaggacaaggcagatgtgcagagcatcatcggcctgcagcgcttctttgagaccaggatgaatgaggccttcggggacaccaagttctctgctgtgctggtggagcccccacccatgagcctgcccggggccggcctgagcagccaggagctgagcggcggccctggagatggcccctag

SEQ ID NO: 159033 - DNA, 2508 bp, Artificial Sequence
  derived and/or modified sequence
atggccgccagcgccgccgccgccagcgccgccgccgccagcgccgcctctggctcccctggccccggcgaaggtagcgcagggggtgaaaagcgtagcaccgccccgtcagccgccgcctcagccagcgccagcgcggcagcctcgagcccagctggtgggggggctgaagcgcttgagctgcttgagcattgcggcgtctgccgagaacggctcaggcctgagcgggagcctaggctgctgccttgcctccactccgcctgttccgcctgtctgggccctgcagcacctgcagccgcgaattcttccggtgatgggggtgccgccggggacggcacagtagtagactgcccagtgtgtaaacaacagtgtttcagcaaggacattgtggagaactacttcatgcgggattctggatccaaagcagctacagacgcccaggacgccaaccagtgttgcacgagctgcgaggacaatgcacccgccacgtcctactgcgtagaatgctctgaaccactgtgcgagacctgcgtcgaggctcatcagcgagtgaagtatacgaaggatcatactgttcgtagtaccggacctgccaagtctagggacggagaacggacagtgtattgcaatgtccacaagcatgagcctcttgtgttgttctgcgaatcttgcgataccttgacttgtcgcgattgtcagctgaacgcacacaaagaccatcagtaccaatttttagaggacgctgtgagaaaccagcgcaagctgctggcctcccttgttaagcgtttaggagataagcacgccacgctgcagaagtcaaccaaggaagtgaggagtagcataagacaggtgtccgatgtacagaaacgggttcaggttgatgttaaaatggcgatactgcaaattatgaaagagttgaacaaacggggcagggtcctcgtgaatgacgcccaaaaggtaacagagggtcaacaagagcgcctggagaggcagcactggacaatgacgaagattcagaaacaccaggaacatattctcaggttcgcttcatgggccttagagtccgataacaacaccgcacttctgctgagcaaaaagctaatttactttcagctgcatagagctcttaaaatgatcgttgatcccgttgagcctcatggagagatgaagtttcaatgggatctgaacgcctggactaagtctgccgaggcctttggtaaaatcgtcgctgagcgtccagggaccaattcaacaggacctgctcctatggctcccccgagggcacccgggcctctcagcaagcaaggaagcggatccagccagccaatggaggtccaggagggatatggcttcggtagcggcgacgacccctactcctccgcagagccgcacgtatcaggtgtcaaacgtagtcgcagtggagagggagaggtttccgggctgatgcggaaagtgccccgcgtgagcctggagcgattggatctagacctgacagcagacagtcagccaccagtgttcaaagtatttcccggcagtactaccgaagattataacttaatcgtcattgagcggggagcagctgctgctgcaacgggccagcctgggaccgcgccggctggtactcctggcgctccgccactggcaggcatggcaattgttaaagaggaggagaccgaagcggcaatcggcgcgccacctaccgcaactgagggtcccgaaaccaagcctgtgctgatggcacttgcagagggacccggcgccgagggtccaagactggcgagcccctccggaagtacgagtagcggcctggaggtcgtggcccctgaggggacgtcagctcccggaggcggtccaggcacactcgatgatagcgcgaccatttgtcgggtatgtcagaagcccggagacctggttatgtgtaaccagtgcgaattctgctttcacctcgactgccacctgcctgcattgcaggacgtgcccggggaagaatggtcctgcagcctgtgtcatgtgttgcctgatttgaaggaggaagacggctctctctctctggacggtgcagactccaccggcgttgtcgcgaagttaagcccggcgaaccaaaggaagtgtgagagggtcttattggccctgttttgtcacgagccttgccgaccattgcaccagttggctaccgattcaacattttcgctcgaccaacccggcggaaccctggacttgaccctcattagggcgcgtttacaggaaaaactttcacccccatacagctctcctcaagagttcgcccaggacgtgggccgcatgttcaaacaatttaacaagctgacagaggacaaggcggatgtccagagtatcatcggcctccagaggttttttgagacccgaatgaacgaggcgttcggcgatacgaaatttagtgcagtgctcgtcgaaccaccaccaatgtccttgcccggcgcaggtctgtcttctcaagagctaagcgggggcccaggggatggcccttag

SEQ ID NO: 159034 - DNA, 2262 bp, Artificial Sequence
  derived and/or modified sequence
atggccgccagcgccgccgccgccagcgccgccgccgccagcgccgccagcggctccccgggcccgggggaaggctccgccggtggagagaagaggtccaccgcgccatccgctgcagcctccgcgtctgcctccgccgcagctagctcccctgcgggtggcggcgccgaggctctcgaactcttggagcattgtggagtgtgcagagaacgtctgcggccggaaagagagcccaggttgcttccctgcctccattctgcatgctctgcatgcttaggtcccgcagcacctgcagcagccaacagttcaggggatgggggagccgctggggatggtacaggccccgccaagtcacgtgacggtgaaagaacggtatactgtaatgttcataaacacgagccattggtcctgttctgcgaatcctgcgacaccctcacatgccgcgactgccagctcaacgctcacaaggatcatcagtatcagtttttggaagacgccgtgcgtaatcagagaaagctccttgcctctctggtgaagagattgggtgacaagcacgcaacgctccagaagagtaccaaagaagtaagaagcagtatccgccaggtatccgatgtacagaaacgtgtgcaggttgacgtgaaaatggcaatcttacagattatgaaggagcttaataaacggggccgcgtgttggtgaacgacgcccaaaaagtgactgagggacagcaggagagactggagcgccagcattggactatgacaaaaatccaaaagcatcaggaacacattctgcggttcgcctcgtgggctctagaaagcgataacaataccgcactcctgctttccaagaaactgatctatttccaattgcacagagctctgaagatgatcgtcgatccggtggagccgcacggggagatgaagttccaatgggacttgaatgcctggaccaagtctgccgaggcctttggaaagatagtggctgagcggcctgggaccaacagcactggcccagccccgatggccccccccagagcgcccgggccgttgtctaagcagggaagcggctctagccagcccatggaggttcaagagggatacggattcggatcaggggacgatccctactccagcgctgagccgcatgtcagtggtgttaagcggtcacggtctggcgagggagaagtgagcggcttgatgcgcaaggtgccccgggtttcattagaacgcttagatctggacttgaccgccgactctcagcccccagtatttaaggtgtttccaggttccacaactgaggattacaatctcatcgtgattgaacgaggggccgctgcagccgcaaccggccagcctggaactgctcccgcagggacgcctggagctccaccgctagcaggaatggccatcgtgaaagaggaagagaccgaggcagcaatcggagccccccccactgccactgaagggccggagaccaagcctgtcctgatggcgttggccgaaggcccaggagcggaagggcccagactggcctctccgagcggaagcacatcctcaggtctcgaggtcgtcgctcccgaagggacgtcagccccaggcggtggtcctggaaccttagatgactccgccaccatctgccgggtgtgtcagaagcctggtgatttggttatgtgcaaccagtgcgaattctgctttcacctggattgtcatctccccgccctccaggacgtaccaggcgaagaatggagctgctcgttatgccacgtgctaccggacctcaaagaggaagacgggtcgcttagtcttgacggagccgactctactggcgttgtggcaaagttgagtccagcaaatcagaggaagtgtgaacgggtcctgctcgccttgttttgccacgaaccttgccgtcccttacaccagcttgccaccgattccacattcagcctggatcaaccaggtggcacgctggaccttacactcatccgggccagattacaagaaaagcttagtcctccttacagttccccacaggagttcgcacaggatgtgggccgcatgttcaagcagtttaacaagctaacagaagacaaagcagatgtccagtctataatcggactgcagcggttcttcgaaacccgcatgaacgaggcgttcggagacaccaaattttcagccgtcctggtggagccaccaccaatgagcctgccaggcgctggtcttagttcgcaggagcttagcggtggacctggtgatgggccgtag

SEQ ID NO: 159035 - DNA, 2508 bp, Artificial Sequence
  derived and/or modified sequence
atggccgcatcagcagccgctgcatcggccgctgcggcatcagcggcatccggttcgcccggtcctggagagggcagtgctggtggagagaagcgatctacagcaccatcagcagctgcctctgcctcagcaagtgcggctgcgagctctccagccggtggcggagcggaagccctagaattgctggagcactgtggcgtgtgccgtgagcgcctccgcccagaacgcgaaccgaggctcctaccctgtcttcacagtgcatgtagtgcttgcctggggcctgcggctccagcagctgccaacagctccggggatggaggtgctgctggggacggcaccgtcgttgattgtcccgtttgcaagcagcagtgttttagcaaagatattgtggaaaactattttatgcgtgattccgggtctaaggcggcaactgacgcgcaagatgctaatcaatgttgcacatcttgcgaagacaatgctccggctaccagctattgtgtggaatgctcggagcctctttgcgaaacctgcgtcgaggcacaccaaagagtgaaatacaccaaagaccacaccgttaggagtacagggccagcgaaaagcagagatggggagcggactgtgtactgcaacgtgcacaaacatgagcctctcgtgctgttctgcgagtcttgcgatacgctgacctgtcgcgactgccagctcaatgcacataaagaccaccagtaccaattcctggaggatgccgtgagaaatcagcgtaagttgctagccagcctcgtgaagcggctgggcgacaagcacgcaacactgcagaagtccaccaaggaggtgcggtcgtccattcgccaggtttctgatgtgcaaaagagggtacaagtcgacgtcaaaatggctatcctgcagataatgaaagagctgaacaaaaggggacgggtgttggttaacgacgcccaaaaagtcacagaggggcagcaggagcgattggaaaggcaacattggacgatgaccaaaatccagaagcaccaggagcacattctacgatttgcttcatgggcgttagaatccgacaacaatactgcgctgctcctgagcaaaaagctcatctacttccagctgcatcgcgctctgaagatgattgtggacccagtggagccacatggagagatgaaatttcagtgggacctcaacgcctggacgaaaagtgcagaggcctttggcaagattgtggccgagagacccggtacaaattcgactggcccagcaccaatggcgcctcccagggcgcctgggccactatctaaacaagggagtgggtccagccaacccatggaggttcaagagggatatggttttggctccggtgacgatccatactcctccgccgaaccccatgtgagtggagtgaagcgatccagatcaggagagggtgaggtgtcaggtctgatgaggaaagttcctagggtttccctggaaagactggatttggatctgacagctgactcacagccacctgtgttcaaagttttccccggtagtaccaccgaagattacaatctcatcgtcattgagaggggggctgcggcagccgctactggtcagccaggaacagcccctgctggtaccccgggagcgccacctttagctgggatggccatcgtgaaggaggaggagaccgaggcggctatcggcgcaccccctaccgccacagagggaccggagactaaacccgtattgatggcactggcagagggtcccggagctgagggccctaggcttgccagtccctccggcagcacttccagtgggctggaggttgttgctcctgaagggaccagcgctccgggaggaggacctggcactctcgacgattctgctaccatttgcagagtgtgtcagaagcccggtgacctggttatgtgcaatcaatgtgagttttgttttcacttggattgccacctcccggctctccaggatgtgccaggtgaagagtggagctgttcactatgccatgtgttgcccgacttgaaggaggaagatgggtccctatcactagatggtgccgattccaccggcgtagtggcgaagctctccccggcaaatcaacgaaagtgtgaaagggtgttgctggccctgttttgtcacgagccctgccgtccactccaccagttggctaccgactcgaccttctctctggaccagccgggaggcacactggacttaaccttgattcgcgctcgactgcaggagaaactcagtcccccttattcatccccacaagagttcgcacaggacgtgggccgtatgtttaaacagttcaataaactcactgaagacaaagcagacgtgcagagtatcattggactgcagcgattttttgaaacgcgaatgaatgaagctttcggtgacactaaattttccgcagtgctggtggaacctcccccaatgagtcttcctggtgccggactctcctctcaggagctctcagggggtcccggagacggcccttag

SEQ ID NO: 159036 - DNA, 2262 bp, Artificial Sequence
  derived and/or modified sequence
atggcagcttcagccgcagcagcaagcgcagccgctgcaagcgccgcttcgggttcaccaggcccaggcgagggcagcgccggaggtgagaagaggagtactgctccctccgccgctgcatcggcatcagccagcgcagcagctagctcaccagccggagggggtgccgaagcacttgagctgctggaacattgtggcgtgtgtagggaacggctcagacctgagcgagaacccaggttgctgccttgcctccatagtgcctgctcagcatgtttgggaccagctgcaccggctgcagccaactcctcaggcgacggcggagcagccggtgatggaactggacctgctaagtccagagacggggagcgaaccgtgtactgtaacgtgcacaaacatgaacccctggtgctgttttgcgagagctgtgatactctcacctgtcgggattgccagttgaatgcacacaaggatcaccaatatcaattcttggaggacgccgtcaggaaccagcggaagctgctggcctccctggtaaagcgactgggggacaaacatgccacactgcagaagtctacaaaagaagttcgttcgagcatccgacaagtaagtgatgtgcaaaaacgcgtgcaagttgacgtgaagatggccattttgcagataatgaaagagttgaataagcggggacgagtgctggttaatgatgcgcagaaagtgacagaaggtcagcaggagagactcgagaggcagcactggaccatgaccaagattcaaaagcatcaggagcatatactgagattcgcgtcttgggctcttgagagtgacaataatacagccctccttttgtcgaaaaaacttatctatttccaactccatagggcccttaaaatgatcgtcgacccggtggagccacacggcgagatgaaatttcaatgggacctcaatgcgtggactaagtctgccgaagcatttggaaagattgtcgccgagcggcctggtaccaatagcactggacccgctccaatggcaccccctcgtgccccaggtcctctttctaaacagggcagcggtagcagtcagcccatggaggtccaggaagggtacgggttcgggagtggcgacgacccctatagctccgccgagcctcatgtgtctggtgtcaagagaagccggtcgggtgaaggcgaggtctcaggcctgatgagaaaagtccctagagttagtctggagaggctcgatttggacttgactgctgactcccagcctccagttttcaaggtcttccccggatccacgacagaggattacaatttgatcgtgatcgagcggggagccgctgcggcagccactggccagccagggaccgctccagctggaacaccaggagctccgcctctcgccggtatggccatcgtgaaggaggaggaaaccgaggccgctatcggtgcccctcccacagcaaccgagggacccgagacaaagcctgtactgatggcactcgctgaagggccaggagcagagggaccacgactggctagccctagtggcagtacctctagcgggcttgaggtggtcgccccagaaggcacatcggccccaggaggaggcccaggcacattggacgatagcgccacaatttgtagagtatgccagaaacccggagatctggtgatgtgcaaccagtgcgaattctgttttcatctggattgccatctgccagctctacaggacgtaccaggagaagagtggtcatgctccctgtgtcatgttctgccagacttgaaagaagaagacggcagcctatcacttgatggagctgactctacaggcgtggtagctaagctgtcacccgcaaaccagaggaagtgtgagcgggtgttacttgctctgttctgtcacgagccctgtagacccctgcaccaactggctaccgactccactttcagtcttgaccaaccaggcggtacactcgacctcactctcattagagccagacttcaggagaaactgagtccaccctattcaagtcctcaggagtttgctcaggatgtcggcaggatgtttaagcagtttaataagctcaccgaggacaaggccgacgtccagagtattatcgggctccagaggtttttcgaaacccgcatgaacgaggcatttggggatacaaaattctctgcggtactagttgaacccccacctatgtccctccctggtgccggtctaagttcccaggagctgtcaggcggaccaggggatggcccatag

SEQ ID NO: 159037 - DNA, 2959 bp, Artificial Sequence
  derived and/or modified sequence
ggcgcgcgggcgagcggttgtgcttgtgcttgtggcgcgtggtgcgggtttcggcggcggctgaggaagaagcgcgggcggcgccttcgggaggcgagcaggcagcagttggccgtgccgtagcagcgtcccgcgcgcggcgggcagcggcccaggaggcgcgtggcggcgctcggcctcgcggcggcggcggcggcagcggcccagcagttggcggcgagcgcgtctgcgcctgcgcggcgggccccgcgcccctcctccccccctgggcgcccccggcggcgtgtgaatggcggcctccgcggcggcagcctcggcagcagcggcctcggccgcctctggcagcccgggcccgggcgagggctccgctggcggcgaaaagcgctccaccgccccttcggccgcagcctcggcctctgcctcagccgcggcgtcgtcgcccgcggggggcggcgccgaggcgctggagctgctggagcactgcggcgtgtgcagagagcgcctgcgacccgagagggagccccgcctgctgccctgtttgcactcggcctgtagtgcctgcttagggcccgcggcccccgccgccgccaacagctcgggggacggcggggcggcgggcgacggcaccgtggtggactgtcccgtgtgcaagcaacagtgcttctccaaagacatcgtggagaattatttcatgcgtgatagtggcagcaaggctgccaccgacgcccaggatgcgaaccagtgctgcactagctgtgaggataatgccccagccaccagctactgtgtggagtgctcggagcctctgtgtgagacctgtgtagaggcgcaccagcgggtgaagtacaccaaggaccatactgtgcgctctactgggccagccaagtctcgggatggtgaacgtactgtctattgcaacgtacacaagcatgaaccccttgtgctgttttgtgagagctgtgatactctcacctgccgagactgccagctcaatgcccacaaggaccaccagtaccagttcttagaggatgcagtgaggaaccagcgcaagctcctggcctcactggtgaagcgccttggggacaaacatgcaacattgcagaagagcaccaaggaggttcgcagctcaatccgccaggtgtctgacgtacagaagcgtgtgcaagtggatgtcaagatggccatcctgcagatcatgaaggagctgaataagcggggccgtgtgctggtcaatgatgcccagaaggtgactgaggggcagcaggagcgcctggagcggcagcactggaccatgaccaagatccagaagcaccaggagcacattctgcgctttgcctcttgggctctggagagtgacaacaacacagcccttttgctttctaagaagttgatctacttccagctgcaccgggccctcaagatgattgtggatcccgtggagccacatggcgagatgaagtttcagtgggacctcaatgcctggaccaagagtgccgaggcctttggcaagattgtggcagagcgtcctggcactaactcaacaggccctgcacccatggcccctccaagagccccagggcccctgagcaagcagggctctggcagcagccagcccatggaggtgcaggaaggctatggctttgggtcaggagatgatccctactcaagtgcagagccccatgtgtcaggtgtgaaacggtcccgctcaggtgagggcgaggtgagcggccttatgcgcaaggtgccacgagtgagccttgaacgcctggacctggacctcacagctgacagccagccacccgtcttcaaggtcttcccaggcagtaccactgaggactacaaccttattgttattgaacgtggcgctgccgctgcagctaccggccagccagggactgcgcctgcaggaacccctggtgccccacccctggctggcatggccattgtcaaggaggaggagacggaggctgccattggagcccctcctactgccactgagggccctgagaccaaacctgtgcttatggctcttgcggagggtcctggtgctgagggtccccgcctggcctcacctagtggcagcaccagctcagggctggaggtggtggctcctgagggtacctcagccccaggtggtggcccgggaaccctggatgacagtgccaccatttgccgtgtctgccagaagccaggcgatctggttatgtgcaaccagtgtgagttttgtttccacctggactgtcacctgccggccctgcaggatgtaccaggggaggagtggagctgctcactctgccatgtgctccctgacctgaaggaggaggatggcagcctcagcctggatggtgcagacagcactggcgtggtggccaagctctcaccagccaaccagcggaaatgtgagcgtgtactgctggccctattctgtcacgaaccctgccgccccctgcatcagctggctaccgactccaccttctccctggaccagcccggtggcaccctggatctgaccctgatccgtgcccgcctccaggagaagttgtcacctccctacagctccccacaggagtttgcccaggatgtgggccgcatgttcaagcaattcaacaagttaactgaggacaaggcagacgtgcagtccatcatcggcctgcagcgcttcttcgagacgcgcatgaacgaggccttcggtgacaccaagttctctgctgtgctggtggagcccccgccgatgagcctgcctggtgctggcctgagttcccaggagctgtctggtggccctggtgatggcccctgaggctggagcccccatggccagcccagcctggctctgttctctgtcctgtcaccccatccccactcccctggtggcctgactcccactccctggtggccccatcccccagttcctcacgatatggtttttacttctgtggatttaataaaaacttcaccagtt

SEQ ID NO: 159038 - DNA, 2713 bp, Artificial Sequence
  derived and/or modified sequence
ggcgcgcgggcgagcggttgtgcttgtgcttgtggcgcgtggtgcgggtttcggcggcggctgaggaagaagcgcgggcggcgccttcgggaggcgagcaggcagcagttggccgtgccgtagcagcgtcccgcgcgcggcgggcagcggcccaggaggcgcgtggcggcgctcggcctcgcggcggcggcggcggcagcggcccagcagttggcggcgagcgcgtctgcgcctgcgcggcgggccccgcgcccctcctccccccctgggcgcccccggcggcgtgtgaatggcggcctccgcggcggcagcctcggcagcagcggcctcggccgcctctggcagcccgggcccgggcgagggctccgctggcggcgaaaagcgctccaccgccccttcggccgcagcctcggcctctgcctcagccgcggcgtcgtcgcccgcggggggcggcgccgaggcgctggagctgctggagcactgcggcgtgtgcagagagcgcctgcgacccgagagggagccccgcctgctgccctgtttgcactcggcctgtagtgcctgcttagggcccgcggcccccgccgccgccaacagctcgggggacggcggggcggcgggcgacggcaccgggccagccaagtctcgggatggtgaacgtactgtctattgcaacgtacacaagcatgaaccccttgtgctgttttgtgagagctgtgatactctcacctgccgagactgccagctcaatgcccacaaggaccaccagtaccagttcttagaggatgcagtgaggaaccagcgcaagctcctggcctcactggtgaagcgccttggggacaaacatgcaacattgcagaagagcaccaaggaggttcgcagctcaatccgccaggtgtctgacgtacagaagcgtgtgcaagtggatgtcaagatggccatcctgcagatcatgaaggagctgaataagcggggccgtgtgctggtcaatgatgcccagaaggtgactgaggggcagcaggagcgcctggagcggcagcactggaccatgaccaagatccagaagcaccaggagcacattctgcgctttgcctcttgggctctggagagtgacaacaacacagcccttttgctttctaagaagttgatctacttccagctgcaccgggccctcaagatgattgtggatcccgtggagccacatggcgagatgaagtttcagtgggacctcaatgcctggaccaagagtgccgaggcctttggcaagattgtggcagagcgtcctggcactaactcaacaggccctgcacccatggcccctccaagagccccagggcccctgagcaagcagggctctggcagcagccagcccatggaggtgcaggaaggctatggctttgggtcaggagatgatccctactcaagtgcagagccccatgtgtcaggtgtgaaacggtcccgctcaggtgagggcgaggtgagcggccttatgcgcaaggtgccacgagtgagccttgaacgcctggacctggacctcacagctgacagccagccacccgtcttcaaggtcttcccaggcagtaccactgaggactacaaccttattgttattgaacgtggcgctgccgctgcagctaccggccagccagggactgcgcctgcaggaacccctggtgccccacccctggctggcatggccattgtcaaggaggaggagacggaggctgccattggagcccctcctactgccactgagggccctgagaccaaacctgtgcttatggctcttgcggagggtcctggtgctgagggtccccgcctggcctcacctagtggcagcaccagctcagggctggaggtggtggctcctgagggtacctcagccccaggtggtggcccgggaaccctggatgacagtgccaccatttgccgtgtctgccagaagccaggcgatctggttatgtgcaaccagtgtgagttttgtttccacctggactgtcacctgccggccctgcaggatgtaccaggggaggagtggagctgctcactctgccatgtgctccctgacctgaaggaggaggatggcagcctcagcctggatggtgcagacagcactggcgtggtggccaagctctcaccagccaaccagcggaaatgtgagcgtgtactgctggccctattctgtcacgaaccctgccgccccctgcatcagctggctaccgactccaccttctccctggaccagcccggtggcaccctggatctgaccctgatccgtgcccgcctccaggagaagttgtcacctccctacagctccccacaggagtttgcccaggatgtgggccgcatgttcaagcaattcaacaagttaactgaggacaaggcagacgtgcagtccatcatcggcctgcagcgcttcttcgagacgcgcatgaacgaggccttcggtgacaccaagttctctgctgtgctggtggagcccccgccgatgagcctgcctggtgctggcctgagttcccaggagctgtctggtggccctggtgatggcccctgaggctggagcccccatggccagcccagcctggctctgttctctgtcctgtcaccccatccccactcccctggtggcctgactcccactccctggtggccccatcccccagttcctcacgatatggtttttacttctgtggatttaataaaaacttcaccagtt

SEQ ID NO: 159039 - DNA, 2508 bp, Artificial Sequence
  derived and/or modified sequence
atggccgccagcgccgccgccgccagcgccgccgccgccagcgccgccagcggcagccccggccccggcgagggcagcgccggcggcgagaagagaagcaccgcccccagcgccgccgccagcgccagcgccagcgccgccgccagcagccccgccggcggcggcgccgaggccctggagctgctggagcactgcggcgtgtgcagagagagactgagacccgagagagagcccagactgctgccctgcctgcacagcgcctgcagcgcctgcctgggccccgccgcccccgccgccgccaacagcagcggcgacggcggcgccgccggcgacggcaccgtggtggactgccccgtgtgcaagcagcagtgcttcagcaaggacatcgtggagaactacttcatgagagacagcggcagcaaggccgccaccgacgcccaggacgccaaccagtgctgcaccagctgcgaggacaacgcccccgccaccagctactgcgtggagtgcagcgagcccctgtgcgagacctgcgtggaggcccaccagagagtgaagtacaccaaggaccacaccgtgagaagcaccggccccgccaagagcagagacggcgagagaaccgtgtactgcaacgtgcacaagcacgagcccctggtgctgttctgcgagagctgcgacaccctgacctgcagagactgccagctgaacgcccacaaggaccaccagtaccagttcctggaggacgccgtgagaaaccagagaaagctgctggccagcctggtgaagagactgggcgacaagcacgccaccctgcagaagagcaccaaggaggtgagaagcagcatcagacaggtgagcgacgtgcagaagagagtgcaggtggacgtgaagatggccatcctgcagatcatgaaggagctgaacaagagaggcagagtgctggtgaacgacgcccagaaggtgaccgagggccagcaggagagactggagagacagcactggaccatgaccaagatccagaagcaccaggagcacatcctgagattcgccagctgggccctggagagcgacaacaacaccgccctgctgctgagcaagaagctgatctacttccagctgcacagagccctgaagatgatcgtggaccccgtggagccccacggcgagatgaagttccagtgggacctgaacgcctggaccaagagcgccgaggccttcggcaagatcgtggccgagagacccggcaccaacagcaccggccccgcccccatggccccccccagagcccccggccccctgagcaagcagggcagcggcagcagccagcccatggaggtgcaggagggctacggcttcggcagcggcgacgacccctacagcagcgccgagccccacgtgagcggcgtgaagagaagcagaagcggcgagggcgaggtgagcggcctgatgagaaaggtgcccagagtgagcctggagagactggacctggacctgaccgccgacagccagccccccgtgttcaaggtgttccccggcagcaccaccgaggactacaacctgatcgtgatcgagagaggcgccgccgccgccgccaccggccagcccggcaccgcccccgccggcacccccggcgccccccccctggccggcatggccatcgtgaaggaggaggagaccgaggccgccatcggcgccccccccaccgccaccgagggccccgagaccaagcccgtgctgatggccctggccgagggccccggcgccgagggccccagactggccagccccagcggcagcaccagcagcggcctggaggtggtggcccccgagggcaccagcgcccccggcggcggccccggcaccctggacgacagcgccaccatctgcagagtgtgccagaagcccggcgacctggtgatgtgcaaccagtgcgagttctgcttccacctggactgccacctgcccgccctgcaggacgtgcccggcgaggagtggagctgcagcctgtgccacgtgctgcccgacctgaaggaggaggacggcagcctgagcctggacggcgccgacagcaccggcgtggtggccaagctgagccccgccaaccagagaaagtgcgagagagtgctgctggccctgttctgccacgagccctgcagacccctgcaccagctggccaccgacagcaccttcagcctggaccagcccggcggcaccctggacctgaccctgatcagagccagactgcaggagaagctgagccccccctacagcagcccccaggagttcgcccaggacgtgggcagaatgttcaagcagttcaacaagctgaccgaggacaaggccgacgtgcagagcatcatcggcctgcagagattcttcgagaccagaatgaacgaggccttcggcgacaccaagttcagcgccgtgctggtggagcccccccccatgagcctgcccggcgccggcctgagcagccaggagctgagcggcggccccggcgacggcccctag

SEQ ID NO: 159040 - DNA, 2262 bp, Artificial Sequence
  derived and/or modified sequence
atggccgccagcgccgccgccgccagcgccgccgccgccagcgccgccagcggcagccccggccccggcgagggcagcgccggcggcgagaagagaagcaccgcccccagcgccgccgccagcgccagcgccagcgccgccgccagcagccccgccggcggcggcgccgaggccctggagctgctggagcactgcggcgtgtgcagagagagactgagacccgagagagagcccagactgctgccctgcctgcacagcgcctgcagcgcctgcctgggccccgccgcccccgccgccgccaacagcagcggcgacggcggcgccgccggcgacggcaccggccccgccaagagcagagacggcgagagaaccgtgtactgcaacgtgcacaagcacgagcccctggtgctgttctgcgagagctgcgacaccctgacctgcagagactgccagctgaacgcccacaaggaccaccagtaccagttcctggaggacgccgtgagaaaccagagaaagctgctggccagcctggtgaagagactgggcgacaagcacgccaccctgcagaagagcaccaaggaggtgagaagcagcatcagacaggtgagcgacgtgcagaagagagtgcaggtggacgtgaagatggccatcctgcagatcatgaaggagctgaacaagagaggcagagtgctggtgaacgacgcccagaaggtgaccgagggccagcaggagagactggagagacagcactggaccatgaccaagatccagaagcaccaggagcacatcctgagattcgccagctgggccctggagagcgacaacaacaccgccctgctgctgagcaagaagctgatctacttccagctgcacagagccctgaagatgatcgtggaccccgtggagccccacggcgagatgaagttccagtgggacctgaacgcctggaccaagagcgccgaggccttcggcaagatcgtggccgagagacccggcaccaacagcaccggccccgcccccatggccccccccagagcccccggccccctgagcaagcagggcagcggcagcagccagcccatggaggtgcaggagggctacggcttcggcagcggcgacgacccctacagcagcgccgagccccacgtgagcggcgtgaagagaagcagaagcggcgagggcgaggtgagcggcctgatgagaaaggtgcccagagtgagcctggagagactggacctggacctgaccgccgacagccagccccccgtgttcaaggtgttccccggcagcaccaccgaggactacaacctgatcgtgatcgagagaggcgccgccgccgccgccaccggccagcccggcaccgcccccgccggcacccccggcgccccccccctggccggcatggccatcgtgaaggaggaggagaccgaggccgccatcggcgccccccccaccgccaccgagggccccgagaccaagcccgtgctgatggccctggccgagggccccggcgccgagggccccagactggccagccccagcggcagcaccagcagcggcctggaggtggtggcccccgagggcaccagcgcccccggcggcggccccggcaccctggacgacagcgccaccatctgcagagtgtgccagaagcccggcgacctggtgatgtgcaaccagtgcgagttctgcttccacctggactgccacctgcccgccctgcaggacgtgcccggcgaggagtggagctgcagcctgtgccacgtgctgcccgacctgaaggaggaggacggcagcctgagcctggacggcgccgacagcaccggcgtggtggccaagctgagccccgccaaccagagaaagtgcgagagagtgctgctggccctgttctgccacgagccctgcagacccctgcaccagctggccaccgacagcaccttcagcctggaccagcccggcggcaccctggacctgaccctgatcagagccagactgcaggagaagctgagccccccctacagcagcccccaggagttcgcccaggacgtgggcagaatgttcaagcagttcaacaagctgaccgaggacaaggccgacgtgcagagcatcatcggcctgcagagattcttcgagaccagaatgaacgaggccttcggcgacaccaagttcagcgccgtgctggtggagcccccccccatgagcctgcccggcgccggcctgagcagccaggagctgagcggcggccccggcgacggcccctag

SEQ ID NO: 159041 - protein, 926 aa, Artificial Sequence
  derived and/or modified sequence
MLQVHRTGLGRLGVSLSKGLHHKAVLAVRREDVNAWERRAPLAPKHIKGITNLGYKVLIQPSNRRAIHDKDYVKAGGILQEDISEACLILGVKRPPEEKLMSRKTYAFFSHTIKAQEANMGLLDEILKQEIRLIDYEKMVDHRGVRVVAFGQWAGVAGMINILHGMGLRLLALGHHTPFMHIGMAHNYRNSSQAVQAVRDAGYEISLGLMPKSIGPLTFVFTGTGNVSKGAQAIFNELPCEYVEPHELKEVSQTGDLRKVYGTVLSRHHHLVRKTDAVYDPAEYDKHPERYISRFNTDIAPYTTCLINGIYWEQNTPRLLTRQDAQSLLAPGKFSPAGVEGCPALPHKLVAICDISADTGGSIEFMTECTTIEHPFCMYDADQHIIHDSVEGSGILMCSIDNLPAQLPIEATECFGDMLYPYVEEMILSDATQPLESQNFSPVVRDAVITSNGTLPDKYKYIQTLRESRERAQSLSMGTRRKVLVLGSGYISEPVLEYLSRDGNIEITVGSDMKNQIEQLGKKYNINPVSMDICKQEEKLGFLVAKQDLVISLLPYVLHPLVAKACITNKVNMVTASYITPALKELEKSVEDAGITIIGELGLDPGLDHMLAMETIDKAKEVGATIESYISYCGGLPAPEHSNNPLRYKFSWSPVGVLMNVMQSATYLLDGKVVNVAGGISFLDAVTSMDFFPGLNLEGYPNRDSTKYAEIYGISSAHTLLRGTLRYKGYMKALNGFVKLGLINREALPAFRPEANPLTWKQLLCDLVGISPSSEHDVLKEAVLKKLGGDNTQLEAAEWLGLLGDEQVPQAESILDALSKHLVMKLSYGPEEKDMIVMRDSFGIRHPSGHLEHKTIDLVAYGDINGFSAMAKTVGLPTAMAAKMLLDGEIGAKGLMGPFSKEIYGPILERIKAEGIIYTTQSTIKP

SEQ ID NO: 159042 - DNA, 2781 bp, Artificial Sequence
  derived and/or modified sequence
atgctccaggtccaccgtactggattggggcgtttgggtgtgtcactgagtaaagggctgcatcacaaagccgtcttagctgtgcggcgggaagacgtgaatgcatgggagcggcgggctccgctcgctccaaagcacatcaagggcatcaccaatctgggctataaggtactcatccagccaagcaatcgccgcgctattcatgacaaagactacgtaaaagctggcggcatattgcaggaggatatcagcgaggcctgcctgattctgggggtcaagcggccgcctgaagaaaaacttatgtctcgaaagacgtatgctttttttagtcacactattaaggcacaggaagcaaacatgggactgctcgacgagattttgaagcaggagattagactcattgactacgagaaaatggtggatcataggggcgtccgagttgttgcttttgggcagtgggccggagtagctggtatgataaacatcttgcacggaatgggtcttcgtcttttagccctgggtcaccacactcctttcatgcatatcggcatggcccataactatcggaactcatctcaggctgtccaggcagtgcgcgatgccggatatgagatctctcttggcctcatgcccaagtctatcgggccgctgactttcgtgtttacgggcacaggaaacgtgtcaaagggagctcaggcaatttttaatgagctgccatgcgaatatgtggaaccacatgagctgaaagaagtctcccagactggcgacctgagaaaggtgtatggtacagtgcttagccgtcatcatcacttggttaggaagacggacgcagtgtatgaccccgctgaatacgacaaacacccggagaggtatatcagcagatttaatacagacattgctccgtacactacttgtttgattaacggtatatactgggaacagaacacacccagactccttactagacaggatgctcagagcttgctggcccccggcaagttctctcctgccggtgtggagggatgtcccgcactgccgcacaagctggtcgctatttgcgacatttcggccgacactgggggcagcattgaattcatgactgagtgcactaccatcgagcaccccttttgtatgtacgatgcggaccagcatattatccatgacagcgtggaaggaagtggtatcctgatgtgtagcatcgataatctgccagcacaactgccgatcgaggctaccgagtgcttcggagatatgctgtatccgtacgtagaggagatgatcttgtccgacgccacccaacccctggagtctcagaacttttcccctgttgtgcgcgacgccgttattacgtccaacgggacgttgccagacaaatacaaatatatccagactcttagggagagccgggaaagggcccagagtttatccatggggaccagaagaaaggtcttggttttaggctcagggtacatatctgagcccgtgttggagtatctgtcacgggatggtaacatagagatcacagtaggctccgacatgaagaatcaaatcgaacagcttggtaaaaaatataatatcaaccccgtgtcaatggacatctgcaaacaggaggaaaaactgggttttttggtcgccaaacaagatttggtcatatctttgctgccctacgtgctgcacccgcttgtagcaaaggcctgcatcacaaacaaagttaatatggtgaccgccagctacatcactccagcgctaaaggaacttgagaagagcgttgaagatgcaggcattacgataatcggcgaattggggctagatcctggactcgatcatatgctcgccatggagactatagacaaggctaaggaagttggggccacaattgaaagttatatttcgtactgtggtggcctgccggcgccagagcatagtaataatcctttaagatataagtttagctggtctcccgtaggcgtgctgatgaacgtgatgcaatccgccacatacctacttgatgggaaggtcgtgaacgtggccgggggcatctccttcctcgatgcagtgacatctatggattttttccccggcctgaacttagaggggtaccccaaccgggacagtactaagtacgccgaaatctatgggatttccagcgcccacaccctgctcaggggtaccctcagatacaagggctatatgaaggcactgaacggttttgttaaacttggccttataaaccgtgaagccctgccggccttccgccctgaggctaatcctttgacctggaaacagctgctttgcgatctggtcggcataagccccagttcggagcatgacgtcctgaaggaggctgtcctgaaaaagctgggtggcgataacacgcaactcgaagccgccgagtggctcggcctgctgggagatgagcaggtcccacaagccgagtctatcctcgatgccctcagtaagcatctggtgatgaagctgagctatgggccagaggagaaggatatgattgtgatgagagacagtttcgggattaggcatccatccgggcaccttgagcataagactatcgacttagtcgcttacggagatattaacgggttctcagcaatggccaaaactgttggtctgcctacggcaatggcagccaagatgctgctggacggagagattggcgccaaagggctgatggggccctttagcaaagagatttatggcccaatcctggagcgtatcaaagctgagggaattatatacactacccagagcactatcaaaccctag

SEQ ID NO: 159043 - DNA, 2781 bp, Artificial Sequence
  derived and/or modified sequence
atgcttcaggtccaccgtactggactgggtcggctgggcgtctcactgagtaaggggttgcaccacaaagcagtgttggctgttcgcagagaggatgtcaatgcctgggaaaggcgcgctcctctggcgcctaagcatataaaggggattacaaacttgggttacaaagtactaattcaaccaagcaacagacgggcaattcacgacaaggactacgtcaaggccggtggcatcctgcaggaagatatctccgaggcttgcctgatcctaggtgtgaaacggcctccggaggagaaactgatgagcagaaaaacatatgcattctttagccacaccattaaggcgcaggaagcgaatatggggcttctcgacgaaatcctgaaacaggaaattcggctgatagattatgagaaaatggtcgaccataggggtgtgagggtggtggcctttggtcagtgggccggcgtggctggtatgattaatattctgcatggcatgggcttgcggctgctggccctgggacatcatacacctttcatgcatatcggaatggcccacaactacagaaattcaagtcaggctgtgcaggctgtccgggatgcagggtatgagatttccctcggtttgatgcccaagtcgatcggccctctaacatttgttttcaccggcactgggaatgtgagtaagggagcccaggcgatattcaacgagttgccgtgcgagtacgtggagcctcacgagctgaaggaagtgtcccagaccggggatttaagaaaagtctatggaactgtactctcgcgacaccaccatctggttaggaaaacagacgcagtctacgaccctgcagagtatgacaagcaccccgaaagatacatcagtaggttcaacaccgacattgccccctatactacctgtctcattaatggcatctactgggagcagaatacaccccgcttactgacccgacaggacgcacagtccctgctggctcccggaaagttctcgccggctggtgtggagggctgtccagctctgcctcacaagctggtcgcaatttgcgacattagtgccgatactgggggtagcatcgaattcatgaccgagtgtaccacgattgaacatcccttttgcatgtacgatgccgaccaacatatcatccatgactcagtggaaggatctggcatcctcatgtgctccatagacaacctgccggcccaactgccaatcgaggcgaccgagtgcttcggcgacatgctgtacccttatgtggaggagatgatcctgagtgatgcaactcaacccctggaaagccagaacttttcacctgtcgtgcgcgacgccgtgatcactagcaacggaacactgccagataaatacaagtacattcagacattaagagagtccagggagcgggcacaatcgctgtccatgggtacaaggcgcaaggtacttgtgctaggttccgggtacatttctgagcctgtgctggaatacctgtcaagagatggcaacatcgagatcaccgtgggctctgatatgaagaaccagatcgagcagttgggaaagaagtacaatattaatcctgtatctatggatatctgcaaacaggaagaaaaactgggctttctcgttgcaaaacaggacctcgtcatcagtttgctcccatacgttctgcatcctctggtagctaaagcatgtattacaaataaggtcaatatggtcaccgcatcctatatcacaccagccttgaaggaactggaaaagagcgtggaagacgccgggatcacaattataggagaacttggcctggaccccggtcttgatcatatgcttgccatggagactatagataaggccaaggaagtcggagcaaccatcgagtcctacatcagctattgcggaggcctgcctgcaccagaacattccaacaacccactgcgttataagttcagctggagcccggtgggagtccttatgaatgttatgcagtctgccacataccttctggacggcaaggtggtgaatgtagcaggggggatctctttcttagatgccgtaacaagtatggacttcttccctggattgaacctcgaggggtatcccaatcgcgattcgaccaagtatgcagagatctatggcatatcttctgcccacacactgctgcggggcaccctacgctataaaggctatatgaaggcccttaacggcttcgtcaagctggggctgatcaaccgtgaagctctccctgccttcaggcccgaggctaaccctctgacatggaagcaacttctttgcgatctggtgggtattagtccaagctccgagcacgatgtcctcaaggaggcagtgctgaagaagctcgggggagacaacacccagctggaagcagcagagtggctcggcctgctgggtgatgagcaggtgccccaggcagagtctatcctggatgccctcagtaagcaccttgtgatgaaactgtcatacggcccagaggagaaggatatgatcgtcatgcgcgactcgtttgggattcggcacccctccggacacctcgagcataaaaccatagacctcgtcgcttacggagatattaacgggttttccgctatggccaagactgttgggttgccaaccgcaatggccgctaagatgcttctggatggcgagatcggtgctaagggtttgatgggccctttttccaaagaaatttatggccctattctggagcgcatcaaggctgaaggaattatttacactacgcagagcactatcaagccgtag

SEQ ID NO: 159044 - DNA, 2781 bp, Artificial Sequence
  derived and/or modified sequence
atgctgcaggtgcacaggacaggcctgggccgcctgggcgtgtccctgagcaagggcctgcaccacaaggctgtgctggccgtgagaagagaagatgtgaatgcctgggagcggcgggcccccctggcccccaagcacatcaagggcatcaccaacctgggctacaaggtgctgatccagcccagcaacagaagagccatccatgacaaggactatgtgaaggccggcggcatcctgcaggaggacatcagcgaggcctgcctgatcctgggcgtgaagaggcctcctgaggagaagctgatgagcaggaagacctacgccttcttcagccacaccatcaaggcccaggaggccaacatgggcctgctggatgagatcctgaagcaggagatccggctgattgattatgagaagatggtggaccaccggggcgtgcgggtggtggccttcggccagtgggccggcgtggccggcatgatcaacatcctgcacggcatgggcctgcggctgctggccctgggccaccacacccccttcatgcacatcggcatggcccacaactacagaaacagcagccaggccgtgcaggccgtgagagatgctggctatgagatcagcctgggcctgatgcccaagagcatcggccccctgacctttgtgttcaccggcactggaaatgtgtccaaaggagcccaggccatcttcaatgagctgccctgtgaatatgtggagccccatgagctgaaggaggtgtcccagacaggagacctgaggaaggtgtatggaacagtgctgagccgccaccaccacctggtgaggaagacagatgctgtgtatgaccctgcagaatatgacaagcaccctgagcgctacatcagccgcttcaacacagacatcgccccctacaccacctgcctgatcaatggcatctactgggagcagaacaccccccggctgctgacccggcaggatgcccagagcctgctggcccctgggaagttcagccctgctggggtggagggctgcccagccctgccccacaagctggtggccatctgtgacatctctgctgacacaggaggcagcattgagttcatgacagagtgcaccaccatcgagcaccccttctgcatgtatgatgctgaccagcacatcatccatgattctgtggagggcagcggcatcctgatgtgcagcattgacaacctgcctgcccagctgcccatcgaggccacagaatgttttggagacatgctgtacccctacgtggaggagatgatcctgagtgatgccacccagcccctggagagccagaacttcagccctgtggtgagagatgctgtgatcaccagcaatggcaccctgcctgacaagtacaagtacatccagaccctgcgggagagccgggagcgggcccagagcctgtccatgggcaccaggaggaaggtgctggtgctgggcagcggctacatcagcgagcctgtgctggagtacctgagcagagatggcaacatcgagatcaccgtgggcagtgacatgaagaaccagatcgagcagctgggcaagaagtacaacatcaaccctgtgtccatggacatctgcaagcaggaggagaagctgggcttcctggtggccaagcaggacctggtgatcagcctgctgccctacgtgctgcaccccctggtggccaaggcctgcatcaccaacaaggtgaacatggtgacagccagctacatcaccccagccctgaaggagctggagaagtctgtggaggatgctggcatcaccatcatcggggagctgggcctggaccccggcctggaccacatgctggccatggagaccatcgacaaggccaaggaggtgggcgccaccatcgagagctacatctcctactgcggcggcctgcctgcccctgagcacagcaacaaccccctgcgctacaagttctcctggagccctgtgggcgtgctgatgaatgtgatgcagagcgccacctacctgctggatggcaaggtggtgaatgtggccggcggcatctccttcctggatgctgtgacctccatggacttcttccctggcctgaacctggagggctaccccaacagagacagcaccaagtatgcagagatctacggcatcagcagcgcccacaccctgctgcggggcaccctgcgctacaagggctacatgaaggccctgaatggatttgtgaagctgggcctcatcaaccgggaggccctgcctgccttccggcctgaggccaaccccctgacctggaagcagctgctgtgtgacctggtgggcatcagccccagcagcgagcatgatgtgctgaaggaggccgtgctgaagaagctgggcggggacaacacccagctggaggccgctgagtggctgggcctgctgggagatgagcaggtgccccaggccgagagcatcctggatgccctgagcaagcacctggtgatgaagctgtcctatggccctgaggagaaggacatgattgtgatgagggacagctttggcatccgccaccccagcggccacctggagcacaagaccatcgacctggtggcctatggagacatcaatggcttcagcgccatggccaagacagtgggcctgcccacagccatggccgccaagatgctgctggatggagagatcggggccaagggcctgatgggccccttcagcaaggagatctacggccccatcctggagcgcatcaaggccgagggcatcatctacaccacccagagcaccatcaagccctag

SEQ ID NO: 159045 - DNA, 3233 bp, Artificial Sequence
  derived and/or modified sequence
cctcagatttctcaggagaccagaactgatctgccagccttgctgccttttgttgctctgctctttacattgtctttacagtcaccaggtgtcaagatgctgcaagtacataggactggactgggcaggctgggggtcagcctctccaagggtcttcaccacaaagctgtgttggccgtccggagggaggatgtgaacgcctgggagagaagggccccgctagctcccaagcacatcaaaggcatcaccaatctgggatacaaggtcttgatacagccttcgaatcggcgggccattcatgataaggactatgtcaaagctggtggcattcttcaggaggatatttctgaagcttgtctaattttaggagttaaaagacctccagaggaaaaattaatgtccaggaagacttatgcatttttctcccacacaataaaagctcaggaggccaatatgggcttgttggatgagattctaaaacaggaaattcgccttattgattatgagaaaatggtggatcatagaggagtacgggtagtggcatttggacagtgggctggtgtggcaggaatgatcaacattttacatggaatgggtttaaggctccttgctttgggacatcacacaccttttatgcacattggcatggctcataactacaggaatagcagtcaggctgtgcaagctgtccgtgatgctggctatgaaatatctttgggtttgatgcctaagtcaataggacccttaacatttgtgttcacaggaactggtaatgtttctaagggagcccaagcaatctttaatgagctaccttgtgaatatgtggagccccatgaattaaaagaagtttcccaaactggagacctcagaaaagtgtatgggacggtgttaagtcgtcatcatcatcttgtcaggaaaacagatgctgtgtatgatcctgcagagtatgacaaacatccggagcgctacataagtcgttttaatactgatattgcaccctatacaacttgcttaattaatggaatctactgggaacaaaacactcctcgcctcctaacccgccaagatgctcagagtctcctggctccgggcaagttctcacctgctggtgtggaaggctgccctgcattaccacacaaactcgtggcaatatgtgacatttcagctgacacaggagggtctatagagtttatgactgagtgtacaacaatagagcatcccttttgcatgtatgatgcagaccagcatattattcatgacagtgttgaaggctcggggatcctgatgtgttccattgacaatttgccggcacagctcccaattgaagctacagaatgctttggagacatgctttacccttatgttgaagaaatgatattatcagacgcgacacagcctcttgaaagtcagaatttttctcctgtggtgagagatgcagtgattacatccaacggtacattacctgataaatataaatatatccagacactccgggagagcagggaacgtgctcagtcactttcaatgggcaccaggagaaaggttttggttcttggatctggctacatatctgagcctgtattagaatatttatcaagagatggcaatatagaaataacagtaggatctgacatgaagaatcaaattgaacagttaggcaagaaatataatattaatcctgttagcatggacatttgtaaacaagaagagaagctgggcttcttggtggcaaaacaggatcttgtcatcagcttgttgccttatgtattgcaccctcttgtggccaaggcctgcatcacaaacaaagttaacatggtcactgcaagctacatcacaccagcactaaaagaattggaaaagagtgtggaagatgctggcatcacaatcattggtgaattgggattggaccctggtctggatcacatgttagcaatggaaacaatagataaagccaaggaagtgggagccacgattgaatcatatatttcctactgtggtgggcttccagcccctgaacattcaaacaatccattgagatataaatttagctggagtccagtgggagttttgatgaatgtaatgcagtctgccacctatctgctcgatggaaaggttgtgaatgttgcaggaggcatctcctttcttgatgccgttacgtccatggatttttttccaggattaaatttggaaggctatcctaacagagacagtacgaaatatgctgagatttatggcatttcttctgctcacactttgttgcgggggacactgagatataagggatatatgaaagctttgaatggatttgtaaaattaggtcttataaacagagaagcgcttcctgcctttagacctgaggccaaccctctcacctggaaacaactcctctgtgacctagttgggatttcaccctcctctgagcatgatgtgttgaaggaagctgttcttaagaaactaggaggagacaatacccagttggaggctgctgaatggttgggcttacttggggatgaacaagttcctcaggcagagtccattctggatgccctctccaagcatttggtcatgaagctttcctatggtcctgaagaaaaagatatgattgtgatgagagacagctttggaatcagacatccttctggacatttagaacataaaacgattgatcttgtggcttatggggacatcaatggcttttcagccatggctaaaaccgtggggttacccaccgccatggcagccaaaatgttgcttgatggtgaaattggagccaaaggcctaatggggcccttttcaaaggagatctatggaccaatattggagcgaattaaagcagaaggcattatatatactacacagagtacaattaaaccataattgggaattatattttgtttttttcttcccaggcaatacacctctgaacatgtgtgtgataaatgggtttgctaatgtgctgttttaaagtataaagcataatatgttttggttaacacaatgtactttttgaactataaatctttattttaatatggaaatgtttggaacaggagatgcaagccactaacagagaactttaataattctaccctgtattttataaatacgtatgtgaaagtgatgatcatgctatttgttaatttattgtgccactttttttcttttgttttttttttgttgttgttgttttttgagatggagtctcgctctgtcacccaggctggagtgcagtg

SEQ ID NO: 159046 - DNA, 3163 bp, Artificial Sequence
  derived and/or modified sequence
aaacacctcctacttcccggccttccatcccagtttcttctaggaattcggagcctcccctgcagcgactcggaagattcgaggcggcgggggacaagtcggcgccccagagcggacgagtcaccaggtgtcaagatgctgcaagtacataggactggactgggcaggctgggggtcagcctctccaagggtcttcaccacaaagctgtgttggccgtccggagggaggatgtgaacgcctgggagagaagggccccgctagctcccaagcacatcaaaggcatcaccaatctgggatacaaggtcttgatacagccttcgaatcggcgggccattcatgataaggactatgtcaaagctggtggcattcttcaggaggatatttctgaagcttgtctaattttaggagttaaaagacctccagaggaaaaattaatgtccaggaagacttatgcatttttctcccacacaataaaagctcaggaggccaatatgggcttgttggatgagattctaaaacaggaaattcgccttattgattatgagaaaatggtggatcatagaggagtacgggtagtggcatttggacagtgggctggtgtggcaggaatgatcaacattttacatggaatgggtttaaggctccttgctttgggacatcacacaccttttatgcacattggcatggctcataactacaggaatagcagtcaggctgtgcaagctgtccgtgatgctggctatgaaatatctttgggtttgatgcctaagtcaataggacccttaacatttgtgttcacaggaactggtaatgtttctaagggagcccaagcaatctttaatgagctaccttgtgaatatgtggagccccatgaattaaaagaagtttcccaaactggagacctcagaaaagtgtatgggacggtgttaagtcgtcatcatcatcttgtcaggaaaacagatgctgtgtatgatcctgcagagtatgacaaacatccggagcgctacataagtcgttttaatactgatattgcaccctatacaacttgcttaattaatggaatctactgggaacaaaacactcctcgcctcctaacccgccaagatgctcagagtctcctggctccgggcaagttctcacctgctggtgtggaaggctgccctgcattaccacacaaactcgtggcaatatgtgacatttcagctgacacaggagggtctatagagtttatgactgagtgtacaacaatagagcatcccttttgcatgtatgatgcagaccagcatattattcatgacagtgttgaaggctcggggatcctgatgtgttccattgacaatttgccggcacagctcccaattgaagctacagaatgctttggagacatgctttacccttatgttgaagaaatgatattatcagacgcgacacagcctcttgaaagtcagaatttttctcctgtggtgagagatgcagtgattacatccaacggtacattacctgataaatataaatatatccagacactccgggagagcagggaacgtgctcagtcactttcaatgggcaccaggagaaaggttttggttcttggatctggctacatatctgagcctgtattagaatatttatcaagagatggcaatatagaaataacagtaggatctgacatgaagaatcaaattgaacagttaggcaagaaatataatattaatcctgttagcatggacatttgtaaacaagaagagaagctgggcttcttggtggcaaaacaggatcttgtcatcagcttgttgccttatgtattgcaccctcttgtggccaaggcctgcatcacaaacaaagttaacatggtcactgcaagctacatcacaccagcactaaaagaattggaaaagagtgtggaagatgctggcatcacaatcattggtgaattgggattggaccctggtctggatcacatgttagcaatggaaacaatagataaagccaaggaagtgggagccacgattgaatcatatatttcctactgtggtgggcttccagcccctgaacattcaaacaatccattgagatataaatttagctggagtccagtgggagttttgatgaatgtaatgcagtctgccacctatctgctcgatggaaaggttgtgaatgttgcaggaggcatctcctttcttgatgccgttacgtccatggatttttttccaggattaaatttggaaggctatcctaacagagacagtacgaaatatgctgagatttatggcatttcttctgctcacactttgttgcgggggacactgagatataagggatatatgaaagctttgaatggatttgtaaaattaggtcttataaacagagaagcgcttcctgcctttagacctgaggccaaccctctcacctggaaacaactcctctgtgacctagttgggatttcaccctcctctgagcatgatgtgttgaaggaagctgttcttaagaaactaggaggagacaatacccagttggaggctgctgaatggttgggcttacttggggatgaacaagttcctcaggcagagtccattctggatgccctctccaagcatttggtcatgaagctttcctatggtcctgaagaaaaagatatgattgtgatgagagacagctttggaatcagacatccttctggacatttagaacataaaacgattgatcttgtggcttatggggacatcaatggcttttcagccatggctaaaaccgtggggttacccaccgccatggcagccaaaatgttgcttgatggtgaaattggagccaaaggcctaatggggcccttttcaaaggagatctatggaccaatattggagcgaattaaagcagaaggcattatatatactacacagagtacaattaaaccataattgggaattatattttgtttttttcttcccaggcaatacacctctgaacatgtgtgtgataaatgggtttgctaatgtgctgttttaaagtataaagcataatatgttttggttaacacaatgtactttttgaactataaatctttattttaatatggaaatgtttggaacaggagatgcaagccactaacagagaactttaataattctaccctgtattttataaatacgtatgtgaaagtgatga

SEQ ID NO: 159047 - DNA, 2781 bp, Artificial Sequence
  derived and/or modified sequence
atgctgcaggtgcaccggaccggcctgggccggctgggcgtgagcttgagcaaggggctccatcacaaggctgtcctggctgtgcgccgggaagatgtaaatgcatgggagagaagggcccctctggcacccaaacatattaaggggatcaccaatttaggatacaaggtcctcatccagccaagtaaccgaagggcaattcatgacaaggattacgtcaaagctgggggcatccttcaggaggatatttccgaggcctgtttaatcctgggagtcaaacggcccccagaagagaagctgatgtctcgcaaaacctatgcctttttctcccacaccatcaaagctcaggaggctaatatggggctcctcgatgagatcctgaagcaggagatccgcctgatagattacgagaagatggttgaccacaggggggtgcgtgttgtggcctttggtcagtgggccggagtcgccggcatgatcaatatcctacacgggatgggccttcgtttgctcgcgttgggccatcatacaccgtttatgcacatcggcatggcccataattaccgaaactcttcccaggccgtgcaggccgttcgggacgccgggtacgaaatttcacttgggctgatgcctaaaagtatcgggccattgaccttcgtatttaccggtactggcaatgtgagcaagggagctcaggccatcttcaatgaactgccttgcgaatacgtggaaccacacgaactgaaggaagtgtctcagaccggcgacctaaggaaggtctacgggacggtcttgagcaggcaccatcatctcgttagaaaaacagacgctgtttacgacccagccgagtatgataagcaccccgaaagatacattagcagatttaacactgacattgccccttataccacctgtctcattaacgggatctactgggagcagaatacaccaagactgttaacccgccaggatgcccagtcactcctggctcccgggaagtttagccctgctggagtcgagggttgcccagccttgccccataaactggtcgccatctgcgacattagcgctgataccggcgggtccatcgagtttatgacagagtgtaccaccatagaacacccattttgcatgtatgatgcagatcagcacataattcacgattcagtggaaggcagtggaatcctgatgtgttcaatcgataacctgcccgcacagctccccattgaagcaactgaatgcttcggagatatgctatacccatatgtggaggagatgattctttccgacgctacacagcctctcgaatcgcagaatttctctcctgtagtaagagacgccgttatcacctcaaatggcacactcccagacaagtataagtacattcaaaccctgcgggaatctcgcgagagagcgcagtctcttagcatgggcaccagacgcaaagttctggtgcttggatccggctatatctccgaacctgttctagaatatttgagcagggacggcaacattgaaataacagttgggtctgatatgaagaaccagatagaacagttagggaagaaatacaacatcaatccagtgagcatggatatttgcaaacaggaagagaaactcgggttcctcgtggccaagcaggacctcgtgataagcctgctcccctatgtccttcatccgctcgtggcgaaggcttgcatcacaaacaaggtcaacatggttactgcatcctatatcactccggctctgaaggagctagaaaagtcagtggaagacgccggcatcacaattatcggtgaactcggcctcgacccaggattggatcacatgctcgctatggagaccattgacaaagccaaggaggtgggggccaccatcgaatcctatatttcatactgcggaggcctgccagcccccgaacatagcaacaatcctctcagatataaattcagttggagcccagtgggcgtcctgatgaacgtgatgcagagcgccacatatcttctcgatggaaaagtggttaatgttgcgggtggtatttcatttctggatgccgtgacctcaatggatttttttccaggattaaatctggaggggtacccaaaccgggatagcacaaagtacgctgagatctatgggatttcttcagcccacacactgctgagggggactctgaggtataaagggtacatgaaagcactgaacgggttcgtgaaattggggctcataaaccgggaagcactgcccgcattccgccccgaggcaaatcctctcacgtggaagcagctcctctgcgaccttgttgggatcagcccatcgtctgagcacgacgtgctgaaagaggctgtgctcaagaaattggggggagataatacacagctggaagccgccgaatggctcgggcttttgggcgatgagcaggtgccccaggctgagagcatcctggatgcacttagcaagcatctagtcatgaagctgagctacgggcccgaggaaaaagatatgatcgttatgagagatagcttcggcatccgacatccatctggccatctcgagcacaagacgatcgacctggtcgcttatggggacatcaacggatttagtgcaatggctaaaactgtcggactgccaacagctatggccgccaagatgctcctggacggcgagatcggagctaaaggacttatgggcccttttagcaaagagatctacggacccatcttagaacggatcaaagcagagggtatcatctatacaacgcagtccacgattaagccctag

SEQ ID NO: 159048 - DNA, 2781 bp, Artificial Sequence
  derived and/or modified sequence
atgctgcaggtgcaccggaccggcctgggccggctgggcgtgagcctaagtaagggactccaccataaggccgttttggctgttaggagggaggacgtgaacgcatgggaaagaagggcacctttggctccaaagcatatcaagggaatcactaatctcggatataaagtactcatacagccatccaatagaagggcaattcacgataaggactatgttaaagccggaggtatccttcaggaagatatctcagaagcgtgcctcatcttgggcgtaaaacgtcccccagaggaaaaactgatgagtagaaaaacatacgcgtttttctctcataccatcaaagcccaggaggccaacatgggcctgctcgatgagatccttaaacaagagatcaggctgattgattacgaaaaaatggtcgatcatcgcggcgtgcgcgttgttgcttttggtcagtgggcaggcgtcgcgggcatgatcaatattttgcacggcatgggtctgaggcttcttgcactgggccaccacacaccctttatgcacattggcatggcacataactatagaaacagctcccaagccgttcaggctgttagagacgccggttacgaaatcagtctggggctcatgcctaaaagcataggccctctgactttcgtgtttactggcacaggcaacgtgtctaagggcgcgcaggctatatttaacgagttgccctgtgagtatgtggaaccgcatgaactcaaggaggtatcacagaccggggatctgcgcaaggtctacggaacagtgctctctcgacatcatcatctcgtgcgcaaaaccgatgccgtgtacgatccagcagagtacgacaagcaccccgaacggtatattagccggttcaacactgatatcgccccttacacaacatgcctcataaatggcatttactgggagcaaaacacacctaggctactgactcgtcaagatgcacagagcctgctcgcgcctgggaaatttagcccggcaggagtagagggatgccccgctctccctcacaaactcgtggccatctgtgatatttccgcggacactgggggatcgatagaattcatgaccgagtgtacaacgatcgagcacccgttttgcatgtacgacgctgatcagcatatcatccacgacagcgtggagggctcaggtatactgatgtgttcaatcgacaacttacccgcccagctgccaattgaagccacagaatgcttcggagacatgctgtatccttacgtggaggaaatgatcttatctgacgcaacacagccgcttgagtcacagaatttttcacctgtggttcgggatgctgtaatcacatcgaacggtacattgcccgataagtacaagtacattcagaccttgcgtgaatcacgagagcgggcccaatcactaagcatgggaacgcgtcggaaggtgctcgtgttggggtcaggctatatctccgaacccgttctggagtacttgagcagagacggcaatattgaaattaccgtgggaagcgacatgaagaatcagatcgagcagctgggaaagaaatacaacatcaacccagtatctatggatatctgcaaacaggaagaaaagctgggattcctggtggctaagcaggacctggtaatctccctgcttccttacgtgctgcatcccctcgtggcaaaggcctgcattactaataaggtgaacatggtgacggcaagttacatcaccccggccctgaaagaattagagaagtccgtggaggatgccgggattacaataatcggagagctgggtttggatcccggactcgaccatatgctcgccatggagacgatagacaaagccaaggaggtgggcgccaccattgagtcttacatttcttactgcggagggctaccagctcccgagcattccaacaatccactccggtacaaattcagctggtctcccgttggggtgttgatgaacgtcatgcagtctgctacttatcttctggatggtaaggtcgtgaacgtagcaggcgggatatcatttctagacgctgttacgagtatggactttttccccgggctgaacctcgaggggtaccctaatcgcgattccaccaagtacgctgaaatttatggtattagctccgcgcatacgctgcttcgcggcactttgcggtacaaaggatacatgaaggccctgaacggctttgtcaaactcggactgattaatcgcgaagcactgcccgctttcaggcccgaagctaaccccctcacctggaaacagctgctgtgcgacctggttggtatctcacccagttccgaacatgacgtgttaaaggaggctgtccttaagaaactgggaggcgacaacacccagttagaggccgctgaatggctgggtttactgggagacgagcaggtgccccaggcagagtcaatacttgatgccctatcaaaacatcttgtaatgaagctcagctacggcccagaagagaaagacatgattgttatgagagatagctttggaatccggcatccttctggccacctggaacacaagacaatcgacctggtggcctacggtgacattaacggatttagtgccatggccaaaacggtagggcttcccaccgctatggcagctaagatgctgctcgacggagagataggcgccaagggcctaatgggcccatttagtaaggagatttacggacccattcttgagcgaatcaaggctgagggcattatttatacgacacaatcaaccatcaaaccctag

SEQ ID NO: 159049 - DNA, 2781 bp, Artificial Sequence
  derived and/or modified sequence
atgctgcaggtgcacaggacggggcttggtcggctcggagttagcctatccaaaggtctgcaccacaaagccgttctggcagtgagacgagaagacgtcaatgcctgggagcggagagctcctctggctcccaaacatatcaagggaatcactaacctgggctacaaagtgcttattcagccttctaatcgaagggcaatccatgataaggattatgtaaaggccggaggcatattacaggaggacatctctgaggcttgcctcatcttgggagtgaagagaccgcctgaggagaaattaatgagccgtaagacctacgccttcttctcacacacaataaaagcgcaagaggccaacatgggcttgctcgatgaaatcttaaagcaggagatcaggcttatcgattacgaaaagatggtggaccaccgaggggtacgggtggtggcctttggtcaatgggcgggagtcgcgggtatgattaatatcttgcacggtatgggtctgcgtctgctcgcgttgggacatcatacgccattcatgcacataggaatggctcacaactatagaaattctagtcaggccgttcaggcagtccgtgatgccggttacgagatatctctggggttaatgccaaagtccattgggcctctgactttcgtgttcaccggaacaggaaatgtatctaagggagcccaggccatatttaacgagcttccttgcgaatacgttgagcctcacgaattgaaagaagtctctcaaacaggtgatttgcgtaaggtttacggtactgtattgtcacgacaccaccacctcgttcggaaaaccgacgcggtgtacgaccctgctgagtacgataagcaccctgagcgctacatatcacgtttcaataccgatattgctccatatacgacatgcctgattaatggcatctactgggagcagaacaccccacgactactgactcggcaagatgcccagtccctgctggctccgggaaagttctcaccggctggggtggagggctgccctgccctgccacacaagctagtcgccatttgcgatatctctgcagacaccggcggttcaatcgagttcatgacagagtgtacaactatagagcacccattttgcatgtacgatgccgatcagcacataatccatgatagcgtggagggaagcgggatactaatgtgcagcatcgataacctccccgcacaactgccaattgaggccacagaatgttttggggatatgctgtacccttacgttgaagaaatgatactgtccgacgcgacacagcctctggagagccaaaatttcagccctgtcgttcgagacgcagttattacctccaacgggacacttccagacaagtataaatacatacagactctcagagagtcccgcgaaagggcccaatctctgagtatgggtacccgacgcaaagtactggttttaggctctggatacatttcagagcccgtgctagagtacctttcgcgtgatggtaacattgaaatcaccgtagggtcggatatgaagaatcaaatcgagcagcttggcaaaaaatacaatatcaacccagtgtctatggacatctgcaagcaggaggaaaaactagggtttcttgtggctaagcaggacctggtaatctccctgttgccatacgtcttgcacccactggtggccaaagcatgcattaccaacaaagtcaatatggtcacagctagttatatcactcctgccttaaaggaactcgaaaaatctgtggaagacgccggaatcaccataatcggcgaactcggactggatcctgggctggaccacatgttggcaatggaaaccattgataaggcgaaagaagtcggcgcaaccatagagtcatacatttcttattgcggtgggttacccgctccagagcattccaacaacccattgcggtataagttctcgtggagcccagtgggagtgttaatgaatgttatgcagagcgccacctacctacttgatggcaaggttgttaacgtcgccggaggcatctcttttttggatgccgtgaccagcatggacttcttccctggattgaaccttgaaggctatcctaatagagactccaccaaatacgccgaaatctatggaattagctccgcccatactctgctcagaggaaccttaaggtacaaaggctacatgaaagctctcaatgggttcgtcaaactgggacttattaatcgagaggctctgcccgctttcaggccggaggccaatcccctgacttggaagcagctcctgtgcgacctcgtgggtatcagtcccagtagcgaacatgacgtgctgaaggaggcggtgctgaaaaaactgggaggcgacaatacgcagctcgaggcggctgagtggctcgggctgctgggggacgagcaggtacctcaggccgaaagcattttagatgcgctgagcaagcacctcgtcatgaaattgagttacggcccagaagaaaaggacatgatcgtgatgcgtgacagctttgggatccgacacccaagcggccacttggaacacaagactatcgatcttgttgcctacggagacattaacggatttagtgctatggcgaaaacagttgggctccccactgccatggccgctaaaatgttactcgacggggaaattggagcaaagggcctgatgggaccattttcaaaagaaatctacggtcctatcttggagaggatcaaggccgaagggataatttataccactcagtctaccattaagccctag

SEQ ID NO: 159050 - DNA, 2781 bp, Artificial Sequence
  derived and/or modified sequence
atgctgcaggtgcacagaaccgggctcggcagactcggggtgagcttgtccaaaggccttcaccataaagccgtcctagctgtaaggagggaagacgtaaatgcttgggaaagacgagcccctcttgcacctaagcatatcaaaggaatcacaaatctaggatacaaagtgctgattcagccatccaatcgccgagctattcacgataaggattatgtcaaggcaggtggtatcctgcaggaagacataagtgaagcttgtctcatcctcggtgtgaagcggcctcccgaagagaaactgatgtctcgtaaaacatacgcatttttttcccacacgattaaagcgcaggaggccaatatgggattgctggatgagatcctgaaacaagaaatcagactgatcgactatgaaaaaatggtggaccaccgaggcgttcgcgtggtggccttcggccaatgggcaggcgtcgccggaatgatcaatattcttcacggtatggggctccgactccttgctctcgggcatcatacaccgtttatgcatataggcatggcccataattataggaactcaagccaggctgtacaggcggtcagggatgccggatatgaaatttccttgggcttgatgccaaagtccatcggacctctgaccttcgtgtttaccggtacggggaacgtaagcaagggagcccaagcaatattcaacgaactgccttgcgagtatgtcgaaccccatgaactcaaagaggtgtctcagaccggagatctgcgtaaggtgtatggcacggttttgagccgccatcaccatcttgtgcggaaaaccgacgccgtctatgatcctgccgaatacgataaacacccggaaaggtacattagccggttcaacacagatattgctccatatactacctgcttgattaacggcatatattgggagcaaaacactccaaggctactgacccggcaggatgcacagtcgctgttagcccctggtaagttctcgcccgcaggcgttgaaggttgccctgcactgcctcacaagctcgtggccatctgtgatatatctgccgacactggaggctctattgaattcatgactgaatgtacgacgatcgaacatccattttgtatgtacgatgcagatcagcatattattcacgattccgtggagggaagtgggatcctgatgtgcagcattgataaccttccagcgcaactccctatagaggctactgaatgttttggggatatgctctacccctatgtcgaagagatgattctaagcgatgccacacagccgttggagtctcagaacttttcacccgtcgtccgggatgccgtaatcacctctaacggcaccctgccagataaatacaagtatatccaaacacttagagagtcacgtgaaagggcccagagtcttagtatgggcacaaggcgaaaagtcctagtgttgggcagtggctatatctccgagcctgtgctggagtatctcagccgagacgggaacatagaaattaccgtaggctcagacatgaaaaatcaaatcgaacagctaggaaagaagtataatatcaatccggtgagcatggatatctgcaaacaggaagagaaactaggattcttggtggccaaacaggacctcgtgatctctcttcttccttatgtgttgcaccccctggttgccaaggcatgtatcactaataaagtgaatatggtgaccgccagctacattacccccgctctgaaggagctggagaagtccgtagaggacgcagggattacaatcatcggggagcttggtttagatccgggtctcgaccatatgctagccatggagacgatcgacaaggccaaggaagtgggcgctacaatcgagagctatattagctattgcgggggacttcccgcacccgagcattccaacaatcccttacgctataagttcagttggagccctgttggcgtgctgatgaatgtgatgcagagcgcaacatacttactggacggcaaggtagtgaatgtggcaggaggcattagcttccttgacgctgttacctccatggacttctttcccggactcaatctggagggctacccgaatcgcgactccacaaagtatgccgaaatctacggaatttcctccgcccatacactgttaagggggactttacgatataagggctatatgaaggccctaaacggattcgtaaagctgggtctgataaatagagaagcgttgcccgcttttcgacctgaggcgaacccactcacgtggaaacagctgctctgcgacttggtggggatctctccctcttcagaacacgatgtactgaaggaggcagtgctgaagaagctgggtggcgacaatacccaactggaggccgctgagtggttggggctgctgggggatgagcaggttccacaggcagagtccatcctggatgcactgagcaagcacctggtaatgaagttgtcatacggcccagaggagaaggatatgatcgtaatgagggatagcttcggcatcaggcacccctcaggccatctggagcacaagactattgatctggtggcatacggagacataaatggattctccgctatggcgaaaactgtcggtctgcctacggcaatggctgctaagatgctgctggatggggagataggagcaaaaggcttaatgggacccttttcaaaagaaatttatggccctatcctcgagcggataaaagccgaaggaatcatctatacaacacagagcacaattaagccatag

SEQ ID NO: 159051 - DNA, 2781 bp, Artificial Sequence
  derived and/or modified sequence
atgctgcaggtgcacagaaccggcctgggcagactgggcgtgagcctgagcaagggcctgcaccacaaggccgtgctggccgtgagaagagaggacgtgaacgcctgggagagaagagcccccctggcccccaagcacatcaagggcatcaccaacctgggctacaaggtgctgatccagcccagcaacagaagagccatccacgacaaggactacgtgaaggccggcggcatcctgcaggaggacatcagcgaggcctgcctgatcctgggcgtgaagagaccccccgaggagaagctgatgagcagaaagacctacgccttcttcagccacaccatcaaggcccaggaggccaacatgggcctgctggacgagatcctgaagcaggagatcagactgatcgactacgagaagatggtggaccacagaggcgtgagagtggtggccttcggccagtgggccggcgtggccggcatgatcaacatcctgcacggcatgggcctgagactgctggccctgggccaccacacccccttcatgcacatcggcatggcccacaactacagaaacagcagccaggccgtgcaggccgtgagagacgccggctacgagatcagcctgggcctgatgcccaagagcatcggccccctgaccttcgtgttcaccggcaccggcaacgtgagcaagggcgcccaggccatcttcaacgagctgccctgcgagtacgtggagccccacgagctgaaggaggtgagccagaccggcgacctgagaaaggtgtacggcaccgtgctgagcagacaccaccacctggtgagaaagaccgacgccgtgtacgaccccgccgagtacgacaagcaccccgagagatacatcagcagattcaacaccgacatcgccccctacaccacctgcctgatcaacggcatctactgggagcagaacacccccagactgctgaccagacaggacgcccagagcctgctggcccccggcaagttcagccccgccggcgtggagggctgccccgccctgccccacaagctggtggccatctgcgacatcagcgccgacaccggcggcagcatcgagttcatgaccgagtgcaccaccatcgagcaccccttctgcatgtacgacgccgaccagcacatcatccacgacagcgtggagggcagcggcatcctgatgtgcagcatcgacaacctgcccgcccagctgcccatcgaggccaccgagtgcttcggcgacatgctgtacccctacgtggaggagatgatcctgagcgacgccacccagcccctggagagccagaacttcagccccgtggtgagagacgccgtgatcaccagcaacggcaccctgcccgacaagtacaagtacatccagaccctgagagagagcagagagagagcccagagcctgagcatgggcaccagaagaaaggtgctggtgctgggcagcggctacatcagcgagcccgtgctggagtacctgagcagagacggcaacatcgagatcaccgtgggcagcgacatgaagaaccagatcgagcagctgggcaagaagtacaacatcaaccccgtgagcatggacatctgcaagcaggaggagaagctgggcttcctggtggccaagcaggacctggtgatcagcctgctgccctacgtgctgcaccccctggtggccaaggcctgcatcaccaacaaggtgaacatggtgaccgccagctacatcacccccgccctgaaggagctggagaagagcgtggaggacgccggcatcaccatcatcggcgagctgggcctggaccccggcctggaccacatgctggccatggagaccatcgacaaggccaaggaggtgggcgccaccatcgagagctacatcagctactgcggcggcctgcccgcccccgagcacagcaacaaccccctgagatacaagttcagctggagccccgtgggcgtgctgatgaacgtgatgcagagcgccacctacctgctggacggcaaggtggtgaacgtggccggcggcatcagcttcctggacgccgtgaccagcatggacttcttccccggcctgaacctggagggctaccccaacagagacagcaccaagtacgccgagatctacggcatcagcagcgcccacaccctgctgagaggcaccctgagatacaagggctacatgaaggccctgaacggcttcgtgaagctgggcctgatcaacagagaggccctgcccgccttcagacccgaggccaaccccctgacctggaagcagctgctgtgcgacctggtgggcatcagccccagcagcgagcacgacgtgctgaaggaggccgtgctgaagaagctgggcggcgacaacacccagctggaggccgccgagtggctgggcctgctgggcgacgagcaggtgccccaggccgagagcatcctggacgccctgagcaagcacctggtgatgaagctgagctacggccccgaggagaaggacatgatcgtgatgagagacagcttcggcatcagacaccccagcggccacctggagcacaagaccatcgacctggtggcctacggcgacatcaacggcttcagcgccatggccaagaccgtgggcctgcccaccgccatggccgccaagatgctgctggacggcgagatcggcgccaagggcctgatgggccccttcagcaaggagatctacggccccatcctggagagaatcaaggccgagggcatcatctacaccacccagagcaccatcaagccctag

SEQ ID NO: 159052 - protein, 350 aa, Artificial Sequence
  derived and/or modified sequence
MAVFVVLLALVAGVLGNEFSILKSPGSVVFRNGNWPIPGERIPDVAALSMGFSVKEDLSWPGLAVGNLFHRPRATVMVMVKGVNKLALPPGSVISYPLENAVPFSLDSVANSIHSLFSEETPVVLQLAPSEERVYMVGKANSVFEDLSVTLRQLRNRLFQENSVLSSLPLNSLSRNNEVDLLFLSELQVLHDISSLLSRHKHLAKDHSPDLYSLELAGLDEIGKRYGEDSEQFRDASKILVDALQKFADDMYSLYGGNAVVELVTVKSFDTSLIRKTRTILEAKQAKNPASPYNLAYKYNFEYSVVFNMVLWIMIALALAVIITSYNIWNMDPGYDSIIYRMTNQKIRMD

SEQ ID NO: 159053 - protein, 243 aa, Artificial Sequence
  derived and/or modified sequence
  misc_feature (1)..(1): Xaa can be any naturally occurring amino acid
XCPAGPFRVAPQCCGRRGTMAVFVVLLALVAGVLGNEFSILKSPGSVVFRNGNWPIPGERIPDVAALSMGFSVKEDLSWPGLAVGNLFHRPRATVMVMVKGVNKLALPPGSVISYPLENVDLLFLSELQVLHDISSLLSRHKHLAKDHSPDLYSLELAGLDEIGKRYGEDSEQFRDASKILVDALQKFADDMYSLYGGNAVVELVTVKSFDTSLIRKTRTILEAKQAKNPASPYNLAYKYNFE

SEQ ID NO: 159054 - protein, 203 aa, Artificial Sequence
  derived and/or modified sequence
ESERVTSSRCGCRPCPAGPFRVAPQCCGRRGTMAVFVVLLALVAGVLGNEFSILKSPGSVVFRNGNWPIPGERIPDVAALSMGFSVKEDLSWPGLAVGNLFHRPRATVMVMVKGVNKLALPPGSVISYPLENRVYMVGKANSVFEDLSVTLRQLRNRLFQENSVLSSLPLNSLSRNNEVDLLFLSELQVLHDISSLLSRHKHL

SEQ ID NO: 159055 - protein, 259 aa, Artificial Sequence
  derived and/or modified sequence
  misc_feature (1)..(1): Xaa can be any naturally occurring amino acid
XVPPARSVSPRSAAAAAAPWLCLSCSWRWWRDLSWPGLAVGNLFHRPRATVMVMVKGVNKLALPPGSVISYPLENAVPFSLDSVANSIHSLFSEETPVVLQLAPSEERVYMVGKANSVFEDLSVTLRQLRNRLFQENSVLSSLPLNSLSRNNEVDLLFLSELQVLHDISSLLSRHKHLAKDHSPDLYSLELAGLDEIGKRYGEDSEQFRDASKILVDALQKFADDMYSLYGGNAVVELVTVKSFDTSLIRKTRTILEAK

SEQ ID NO: 159056 - protein, 318 aa, Artificial Sequence
  derived and/or modified sequence
MAVFVVLLALVAGVLGNEFSILKSPGSVVFRNGNWPIPGERIPDVAALSMGFSVKEDLSWPGLAVGNLFHRPRATVMVMVKGVNKLALPPGSVISYPLENRVYMVGKANSVFEDLSVTLRQLRNRLFQENSVLSSLPLNSLSRNNEVDLLFLSELQVLHDISSLLSRHKHLAKDHSPDLYSLELAGLDEIGKRYGEDSEQFRDASKILVDALQKFADDMYSLYGGNAVVELVTVKSFDTSLIRKTRTILEAKQAKNPASPYNLAYKYNFEYSVVFNMVLWIMIALALAVIITSYNIWNMDPGYDSIIYRMTNQKIRMD

SEQ ID NO: 159057 - protein, 272 aa, Artificial Sequence
  derived and/or modified sequence
MAVFVVLLALVAGVLGNEFSILKSPGSVVFRNGNWPIPGERIPDVAALSMGFSVKEDLSWPGLAVGNLFHRPRATVMVMVKGVNKLALPPGSVISYPLENVDLLFLSELQVLHDISSLLSRHKHLAKDHSPDLYSLELAGLDEIGKRYGEDSEQFRDASKILVDALQKFADDMYSLYGGNAVVELVTVKSFDTSLIRKTRTILEAKQAKNPASPYNLAYKYNFEYSVVFNMVLWIMIALALAVIITSYNIWNMDPGYDSIIYRMTNQKIRMD

SEQ ID NO: 159058 - protein, 165 aa, Artificial Sequence
  derived and/or modified sequence
MAVFVVLLALVAGVLGNEFSILKSPGSVVFRNGNWPIPGERIPDVAALSMGFSVKEDLSWPGLAVGNLFHRPRATVMVMVKGVNKLALPPGSVISYPLENAVPFSLDSVANSIHSLFSEETPVVLQLAPSEERVYMVGTMKLTCSFFLNCKCYMIFQACCLVISI

SEQ ID NO: 159059 - protein, 274 aa, Artificial Sequence
  derived and/or modified sequence
MVMVKGVNKLALPPGSVISYPLENAVPFSLDSVANSIHSLFSEETPVVLQLAPSEERVYMVGKANSVFEDLSVTLRQLRNRLFQENSVLSSLPLNSLSRNNEVDLLFLSELQVLHDISSLLSRHKHLAKDHSPDLYSLELAGLDEIGKRYGEDSEQFRDASKILVDALQKFADDMYSLYGGNAVVELVTVKSFDTSLIRKTRTILEAKQAKNPASPYNLAYKYNFEYSVVFNMVLWIMIALALAVIITSYNIWNMDPGYDSIIYRMTNQKIRMD

SEQ ID NO: 159060 - DNA, 1053 bp, Artificial Sequence
  derived and/or modified sequence
atggcagtcttcgtcgtcttgctggctctcgtggccggtgtcctggggaatgagttttccatccttaagagcccaggcagtgtggtattcaggaacggcaactggccgattcccggtgagcgaattccagatgtagccgccttaagtatgggatttagtgtcaaagaggacctttcctggcctggtctggcggttggaaacctgttccataggccgcgggctactgtcatggttatggtgaagggggtcaacaaactcgcattgccccccgggtccgtgatctcctaccccctggagaacgctgtgcccttctcgctcgacagtgttgccaattccatccactctctgttttccgaagagaccccagtggttttgcagctggcgccgtctgaagagcgtgtctatatggtcgggaaggctaattccgtgtttgaggatctatcggtcactctgcgacaactgagaaaccgcctgttccaagaaaattcggtactctcgtctctgcctctaaactctttgagccgtaataacgaagttgaccttctcttcctctctgagttgcaggtcctccacgacatctcctcattactgtcgcggcacaagcacctggccaaagatcacagtccagacctctacagcctggagttggccggactcgacgagattggtaaacgctacggcgaggatagcgaacaattccgggatgcaagcaaaatccttgtcgatgccctgcagaaatttgccgatgatatgtatagcctgtacggtggcaatgccgtcgtggagctggttactgtgaagagcttcgatacatccctgattcggaaaacacggacgatactggaggctaagcaagctaaaaatcccgctagcccctataacttggcctacaagtataacttcgagtacagcgtagtgttcaacatggttctatggataatgatcgcccttgccctagctgtgattattacttcttacaacatctggaatatggatcctgggtatgattccataatctatcgtatgaccaatcagaaaattcgcatggattag

SEQ ID NO: 159061 - DNA, 732 bp, Artificial Sequence
  derived and/or modified sequence
tgatgccctgccggcccatttagggtcgcccctcagtgctgcgggcgtcgagggacaatggccgtattcgtggtgctcctggcacttgttgccggggttttgggaaatgaatttagcattctgaaatcccctggaagcgtggtttttcgaaacggcaactggccaatccctggtgagcggatccccgacgtggcggctctgtccatggggttttccgtgaaagaggacctctcctggcctggccttgcagtgggcaacctgtttcaccgccctagagccacagtgatggtcatggtaaaaggggtgaataagctggcgctccccccaggttccgtgatatcttaccccctcgagaacgtcgaccttcttttcctgtctgaacttcaggtattgcacgatatttcaagcctgctgtctagacacaagcacctcgcaaaagatcacagcccagatctttatagcttggagttggccggactggatgagattggaaagcgctacggcgaggatagcgagcagttccgcgacgcatctaagatccttgtagatgcattacagaaattcgcagatgacatgtacagtctttatggaggcaatgctgtggtggagttagtcactgtcaaaagcttcgatacatcgttaattcgaaagacacgaactattctcgaggccaagcaggccaagaaccctgcctcaccctataatctggcatataaatacaacttcgaatag

SEQ ID NO: 159062 - DNA, 612 bp, Artificial Sequence
  derived and/or modified sequence
gaatccgagagggttactagttcacggtgtggctgtcgaccttgcccagctggccctttcagagtcgcaccacagtgttgtggccggagaggaactatggcggtgtttgtggttttgttggccttagtagccggggtgctgggaaatgagtttagcatcttgaaaagtcctgggagtgtggtcttcagaaacggcaactggcccataccgggtgagagaatccccgacgtcgctgccctctcaatgggttttagtgtgaaagaggatttgtcatggccaggcctcgctgtcggcaatctcttccacagaccaagagcaactgtcatggtgatggtcaaaggcgttaataagcttgccctgccacctggctcagtgatttcatatcccctcgaaaacagggtttacatggtcgggaaagccaatagcgtgtttgaggacctgagcgtgactctgcggcagctgcgcaaccggttgtttcaggaaaatagtgtcctttcctcactgcccttgaactctctctcgcggaataatgaggtggatcttctgtttctgtccgagctccaggtactccacgatatatccagcctgctgagtcgccacaagcacctgtag

SEQ ID NO: 159063 - DNA, 780 bp, Artificial Sequence
  derived and/or modified sequence
tgagtacctcccgcccgctccgtcagcccacgcagcgctgccgccgctgccgccccctggctttgcctctcatgttcctggagatggtggcgtgatctcagctggccgggcctggcagtaggtaacttgtttcatcgcccgcgggcaaccgtgatggtgatggtaaaaggcgtgaacaaactggctctgccccccgggagcgtgatctcctatccactcgaaaatgcagtgcccttcagcctggattctgtggctaattcaattcatagccttttctcagaagagacccccgttgtcctgcagctcgccccttccgaagaaagagtctatatggtcgggaaagccaacagtgtgttcgaggatttaagcgtcacacttaggcagttgagaaatcggctcttccaggagaactcagtgctatcctcgctgcccctgaattctctgagcaggaacaatgaagtggatctgttgtttctgagcgagctccaggtgctccacgatatttcgagcctcttgtctaggcacaaacacctggcaaaagatcatagccccgacctgtatagcctcgagctggcggggttggatgagatcgggaaacggtacggcgaagacagcgagcagtttcgtgatgcctctaagatattggtcgatgcattacaaaaatttgccgatgacatgtacagtctgtacggggggaacgcggttgtggaacttgtgactgtaaagagcttcgacacctctctgatcaggaagaccagaacgattctcgaggccaagtag

SEQ ID NO: 159064 - DNA, 957 bp, Artificial Sequence
  derived and/or modified sequence
atggccgtgtttgttgtgctgctggccctggtcgccggcgtgttaggaaatgagttcagcatcctgaagagtccggggtcggtcgttttcaggaacgggaattggccaatccccggtgaaagaatacccgatgtagccgcactctcaatgggcttttctgtcaaagaggacctctcttggcccggacttgcagtggggaacctgttccatcgccctagagccaccgtaatggtcatggtgaaaggcgtgaacaagcttgccctccctcctggcagcgtcatctcttacccgctggagaaccgggtatatatggtagggaaagcgaacagtgtttttgaggacctgagtgtgactctgaggcagctgcgcaaccgactgttccaggagaattccgtgctgtccagtctccctctgaacagcctatcccgtaataacgaagtggatctactcttcctgtctgaactccaggtcctgcatgacatcagtagcctgctgagtcgacacaagcacctggccaaggaccattcacccgacctgtactctctcgaattggctggattagacgagattgggaagaggtatggcgaagacagtgagcaattcagagacgcttctaagatattagtggacgctctgcagaagtttgccgacgatatgtacagcctttatggcggcaatgccgtggttgagttggtgacagtgaagtcattcgatacttccctgatcaggaaaacgagaacaattctggaagctaagcaagccaaaaaccccgcctccccatataatctggcctacaagtataactttgaatactctgtagttttcaacatggtgctctggattatgattgctctggctctggcagtgatcataaccagttataatatttggaatatggatcctggttatgattctatcatatatcgtatgacaaatcagaagatccgcatggactag

SEQ ID NO: 159065 - DNA, 819 bp, Artificial Sequence
  derived and/or modified sequence
atggccgtgttcgtggttctgcttgccctcgtggctggggtgcttgggaacgaattctccatcctgaaaagccccggttccgtggtgtttcggaatggaaattggccgattccgggcgagaggatccccgacgttgccgctctgagcatgggcttctcagtgaaggaagacttgtcctggcccggcctcgccgtagggaacctattccaccgtccacgcgccacagtcatggttatggtgaagggtgttaacaaactggcgttgccccctgggagcgtgatcagttacccactggagaatgtggatttgcttttcctatccgaactccaggtcctccatgatatttcgtctttactaagtaggcataaacatctggcaaaggaccactcgccagatctttattctctggaattggccggcctggatgagatcgggaagcggtacggtgaggattcagagcagtttcgggacgcttcgaaaattctggttgacgctttacagaagttcgcagacgacatgtattctctttacggggggaatgccgtggtggagcttgtgacagttaagtcgttcgacacaagtctcataagaaaaacccggacgatcctggaagccaaacaggccaaaaatcctgcttccccatacaatctggcctataaatataattttgagtattccgtcgtgtttaatatggtgctctggattatgatcgcattggcccttgccgtgatcatcacgtcctataacatctggaacatggacccagggtacgattctattatatacaggatgacaaaccagaagatccgaatggattag

SEQ ID NO: 159066 - DNA, 498 bp, Artificial Sequence
  derived and/or modified sequence
atggccgtattcgtggttttgctggccctggtggccggcgtgctgggtaacgagttttcaatcctaaagtctcctgggagcgtagtttttagaaatggcaattggcctatccccggagagaggatacccgacgtggcagccctgtcgatgggcttttccgtgaaagaggacctctcatggccaggccttgctgtcggcaatctgttccacagacctcgcgccactgtcatggtaatggtgaaaggtgtgaacaaattagctctgccccctggaagcgtcatctcctaccctcttgagaacgccgtgccattctccctggacagtgtggccaactcaattcactccctttttagcgaggaaactcctgtagtgctgcagctagccccctccgaggaacgcgtgtacatggtcggaactatgaagctgacctgcagcttttttcttaactgcaaatgctacatgatttttcaggcttgctgtttggtgatttccatttag

SEQ ID NO: 159067 - DNA, 825 bp, Artificial Sequence
  derived and/or modified sequence
atggtgatggtcaagggcgtgaataagctcgctctcccccccggttcagtcataagttaccctctggagaatgccgtcccgttttcactggactccgtcgccaactcaattcactcgctcttctccgaagagacacccgtggtactgcaattggccccctccgaagaacgtgtctacatggtaggaaaagcaaattcggtgtttgaagacctgagcgttacattgcggcagctgagaaataggcttttccaggagaactccgtgttgtcctcgttacctcttaattccctgtctcgaaataatgaagtcgatctattattcctcagcgagctccaagtcctacacgatatctcctcgctcttgagtcgacataaacaccttgcgaaggatcattcccccgacctgtattcattagaacttgccggactggacgagattggcaaacggtacggcgaggactccgaacaatttcgggacgcttccaaaatccttgtggatgccttgcaaaagtttgccgacgatatgtactctctctacggcggcaacgccgtcgtggaactagtaactgttaagtctttcgatacaagcttaatccgcaagacccgaaccatactcgaagcgaagcaagccaagaatcctgccagcccttacaatttggcttacaaatacaattttgagtacagcgtggtttttaacatggtgttgtggatcatgatcgctcttgccctcgctgttatcattacttcctacaatatatggaatatggaccctggctacgacagcatcatctaccgaatgacaaatcagaaaatcagaatggactag

SEQ ID NO: 159068 - DNA, 1053 bp, Artificial Sequence
  derived and/or modified sequence
atggctgtgtttgtggtgctgctggccctggtggccggcgtgctgggcaatgagttcagcatcctgaagagccctggctctgtggtgttcagaaatggaaactggcccatccctggagagcgcatcccagatgtggccgccctgtccatgggcttctctgtgaaggaggacctgtcctggccaggcctggccgtgggcaacctcttccaccggccccgggccaccgtgatggtgatggtgaagggcgtgaacaagctggccctgcccccaggcagcgtcatctcctaccccctggagaatgctgtgcccttcagcctggacagcgtggccaacagcatccacagcctcttcagcgaggagacccctgtggtgctgcagctggcccccagcgaggagcgggtgtacatggtgggcaaggccaacagcgtgtttgaggacctgtctgtgaccctgcggcagctgaggaacagactcttccaggagaacagcgtgctgagcagcctgcccctgaacagcctgagcagaaataatgaggtggacctgctcttcctgtctgagctgcaggtgctgcatgacatcagcagcctgctgagccgccacaagcacctggccaaggaccacagcccagacctgtacagcctggagctggccggcctggatgagatcggcaagcgctacggggaggacagcgagcagttcagagatgccagcaagatcctggtggatgccctgcagaagtttgctgatgacatgtacagcctgtatggaggaaatgctgtggtggagctggtgacagtgaagagctttgacaccagcctcatcaggaagaccaggaccatcctggaggccaagcaggccaagaacccagccagcccctacaacctggcctacaagtacaactttgagtacagcgtggtgttcaacatggtgctgtggatcatgattgccctggccctggccgtcatcatcaccagctacaacatctggaacatggaccccggctatgacagcatcatctacaggatgaccaaccagaagatccgcatggactag

SEQ ID NO: 159069 - DNA, 732 bp, Artificial Sequence
  derived and/or modified sequence
tgatgcccagctggccccttccgggtggccccccagtgctgcggccggcggggcaccatggctgtgtttgtggtgctgctggccctggtggccggcgtgctgggcaatgagttcagcatcctgaagagccctggctctgtggtgttcagaaatggaaactggcccatccctggagagcgcatcccagatgtggccgccctgtccatgggcttctctgtgaaggaggacctgtcctggccaggcctggccgtgggcaacctcttccaccggccccgggccaccgtgatggtgatggtgaagggcgtgaacaagctggccctgcccccaggcagcgtcatctcctaccccctggagaatgtggacctgctcttcctgtctgagctgcaggtgctgcatgacatcagcagcctgctgagccgccacaagcacctggccaaggaccacagcccagacctgtacagcctggagctggccggcctggatgaaattggcaagagatatggagaagattctgagcagttcagagatgccagcaagatcctggtggatgccctgcagaagtttgctgatgacatgtacagcctgtatggaggaaatgctgtggtggagctggtgacagtgaagagctttgacaccagcctcatcaggaagaccaggaccatcctggaggccaagcaggccaagaacccagccagcccctacaacctggcctacaagtacaactttgaatag

SEQ ID NO: 159070 - DNA, 612 bp, Artificial Sequence
  derived and/or modified sequence
gagagcgagcgggtgaccagcagccgctgtggctgccggccctgcccagctggccccttccgggtggccccccagtgctgcggcagaagaggcaccatggctgtgtttgtggtgctgctggccctggtggccggcgtgctgggcaatgagttcagcatcctgaagagccctggctctgtggtgttcagaaatggaaactggcccatccctggagagcgcatcccagatgtggccgccctgtccatgggcttctctgtgaaggaggacctgtcctggccaggcctggccgtgggcaacctcttccaccggccccgggccaccgtgatggtgatggtgaagggcgtgaacaagctggccctgcccccaggcagcgtcatctcctaccccctggagaacagagtgtacatggtgggcaaggccaacagcgtgtttgaggacctgtctgtgaccctgcggcagctgaggaacagactcttccaggagaacagcgtgctgagcagcctgcccctgaacagcctgagcagaaataatgaggtggacctgctcttcctgtctgagctgcaggtgctgcatgacatcagcagcctgctgagccgccacaagcacctgtag

SEQ ID NO: 159071 - DNA, 780 bp, Artificial Sequence
  derived and/or modified sequence
tgagtgcccccagcccggtctgtgagccccaggtctgctgctgctgctgctgccccctggctgtgcctgagctgctcctggcgctggtggagggacctgtcctggccaggcctggccgtgggcaacctcttccaccggccccgggccaccgtgatggtgatggtgaagggcgtgaacaagctggccctgcccccaggcagcgtcatctcctaccccctggagaatgctgtgcccttcagcctggacagcgtggccaacagcatccacagcctcttcagcgaggagacccctgtggtgctgcagctggcccccagcgaggagcgggtgtacatggtgggcaaggccaacagcgtgtttgaggacctgtctgtgaccctgcggcagctgaggaacagactcttccaggagaacagcgtgctgagcagcctgcccctgaacagcctgagcaggaacaatgaggtggacctgctcttcctgtctgagctgcaggtgctgcatgacatcagcagcctgctgagccgccacaagcacctggccaaggaccacagcccagacctgtacagcctggagctggccggcctggatgaaattggcaagagatatggagaagattctgagcagttcagagatgccagcaagatcctggtggatgccctgcagaagtttgctgatgacatgtacagcctgtatggaggaaatgctgtggtggagctggtgacagtgaagagctttgacaccagcctcatcaggaagaccaggaccatcctggaggccaagtag

SEQ ID NO: 159072 - DNA, 957 bp, Artificial Sequence
  derived and/or modified sequence
atggctgtgtttgtggtgctgctggccctggtggccggcgtgctgggcaatgagttcagcatcctgaagagccctggctctgtggtgttcagaaatggaaactggcccatccctggagagcgcatcccagatgtggccgccctgtccatgggcttctctgtgaaggaggacctgtcctggccaggcctggccgtgggcaacctcttccaccggccccgggccaccgtgatggtgatggtgaagggcgtgaacaagctggccctgcccccaggcagcgtcatctcctaccccctggagaacagagtgtacatggtgggcaaggccaacagcgtgtttgaggacctgtctgtgaccctgcggcagctgaggaacagactcttccaggagaacagcgtgctgagcagcctgcccctgaacagcctgagcagaaataatgaggtggacctgctcttcctgtctgagctgcaggtgctgcatgacatcagcagcctgctgagccgccacaagcacctggccaaggaccacagcccagacctgtacagcctggagctggccggcctggatgagatcggcaagcgctacggggaggacagcgagcagttcagagatgccagcaagatcctggtggatgccctgcagaagtttgctgatgacatgtacagcctgtatggaggaaatgctgtggtggagctggtgacagtgaagagctttgacaccagcctcatcaggaagaccaggaccatcctggaggccaagcaggccaagaacccagccagcccctacaacctggcctacaagtacaactttgagtacagcgtggtgttcaacatggtgctgtggatcatgattgccctggccctggccgtcatcatcaccagctacaacatctggaacatggaccccggctatgacagcatcatctacaggatgaccaaccagaagatccgcatggactag

SEQ ID NO: 159073 - DNA, 819 bp, Artificial Sequence
  derived and/or modified sequence
atggctgtgtttgtggtgctgctggccctggtggccggcgtgctgggcaatgagttcagcatcctgaagagccctggctctgtggtgttcagaaatggaaactggcccatccctggagagcgcatcccagatgtggccgccctgtccatgggcttctctgtgaaggaggacctgtcctggccaggcctggccgtgggcaacctcttccaccggccccgggccaccgtgatggtgatggtgaagggcgtgaacaagctggccctgcccccaggcagcgtcatctcctaccccctggagaatgtggacctgctcttcctgtctgagctgcaggtgctgcatgacatcagcagcctgctgagccgccacaagcacctggccaaggaccacagcccagacctgtacagcctggagctggccggcctggatgagatcggcaagcgctacggggaggacagcgagcagttcagagatgccagcaagatcctggtggatgccctgcagaagtttgctgatgacatgtacagcctgtatggaggaaatgctgtggtggagctggtgacagtgaagagctttgacaccagcctcatcaggaagaccaggaccatcctggaggccaagcaggccaagaacccagccagcccctacaacctggcctacaagtacaactttgagtacagcgtggtgttcaacatggtgctgtggatcatgattgccctggccctggccgtcatcatcaccagctacaacatctggaacatggaccccggctatgacagcatcatctacaggatgaccaaccagaagatccgcatggactag

SEQ ID NO: 159074 - DNA, 498 bp, Artificial Sequence
  derived and/or modified sequence
atggctgtgtttgtggtgctgctggccctggtggccggcgtgctgggcaatgagttcagcatcctgaagagccctggctctgtggtgttcagaaatggaaactggcccatccctggagagcgcatcccagatgtggccgccctgtccatgggcttctctgtgaaggaggacctgtcctggccaggcctggccgtgggcaacctcttccaccggccccgggccaccgtgatggtgatggtgaagggcgtgaacaagctggccctgcccccaggcagcgtcatctcctaccccctggagaatgctgtgcccttcagcctggacagcgtggccaacagcatccacagcctcttcagcgaggagacccctgtggtgctgcagctggcccccagcgaggagcgggtgtacatggtgggcaccatgaagctgacctgcagcttcttcctgaactgcaagtgctacatgatcttccaggcctgctgcctggtgatcagcatctag

SEQ ID NO: 159075 - DNA, 825 bp, Artificial Sequence
  derived and/or modified sequence
atggtgatggtgaagggcgtgaacaagctggccctgcccccaggcagcgtcatctcctaccccctggagaatgctgtgcccttcagcctggacagcgtggccaacagcatccacagcctcttcagcgaggagacccctgtggtgctgcagctggcccccagcgaggagcgggtgtacatggtgggcaaggccaacagcgtgtttgaggacctgtctgtgaccctgcggcagctgaggaacagactcttccaggagaacagcgtgctgagcagcctgcccctgaacagcctgagcagaaataatgaggtggacctgctcttcctgtctgagctgcaggtgctgcatgacatcagcagcctgctgagccgccacaagcacctggccaaggaccacagcccagacctgtacagcctggagctggccggcctggatgagatcggcaagcgctacggggaggacagcgagcagttcagagatgccagcaagatcctggtggatgccctgcagaagtttgctgatgacatgtacagcctgtatggaggaaatgctgtggtggagctggtgacagtgaagagctttgacaccagcctcatcaggaagaccaggaccatcctggaggccaagcaggccaagaacccagccagcccctacaacctggcctacaagtacaactttgagtacagcgtggtgttcaacatggtgctgtggatcatgattgccctggccctggccgtcatcatcaccagctacaacatctggaacatggaccccggctatgacagcatcatctacaggatgaccaaccagaagatccgcatggactag

SEQ ID NO: 159076 - DNA, 1053 bp, Artificial Sequence
  derived and/or modified sequence
atggccgtgttcgtggtgctgctggccctggtggccggcgtgctgggaaatgagttttctattctgaagtcacccggttccgtggtgttccgaaatgggaattggcccatccctggcgagaggattccagacgtagctgctctttctatgggattctcagtgaaggaagacttatcatggcctgggctggccgtggggaacctgttccatcgccctcgggccaccgttatggtgatggtgaaaggtgtgaacaagctcgccttgccccccggaagcgtgataagctatcctttagagaatgccgtgcctttctctctggatagcgttgccaattcaatccatagtttattctcggaggagacaccagtcgtactccagttagccccaagcgaagagcgcgtatatatggtcgggaaggcgaatagtgttttcgaagacctctctgttaccttgcgccaactgagaaaccgactcttccaggaaaattccgtacttagttccctccctttaaattcattgagccggaataacgaagtcgacttactgtttttgtccgagctgcaggtactgcatgacatatcttctctgctaagccgccacaagcatctggccaaggatcattctccagatctgtacagcctggagctggccgggcttgacgagattgggaaaagatatggtgaggactctgagcagttccgagacgctagtaaaattttggtcgacgctctccagaaattcgccgatgatatgtattccctttacggcggcaacgctgtggtcgaattggtgaccgtcaagagcttcgacacttctctcataaggaagacccgtaccatcctggaggcgaagcaagcgaaaaaccctgccagtccctacaacttggcctacaaatataatttcgaatactcagtggtttttaatatggtgctgtggattatgattgctcttgcccttgctgtgatcataacctcgtacaatatatggaatatggatcctgggtacgattccattatatacagaatgaccaaccaaaaaattaggatggactag

SEQ ID NO: 159077 - DNA, 732 bp, Artificial Sequence
  derived and/or modified sequence
tgatgccccgccggccccttccgggtggccccccagtgctgcggccgtcgggggacaatggccgtattcgtagtgctgttagcgcttgtggccggtgtcctcgggaacgaattcagcatcctgaagtcacctgggtcagtcgtgtttcgtaatggcaattggcctatcccaggggaaagaatacccgacgtcgccgcccttagtatgggattttctgttaaggaggacctcagctggccaggtctggccgtagggaacctgttccaccggccgcgagcgactgtcatggtcatggttaagggagtgaataaactggctttgcctcccggctctgtcatttcttatccattagagaatgtcgacctactattccttagcgagctgcaagtcctgcacgacatcagctccctgttaagccgacacaaacacctcgccaaggaccactcccctgatctgtactcactggaactggctggacttgacgaaattggaaagaggtacggagaagactcagagcagtttagagatgcctccaagattctggtggacgcactacagaagtttgcagatgatatgtactcactctatggagggaacgcggtcgttgaactcgtcaccgtcaagtcttttgacacatccctgattagaaagacaagaacgattttagaagccaagcaggccaaaaacccagcgagcccttacaatctggcttacaagtacaatttcgaatag

SEQ ID NO: 159078 - DNA, 612 bp, Artificial Sequence
  derived and/or modified sequence
gagagcgagcgggtgaccagcagccggtgcggctgccggccctgccctgccggcccctttcgtgtggcgccccagtgttgcggcaggcgtgggaccatggccgtgtttgtagtgctgctagccctcgtggcgggcgtgttagggaacgagttctcaatcctgaaaagccccggctctgtggtcttccgcaacggaaactggccaatccccggggagcggattcctgatgtggccgccttgagcatgggctttagcgtgaaagaagacctgtcctggcctggcctggccgtcggcaatctgtttcataggcccagagctacagttatggttatggttaagggagtgaacaaactggcccttccgccgggttctgtcattagctatcccctggagaacagagtgtatatggttggcaaagctaatagcgtgtttgaggacttgtcggtaacactgagacaactgcggaacaggttgttccaggaaaattccgtgctctcatccttaccattgaacagcctcagccgcaataacgaggtggaccttcttttcctaagcgagctccaggtcctgcacgacatctcatccttgctttcgcgtcataaacatctgtag

SEQ ID NO: 159079 - DNA, 780 bp, Artificial Sequence
  derived and/or modified sequence
tgagtgccccccgcccggagcgtgagcccccggagcgccgccgccgccgctgctccatggctgtgtctgtcttgctcctggagatggtggcgcgacctgagctggcctggcctcgcagtgggtaacctgtttcaccggccccgggccactgtaatggtgatggtcaagggagtgaacaaacttgcgttgccaccagggtccgtgatctcctacccactagagaacgcggtgcctttctcgctggactccgtggcaaactctatccactccctttttagcgaggagacacctgttgtgctgcagctggcccctagtgaggagagagtttacatggtgggaaaggcaaacagtgtcttcgaagacctgtccgtgacccttcggcagctgaggaacaggctgttccaggaaaactccgtgttatcgtcactaccactgaactcactttctcggaacaatgaggtcgatctgctgttcctctccgaacttcaggtcctgcacgatatatccagtctgctctccagacacaagcacctggctaaagatcacagccctgacctctacagcctagagctggccgggctggacgagatcggaaagagatatggagaggactccgaacagtttcgcgacgcctctaagatcctggtcgacgccttgcaaaagttcgcggatgacatgtactctctgtatggtgggaacgccgtcgttgagctcgtgaccgtgaaatcgtttgacacgagcctcatccggaagacccgcacgattctggaggctaaatag

SEQ ID NO: 159080 - DNA, 957 bp, Artificial Sequence
  derived and/or modified sequence
atggccgtgttcgtggtgctgctggccctggtggccggcgtgctgggcaacgagttcagcatcctcaagtcgcccggaagcgttgtctttagaaatgggaactggccaattccaggagaacggatacccgatgtagcggcattaagcatgggatttagtgtcaaggaggatttgtcatggcctggcctggcagtcggcaatctctttcaccggccgcgtgcgactgtcatggtgatggtgaaaggagtgaacaagttagccctgccaccgggtagtgtgatatcgtatccgctcgagaatagagtttacatggtcgggaaagctaatagcgtctttgaggatctttcagtgacactgagacagctccgaaaccgcttgtttcaggagaattccgtgttaagcagcctgccactcaattcccttagccggaacaatgaagtggacctactattcttgtccgaactgcaggtgctgcacgacattagcagcttgctgagtaggcataagcacctggccaaggatcactcccctgacttatattcgctggagctggctggcctagatgagattggaaagcggtacggcgaggattccgaacagttccgcgacgcaagcaagattctcgtggatgcattgcagaaatttgcggatgatatgtactccctttacgggggcaacgcagtcgtggaactggtcacagtgaaaagcttcgacacgtctctgatacgcaaaaccagaacaatccttgaagctaagcaggccaaaaatccggcttccccttataacctggcgtataaatataattttgaatacagtgttgtgttcaatatggtcttatggataatgatagcgctggccctagccgtcatcataacttcttacaacatctggaacatggaccctggatatgacagtatcatttatcgaatgacgaatcagaagattcgtatggactag

SEQ ID NO: 159081 - DNA, 819 bp, Artificial Sequence
  derived and/or modified sequence
atggccgtgttcgtggtgctgctggccctggtggccggcgtgctgggaaacgaattctctatcttgaaatcacccggatcagttgtgttcaggaacggcaattggcccatccccggggagaggattcctgatgtggcagccctgtctatgggctttagcgtcaaagaagacttgagctggcccggactcgcagttggcaacttgtttcaccggcccagagccacagtgatggttatggtcaagggagtcaacaaactcgctctgcccccaggcagcgtgatttcatatcctctggagaacgtcgacttgctcttcctctcagaactgcaggtgctgcatgatatctcaagcttattgagtcgccacaaacatctggcgaaggaccactcgcctgatctgtactcgcttgagctggccggattggacgaaatcggaaagcgatatggagaggattccgagcagttccgcgatgcatccaagattctggtggacgctcttcagaaatttgccgacgacatgtacagtctctacgggggcaatgctgtggtggagctggtgaccgttaagtcgtttgatacttctctgatccgaaagacccggaccattttagaagctaagcaggccaaaaaccccgcgtctccctacaatctggcctataaatacaattttgagtactccgtggtgttcaacatggtgttatggattatgatcgccttggctctagcagtcataattacctcatacaatatctggaatatggacccaggctatgactcaattatttaccgaatgacaaaccagaaaattcgcatggattag

SEQ ID NO: 159082 - DNA, 498 bp, Artificial Sequence
  derived and/or modified sequence
atggccgtgttcgtggtgctgctggccctggtggccggcgtgctgggtaacgagttttctatcctcaagtcacctgggagtgtcgtgttcagaaacggcaattggccaattccaggcgaaaggatcccggatgtggccgcactgagcatggggttctctgtgaaggaagatctgtcttggcctgggctggctgtcggcaatctgtttcaccgacccagggctacagttatggttatggtgaagggcgtaaacaagctggcccttccccctgggtccgtgatctcctacccgctcgaaaatgctgtgccttttagcctcgattcagtggcaaattcaatccacagtctgttttctgaagagacccccgtcgttttacagctggccccttccgaagaaagggtctacatggtgggtaccatgaagctaacctgctcctttttcttaaattgtaagtgttacatgatcttccaagcctgttgtctcgtgataagtatttag

SEQ ID NO: 159083 - DNA, 825 bp, Artificial Sequence
  derived and/or modified sequence
atggtgatggtgaagggcgtgaacaagctggccctgccccccggcagtgtaatcagttatccgttggagaacgccgtcccatttagccttgatagcgtggcaaactcaatccactccctgttttccgaggagactcccgttgtgctccagctggcaccttctgaagaacgcgtgtatatggttggcaaggccaatagcgtgtttgaggacctctctgtaacactgaggcagttgcgcaacaggctctttcaagagaacagcgtgctgtcatctctccctctgaactccctgagccgaaataatgaggtggacctgctgttcctatccgaactgcaggttctgcacgatatctcatccctgctgagcaggcataagcatcttgccaaggaccattcccctgacctttattccctagagctggcaggcttggacgagattggcaagcggtacggagaggatagcgagcagtttagggacgcctctaagatactagtggacgcattgcagaaattcgcagatgacatgtatagcttatatggggggaatgcagtggtggagctggtaaccgttaagagctttgacaccagtctcattaggaagacacggacaattttggaggccaagcaggcaaaaaaccccgcatccccctataatcttgcatacaagtataactttgagtactcagtcgtgtttaatatggtcctgtggatcatgattgctctcgcgctcgcggtcattataacatcatataacatttggaacatggacccgggttatgactctataatttacagaatgaccaatcaaaagatcagaatggactag

SEQ ID NO: 159084 - DNA, 1053 bp, Artificial Sequence
  derived and/or modified sequence
atggctgtgttcgtagtgctcctcgcactggtggcaggtgttttagggaatgagttcagcatcctcaagtcgcctggatcggtagtgtttcgtaatggcaactggccaataccaggggaacggatccccgacgttgccgcattatcgatgggcttttccgtgaaagaggacctttcttggcctggactagcagtagggaacctgttccataggccccgtgcgaccgtgatggttatggttaagggggtaaacaaattagccctgccccctggcagcgtaatcagttacccactggagaatgctgtgcccttttctctggatagtgtggccaatagcatccactcactgttttccgaggaaacccctgtggtcctccagctcgctccgtctgaagagagagtctatatggtggggaaagcaaatagcgtctttgaagatttatcagtgacacttagacagcttcgcaacaggttgtttcaagagaatagcgtgctgtcgagcttaccccttaactctctgagtcggaacaatgaggtggatttgctgtttctctccgaactccaagttttgcatgatattagcagtttgctttccagacataaacacttagccaaagatcatagcccagatctgtactctctggaactggcagggctggacgagattggaaaacgctatggtgaggatagcgagcaattccgtgacgcttccaaaatacttgtggacgcacttcagaagtttgcagatgatatgtactccctctatggaggtaatgctgtcgtagagctggtgactgtgaagtccttcgacactagcctgatcagaaagacacgcaccattctggaagctaagcaggccaagaaccccgcatcaccatataatctggcttataaatacaatttcgaatacagtgtcgtgttcaacatggtgctgtggatcatgattgctctcgctcttgctgtgataatcacctcctataatatctggaacatggaccctggctacgactcaatcatataccgtatgacgaaccaaaagatcagaatggattag

SEQ ID NO: 159085 - DNA, 732 bp, Artificial Sequence
  derived and/or modified sequence
tgatgtcccgcaggcccttttcgcgtggctccccaatgttgtggaagacgtgggacaatggcagtgtttgtcgtgctactcgctctggttgccggagtgcttggtaacgaattttctatactgaagtctcccggtagcgttgtgttccggaacggtaactggcctatccccggagagcggatacctgacgtcgcggctctcagcatgggctttagcgtgaaggaggatctgtcctggcctggcttagctgtcggcaatctgtttcaccgacctcgcgcaacagtaatggttatggtgaagggagtgaacaagcttgccctcccccctggatcagttatttcatatccactggaaaatgtagatctcctgttcctgtccgaactgcaggtccttcatgacatttcctccctgctctcacgccacaaacatcttgccaaggaccacagtccagatctgtatagcctggagctcgccggtttagacgaaataggaaaaagatatggagaggatagcgaacaattccgcgatgcttcgaagatcctcgtggatgccctacagaagttcgctgatgacatgtactcactgtatggcggaaacgctgtagtcgagctggtgacagtcaaatcattcgacacctcactgattcgcaaaactcggactatcttagaggcaaagcaggctaagaacccagcgtcaccttacaatctggcttacaagtataatttcgagtag

SEQ ID NO: 159086 - DNA, 612 bp, Artificial Sequence
  derived and/or modified sequence
gaaagtgaacgcgtcactagctccaggtgtgggtgccgtccatgccccgcaggcccattcagagtggctccgcagtgctgtgggaggcggggtaccatggccgtgtttgttgtactactggccctggtagcgggagtattgggaaacgagttcagtattttgaaatctcctggctcagtggtgttcagaaacggcaattggccgattccaggagagaggatcccagacgttgcggctctttctatgggcttctccgtgaaggaggatctgtcctggcccggactggctgtgggaaacttgttccacaggccacgcgcaacagtgatggtgatggtcaaaggtgtaaataagttggcgctgccacccggatctgtgatatcgtaccctctcgagaaccgagtctatatggtgggaaaagccaacagcgtcttcgaggatctctccgtgaccctacggcagctccggaatcggctgtttcaagagaatagtgtgctgtcgtccctccctcttaacagcctgtccaggaacaatgaagttgatttgctattcctgtccgaactacaggtgctccacgacatatctagcctcctgagccgtcataagcatctttag

SEQ ID NO: 159087 - DNA, 780 bp, Artificial Sequence
  derived and/or modified sequence
taagtaccaccagccaggagcgttagccccaggtccgccgcagctgccgctgccccttggctgtgtctgtcatgttcttggagatggtggagggatttaagttggccaggactggccgtgggtaacttgttccaccgccctcgcgcaaccgttatggttatggttaagggtgtcaataaattagctctcccccctggctccgtgattagttatccattggagaacgcagtcccattttcgctggatagcgtcgctaactcaatccattcactgtttagcgaagagacacccgtggtcctccagctcgctccatcagaagagcgggtttatatggttgggaaggccaacagcgtgttcgaggacttatctgttacactgagacaactacgcaacaggctttttcaagagaattcggtgctgagttcgctgcccttaaatagtctatctagaaataacgaagtggacctccttttccttagtgaactgcaggtcctgcacgatatatcatccctgctttccaggcataagcatctagcaaaggaccactcccctgatctctactctcttgaactggccggactcgacgagatcggtaagaggtacggggaagacagcgaacagttccgagacgcctctaagatcctcgtggacgccctacagaagttcgcagatgacatgtactcattgtatgggggaaatgcagtggtggagctagtgaccgtaaaaagctttgacacatcactgataagaaagacaaggactatcctagaagccaagtag

SEQ ID NO: 159088 - DNA, 957 bp, Artificial Sequence
  derived and/or modified sequence
atggccgtttttgttgttttgctagcactggttgcgggtgtgttgggcaacgaatttagcatcctgaaatcaccagggtcggtggtgttcaggaatggtaactggcctatacctggcgagcggatccccgatgtggccgcactctctatgggcttttccgtgaaagaggacttgagctggccaggacttgcagtcggcaacctgttccataggccaagagccacggttatggttatggtgaaaggcgtgaataaactggccttgcctcctggctccgtgattagctacccactcgagaacagggtatatatggtgggaaaggcaaatagcgtcttcgaagaccttagcgtaaccctacgccagctgcggaatagactgtttcaggagaacagtgtgctctccagcctcccattgaacagcttgtcgcgtaataacgaggtggacctgctattcttgtctgagttacaggtacttcacgacatttcctccctgctgagtcggcacaagcaccttgccaaggatcattcacccgacttgtacagcttggaacttgccggactcgacgagattggaaaaagatacggcgaggactcagaacagttcagggacgcctctaaaatactggtggatgcccttcagaagtttgccgacgatatgtactctctgtatggtggtaacgctgtcgttgagcttgtgactgttaaatcctttgatacctccttaattcggaagacacgcacaattttggaggcaaagcaggcaaaaaaccctgcttcaccgtacaatctcgcctataagtacaactttgagtattcagtggtattcaatatggtgctctggatcatgattgcactggccttagccgtaatcataacctcttataatatttggaacatggatcctgggtatgatagtattatttacagaatgaccaaccagaaaattcggatggactag

SEQ ID NO: 159089 - DNA, 819 bp, Artificial Sequence
  derived and/or modified sequence
atggctgtgtttgtggttctcctggccctggtggctggggtgctgggaaacgagttttctatcctgaaatctccgggatcagtcgtgtttcgcaatggtaattggcccatccccggtgagcgtatacctgacgtggctgcgctaagtatgggcttctctgttaaagaagatctgtcttggccagggctggctgtgggtaatctctttcaccgcccacgcgcaacagtgatggtcatggtcaaaggtgtcaataaactcgcccttcccccaggttccgtcatctcataccccctcgaaaacgtcgacctactctttttgtcggaactgcaggtcctgcacgatatttcttcattgctgtctcggcataagcacctcgccaaagaccactcaccagacctgtactctttagaactcgctggactggatgagattgggaagagatacggagaagatagtgagcaatttcgtgatgcgagtaaaattttggtcgacgcccttcagaagttcgccgatgatatgtattctttgtacggtggcaacgccgtggtcgaactggtgacggtaaaatcctttgacacatccttaatcaggaagacaagaactattctagaggccaagcaggctaagaaccccgcatccccatataatcttgcctataagtacaatttcgagtatagcgtggtctttaatatggtcttgtggatcatgatcgctctcgccttagctgtaattatcacatcctataatatatggaacatggacccgggatacgactccatcatttatcgtatgaccaatcagaagataaggatggattag

SEQ ID NO: 159090 - DNA, 498 bp, Artificial Sequence
  derived and/or modified sequence
atggcagtattcgtagttctcctggccttagtggcaggtgtgctgggcaacgaatttagcatcctgaagtctcctggaagcgttgtattcagaaacggcaattggcctattcctggagagcgcattccggatgtcgcagccctgagcatgggtttttctgtcaaggaagacctttcctggcccggactggccgttggaaatctgttccatcggcctcgcgcaaccgtgatggttatggtcaagggggttaacaagttggccctgccccctggatctgtgatcagttatcccctggaaaacgccgtacccttttccctggactccgtcgcaaatagcatccactctctgttcagtgaagagacccctgtggtcctccagctggcaccaagtgaagagagggtgtacatggtcgggacgatgaagctaacatgcagtttttttctgaactgcaagtgttatatgatattccaggcttgttgcctggtcatctctatatag

SEQ ID NO: 159091 - DNA, 825 bp, Artificial Sequence
  derived and/or modified sequence
atggtaatggtgaagggagtgaacaagctggccctgccgcctggttccgttatcagctaccctttggagaatgcagtgcccttttctctcgattcagtagctaacagcatacatagcctgttctctgaggagacccccgtcgttcttcagctcgccccaagtgaggaacgcgtgtacatggtgggaaaggccaatagtgtcttcgaagacctctctgtgacactccgacagttgcggaacaggctgttccaggaaaactcggtcttatccagcctgcctctgaactccctgtcacgcaacaacgaggttgatttgctctttctgagcgagctgcaggtgctccacgatatcagctcactattgtcccggcacaagcacttggcgaaggatcacagccccgatctctactcattggagctggccggactggatgaaatcgggaagcgctatggggaggatagtgagcagtttagagatgcaagcaaaatactggtcgacgccctccagaagttcgccgatgacatgtatagcctgtacggtgggaacgcagtcgtggagctcgtcaccgtgaagtctttcgatacatccctgatcaggaagacacgcaccatcttagaagccaaacaagccaaaaatccagcgtccccttataatttagcctacaaatataattttgagtattccgtcgtgtttaatatggtcctttggataatgattgctctggcccttgccgttataattaccagttacaatatttggaacatggaccccggttatgactcaatcatttaccgaatgactaaccagaagattcgcatggattag

SEQ ID NO: 159092 - DNA, 2093 bp, Artificial Sequence
  derived and/or modified sequence
gtggagaaagcggcagctgtcccagcggaagcgacgaagggacgggacccgggagcctggacgagtccgagcgcgtcacctcctcacgctgcggctgtcgcccgtgtcccgccggcccgttccgtgtcgccccgcagtgctgcggccgccgcggcaccatggctgtgtttgtcgtgctcctggcgttggtggcgggtgttttggggaacgagtttagtatattaaaatcaccagggtctgttgttttccgaaatggaaattggcctataccaggagagcggatcccagacgtggctgcattgtccatgggcttctctgtgaaagaagacctttcttggccaggactcgcagtgggtaacctgtttcatcgtcctcgggctaccgtcatggtgatggtgaagggagtgaacaaactggctctacccccaggcagtgtcatttcgtaccctttggagaatgcagttccttttagtcttgacagtgttgcaaattccattcactccttattttctgaggaaactcctgttgttttgcagttggctcccagtgaggaaagagtgtatatggtagggaaggcaaactcagtgtttgaagacctttcagtcaccttgcgccagctccgtaatcgcctgtttcaagaaaactctgttctcagttcactccccctcaattctctgagtaggaacaatgaagttgacctgctctttctttctgaactgcaagtgctacatgatatttcaagcttgctgtctcgtcataagcatctagccaaggatcattctcctgatttatattcactggagctggcaggtttggatgaaattgggaagcgttatggggaagactctgaacaattcagagatgcttctaagatccttgttgacgctctgcaaaagtttgcagatgacatgtacagtctttatggtgggaatgcagtggtagagttagtcactgtcaagtcatttgacacctccctcattaggaagacaaggactatccttgaggcaaaacaagcgaagaacccagcaagtccctataaccttgcatataagtataattttgaatattccgtggttttcaacatggtactttggataatgatcgccttggccttggctgtgattatcacctcttacaatatttggaacatggatcctggatatgatagcatcatttataggatgacaaaccagaagattcgaatggattgaatgttacctgtgccagaattagaaaagggggttggaaattggctgttttgttaaaatatatcttttagtgtgctttaaagtagatagtatactttacatttataaaaaaaaatcaaattttgttctttattttgtgtgtgcctgtgatgtttttctagagtgaattatagtattgacgtgaatcccactgtggtatagattccataatatgcttgaatattatgatatagccatttaataacattgatttcattctgtttaatgaatttggaaatatgcactgaaagaaatgtaaaacatttagaatagctcgtgttatggaaaaaagtgcactgaatttattagacaaacttacgaatgcttaacttctttacacagcataggtgaaaatcatatttgggctattgtatactatgaacaatttgtaaatgtcttaatttgatgtaaataactctgaaacaagagaaaaggtttttaacttagagtagccctaaaatatggatgtgcttatataatcgcttagttttggaactgtatctgagtaacagaggacagctgttttttaaccctcttctgcaagtttgttgacctacatgggctaatatggatactaaaaatactacattgatctaagaagaaactagccttgtggagtatatagatgcttttcattatacacacaaaaatccctgagggacattttgaggcatgaatataaaacatttttatttcagtaacttttccccctgtgtaagttactatggtttgtggtacaacttcattctatagaatattaagtggaagtgggtgaattctactttttatgttggagtggaccaatgtctatcaagagtgacaaataaagttaatgatgattccaaa

SEQ ID NO: 159093 - DNA, 728 bp, Artificial Sequence
  derived and/or modified sequence
gtgtcccgccggcccgttccgtgtcgccccgcagtgctgcggccgccgcggcaccatggctgtgtttgtcgtgctcctggcgttggtggcgggtgttttggggaacgagtttagtatattaaaatcaccagggtctgttgttttccgaaatggaaattggcctataccaggagagcggatcccagacgtggctgcattgtccatgggcttctctgtgaaagaagacctttcttggccaggactcgcagtgggtaacctgtttcatcgtcctcgggctaccgtcatggtgatggtgaagggagtgaacaaactggctctacccccaggcagtgtcatttcgtaccctttggagaatgttgacctgctctttctttctgaactgcaagtgctacatgatatttcaagcttgctgtctcgtcataagcatctagccaaggatcattctcctgatttatattcactggagctggcaggtttggatgaaattgggaagcgttatggggaagactctgaacaattcagagatgcttctaagatccttgttgacgctctgcaaaagtttgcagatgacatgtacagtctttatggtgggaatgcagtggtagagttagtcactgtcaagtcatttgacacctccctcattaggaagacaaggactatccttgaggcaaaacaagcgaagaacccagcaagtccctataaccttgcatataagtataattttgaat

SEQ ID NO: 159094 - DNA, 609 bp, Artificial Sequence
  derived and/or modified sequence
gagtccgagcgcgtcacctcctcacgctgcggctgtcgcccgtgtcccgccggcccgttccgtgtcgccccgcagtgctgcggccgccgcggcaccatggctgtgtttgtcgtgctcctggcgttggtggcgggtgttttggggaacgagtttagtatattaaaatcaccagggtctgttgttttccgaaatggaaattggcctataccaggagagcggatcccagacgtggctgcattgtccatgggcttctctgtgaaagaagacctttcttggccaggactcgcagtgggtaacctgtttcatcgtcctcgggctaccgtcatggtgatggtgaagggagtgaacaaactggctctacccccaggcagtgtcatttcgtaccctttggagaatagagtgtatatggtagggaaggcaaactcagtgtttgaagacctttcagtcaccttgcgccagctccgtaatcgcctgtttcaagaaaactctgttctcagttcactccccctcaattctctgagtaggaacaatgaagttgacctgctctttctttctgaactgcaagtgctacatgatatttcaagcttgctgtctcgtcataagcatcta

SEQ ID NO: 159095 - DNA, 777 bp, Artificial Sequence
  derived and/or modified sequence
gtgtcccgccggcccgttccgtgtcgccccgcagtgctgcggccgccgcggcaccatggctgtgtttgtcgtgctcctggcgttggtggcgggacctttcttggccaggactcgcagtgggtaacctgtttcatcgtcctcgggctaccgtcatggtgatggtgaagggagtgaacaaactggctctacccccaggcagtgtcatttcgtaccctttggagaatgcagttccttttagtcttgacagtgttgcaaattccattcactccttattttctgaggaaactcctgttgttttgcagttggctcccagtgaggaaagagtgtatatggtagggaaggcaaactcagtgtttgaagacctttcagtcaccttgcgccagctccgtaatcgcctgtttcaagaaaactctgttctcagttcactccccctcaattctctgagtaggaacaatgaagttgacctgctctttctttctgaactgcaagtgctacatgatatttcaagcttgctgtctcgtcataagcatctagccaaggatcattctcctgatttatattcactggagctggcaggtttggatgaaattgggaagcgttatggggaagactctgaacaattcagagatgcttctaagatccttgttgacgctctgcaaaagtttgcagatgacatgtacagtctttatggtgggaatgcagtggtagagttagtcactgtcaagtcatttgacacctccctcattaggaagacaaggactatccttgaggcaaaac

SEQ ID NO: 159096 - DNA, 1511 bp, Artificial Sequence
  derived and/or modified sequence
gtaactggtgattggtggagaaagcggcagctgtcccagcggaagcgacgaagggacgggacccgggagcctggacgagtccgagcgcgtcacctcctcacgctgcggctgtcgcccgtgtcccgccggcccgttccgtgtcgccccgcagtgctgcggccgccgcggcaccatggctgtgtttgtcgtgctcctggcgttggtggcgggtgttttggggaacgagtttagtatattaaaatcaccagggtctgttgttttccgaaatggaaattggcctataccaggagagcggatcccagacgtggctgcattgtccatgggcttctctgtgaaagaagacctttcttggccaggactcgcagtgggtaacctgtttcatcgtcctcgggctaccgtcatggtgatggtgaagggagtgaacaaactggctctacccccaggcagtgtcatttcgtaccctttggagaatagagtgtatatggtagggaaggcaaactcagtgtttgaagacctttcagtcaccttgcgccagctccgtaatcgcctgtttcaagaaaactctgttctcagttcactccccctcaattctctgagtaggaacaatgaagttgacctgctctttctttctgaactgcaagtgctacatgatatttcaagcttgctgtctcgtcataagcatctagccaaggatcattctcctgatttatattcactggagctggcaggtttggatgaaattgggaagcgttatggggaagactctgaacaattcagagatgcttctaagatccttgttgacgctctgcaaaagtttgcagatgacatgtacagtctttatggtgggaatgcagtggtagagttagtcactgtcaagtcatttgacacctccctcattaggaagacaaggactatccttgaggcaaaacaagcgaagaacccagcaagtccctataaccttgcatataagtataattttgaatattccgtggttttcaacatggtactttggataatgatcgccttggccttggctgtgattatcacctcttacaatatttggaacatggatcctggatatgatagcatcatttataggatgacaaaccagaagattcgaatggattgaatgttacctgtgccagaattagaaaagggggttggaaattggctgttttgttaaaatatatcttttagtgtgctttaaagtagatagtatactttacatttataaaaaaaaatcaaattttgttctttattttgtgtgtgcctgtgatgtttttctagagtgaattatagtattgacgtgaatcccactgtggtatagattccataatatgcttgaatattatgatatagccatttaataacattgatttcattctgtttaatgaatttggaaatatgcactgaaagaaatgtaaaacatttagaatagctcgtgttatggaaaaaagtgcactgaatttattagacaaacttacgaatgcttaacttctttacacagcata

SEQ ID NO: 159097 - DNA, 1006 bp, Artificial Sequence
  derived and/or modified sequence
gtcacctcctcacgctgcggctgtcgcccgtgtcccgccggcccgttccgtgtcgccccgcagtgctgcggccgccgcggcaccatggctgtgtttgtcgtgctcctggcgttggtggcgggtgttttggggaacgagtttagtatattaaaatcaccagggtctgttgttttccgaaatggaaattggcctataccaggagagcggatcccagacgtggctgcattgtccatgggcttctctgtgaaagaagacctttcttggccaggactcgcagtgggtaacctgtttcatcgtcctcgggctaccgtcatggtgatggtgaagggagtgaacaaactggctctacccccaggcagtgtcatttcgtaccctttggagaatgttgacctgctctttctttctgaactgcaagtgctacatgatatttcaagcttgctgtctcgtcataagcatctagccaaggatcattctcctgatttatattcactggagctggcaggtttggatgaaattgggaagcgttatggggaagactctgaacaattcagagatgcttctaagatccttgttgacgctctgcaaaagtttgcagatgacatgtacagtctttatggtgggaatgcagtggtagagttagtcactgtcaagtcatttgacacctccctcattaggaagacaaggactatccttgaggcaaaacaagcgaagaacccagcaagtccctataaccttgcatataagtataattttgaatattccgtggttttcaacatggtactttggataatgatcgccttggccttggctgtgattatcacctcttacaatatttggaacatggatcctggatatgatagcatcatttataggatgacaaaccagaagattcgaatggattgaatgttacctgtgccagaattagaaaagggggttggaaattggctgttttgttaaaatatatcttttagtgtgctttaaagtagatagtatactttacatttat

SEQ ID NO: 159098 - DNA, 1030 bp, Artificial Sequence
  derived and/or modified sequence
acgctgcggctgtcgcccgtgtcccgccggcccgttccgtgtcgccccgcagtgctgcggccgccgcggcaccatggctgtgtttgtcgtgctcctggcgttggtggcgggtgttttggggaacgagtttagtatattaaaatcaccagggtctgttgttttccgaaatggaaattggcctataccaggagagcggatcccagacgtggctgcattgtccatgggcttctctgtgaaagaagacctttcttggccaggactcgcagtgggtaacctgtttcatcgtcctcgggctaccgtcatggtgatggtgaagggagtgaacaaactggctctacccccaggcagtgtcatttcgtaccctttggagaatgcagttccttttagtcttgacagtgttgcaaattccattcactccttattttctgaggaaactcctgttgttttgcagttggctcccagtgaggaaagagtgtatatggtaggaacaatgaagttgacctgctctttctttctgaactgcaagtgctacatgatatttcaagcttgctgtctcgtcataagcatctagccaaggatcattctcctgatttatattcactggagctggcaggtttggatgaaattgggaagcgttatggggaagactctgaacaattcagagatgcttctaagatccttgttgacgctctgcaaaagtttgcagatgacatgtacagtctttatggtgggaatgcagtggtagagttagtcactgtcaagtcatttgacacctccctcattaggaagacaaggactatccttgaggcaaaacaagcgaagaacccagcaagtccctataaccttgcatataagtataattttgaatattccgtggttttcaacatggtactttggataatgatcgccttggccttggctgtgattatcacctcttacaatatttggaacatggatcctggatatgatagcatcatttataggatgacaaaccagaagattcgaatggattgaatgttacctgtgccag

SEQ ID NO: 159099 - DNA, 1311 bp, Artificial Sequence
  derived and/or modified sequence
gagtccgagcgcgtcacctcctcacgctgcggctgtcgcccgtgtcccgccggcccgttccgtgtcgccccgcagtgctgcggccgccgcggcaccatggctgtgtttgtcgtgctcctggcgttggtggcgggacctttcttggccaggactcgcagtgggtaacctgtttcatcgtcctcgggctaccgtcatggtgatggtgaagggagtgaacaaactggctctacccccaggcagtgtcatttcgtaccctttggagaatgcagttccttttagtcttgacagtgttgcaaattccattcactccttattttctgaggaaactcctgttgttttgcagttggctcccagtgaggaaagagtgtatatggtagggaaggcaaactcagtgtttgaagacctttcagtcaccttgcgccagctccgtaatcgcctgtttcaagaaaactctgttctcagttcactccccctcaattctctgagtaggaacaatgaagttgacctgctctttctttctgaactgcaagtgctacatgatatttcaagcttgctgtctcgtcataagcatctagccaaggatcattctcctgatttatattcactggagctggcaggtttggatgaaattgggaagcgttatggggaagactctgaacaattcagagatgcttctaagatccttgttgacgctctgcaaaagtttgcagatgacatgtacagtctttatggtgggaatgcagtggtagagttagtcactgtcaagtcatttgacacctccctcattaggaagacaaggactatccttgaggcaaaacaagcgaagaacccagcaagtccctataaccttgcatataagtataattttgaatattccgtggttttcaacatggtactttggataatgatcgccttggccttggctgtgattatcacctcttacaatatttggaacatggatcctggatatgatagcatcatttataggatgacaaaccagaagattcgaatggattgaatgttacctgtgccagaattagaaaagggggttggaaattggctgttttgttaaaatatatcttttagtgtgctttaaagtagatagtatactttacatttataaaaaaaaatcaaattttgttctttattttgtgtgtgcctgtgatgtttttctagagtgaattatagtattgacgtgaatcccactgtggtatagattccataatatgcttgaatattatgatatagccatttaataacattgatttcattctgtttaatgaatttggaaatatgcactgaaagaaatgt

SEQ ID NO: 159100 - DNA, 1053 bp, Artificial Sequence
  derived and/or modified sequence
atggccgtgttcgtggtgctgctggccctggtggccggcgtgctgggcaacgagttcagcatcctgaagagccccggcagcgtggtgttcagaaacggcaactggcccatccccggcgagagaatccccgacgtggccgccctgagcatgggcttcagcgtgaaggaggacctgagctggcccggcctggccgtgggcaacctgttccacagacccagagccaccgtgatggtgatggtgaagggcgtgaacaagctggccctgccccccggcagcgtgatcagctaccccctggagaacgccgtgcccttcagcctggacagcgtggccaacagcatccacagcctgttcagcgaggagacccccgtggtgctgcagctggcccccagcgaggagagagtgtacatggtgggcaaggccaacagcgtgttcgaggacctgagcgtgaccctgagacagctgagaaacagactgttccaggagaacagcgtgctgagcagcctgcccctgaacagcctgagcagaaacaacgaggtggacctgctgttcctgagcgagctgcaggtgctgcacgacatcagcagcctgctgagcagacacaagcacctggccaaggaccacagccccgacctgtacagcctggagctggccggcctggacgagatcggcaagagatacggcgaggacagcgagcagttcagagacgccagcaagatcctggtggacgccctgcagaagttcgccgacgacatgtacagcctgtacggcggcaacgccgtggtggagctggtgaccgtgaagagcttcgacaccagcctgatcagaaagaccagaaccatcctggaggccaagcaggccaagaaccccgccagcccctacaacctggcctacaagtacaacttcgagtacagcgtggtgttcaacatggtgctgtggatcatgatcgccctggccctggccgtgatcatcaccagctacaacatctggaacatggaccccggctacgacagcatcatctacagaatgaccaaccagaagatcagaatggactag

SEQ ID NO: 159101 - DNA, 732 bp, Artificial Sequence
  derived and/or modified sequence
tgatgccccgccggccccttcagagtggccccccagtgctgcggcagaagaggcaccatggccgtgttcgtggtgctgctggccctggtggccggcgtgctgggcaacgagttcagcatcctgaagagccccggcagcgtggtgttcagaaacggcaactggcccatccccggcgagagaatccccgacgtggccgccctgagcatgggcttcagcgtgaaggaggacctgagctggcccggcctggccgtgggcaacctgttccacagacccagagccaccgtgatggtgatggtgaagggcgtgaacaagctggccctgccccccggcagcgtgatcagctaccccctggagaacgtggacctgctgttcctgagcgagctgcaggtgctgcacgacatcagcagcctgctgagcagacacaagcacctggccaaggaccacagccccgacctgtacagcctggagctggccggcctggacgagatcggcaagagatacggcgaggacagcgagcagttcagagacgccagcaagatcctggtggacgccctgcagaagttcgccgacgacatgtacagcctgtacggcggcaacgccgtggtggagctggtgaccgtgaagagcttcgacaccagcctgatcagaaagaccagaaccatcctggaggccaagcaggccaagaaccccgccagcccctacaacctggcctacaagtacaacttcgagtag

SEQ ID NO: 159102 - DNA, 612 bp, Artificial Sequence
  derived and/or modified sequence
gagagcgagagagtgaccagcagcagatgcggctgcagaccctgccccgccggccccttcagagtggccccccagtgctgcggcagaagaggcaccatggccgtgttcgtggtgctgctggccctggtggccggcgtgctgggcaacgagttcagcatcctgaagagccccggcagcgtggtgttcagaaacggcaactggcccatccccggcgagagaatccccgacgtggccgccctgagcatgggcttcagcgtgaaggaggacctgagctggcccggcctggccgtgggcaacctgttccacagacccagagccaccgtgatggtgatggtgaagggcgtgaacaagctggccctgccccccggcagcgtgatcagctaccccctggagaacagagtgtacatggtgggcaaggccaacagcgtgttcgaggacctgagcgtgaccctgagacagctgagaaacagactgttccaggagaacagcgtgctgagcagcctgcccctgaacagcctgagcagaaacaacgaggtggacctgctgttcctgagcgagctgcaggtgctgcacgacatcagcagcctgctgagcagacacaagcacctgtag

SEQ ID NO: 159103 - DNA, 780 bp, Artificial Sequence
  derived and/or modified sequence
tgagtgccccccgccagaagcgtgagccccagaagcgccgccgccgccgccgccccctggctgtgcctgagctgcagctggagatggtggagagacctgagctggcccggcctggccgtgggcaacctgttccacagacccagagccaccgtgatggtgatggtgaagggcgtgaacaagctggccctgccccccggcagcgtgatcagctaccccctggagaacgccgtgcccttcagcctggacagcgtggccaacagcatccacagcctgttcagcgaggagacccccgtggtgctgcagctggcccccagcgaggagagagtgtacatggtgggcaaggccaacagcgtgttcgaggacctgagcgtgaccctgagacagctgagaaacagactgttccaggagaacagcgtgctgagcagcctgcccctgaacagcctgagcagaaacaacgaggtggacctgctgttcctgagcgagctgcaggtgctgcacgacatcagcagcctgctgagcagacacaagcacctggccaaggaccacagccccgacctgtacagcctggagctggccggcctggacgagatcggcaagagatacggcgaggacagcgagcagttcagagacgccagcaagatcctggtggacgccctgcagaagttcgccgacgacatgtacagcctgtacggcggcaacgccgtggtggagctggtgaccgtgaagagcttcgacaccagcctgatcagaaagaccagaaccatcctggaggccaagtag

SEQ ID NO: 159104 - DNA, 957 bp, Artificial Sequence
  derived and/or modified sequence
atggccgtgttcgtggtgctgctggccctggtggccggcgtgctgggcaacgagttcagcatcctgaagagccccggcagcgtggtgttcagaaacggcaactggcccatccccggcgagagaatccccgacgtggccgccctgagcatgggcttcagcgtgaaggaggacctgagctggcccggcctggccgtgggcaacctgttccacagacccagagccaccgtgatggtgatggtgaagggcgtgaacaagctggccctgccccccggcagcgtgatcagctaccccctggagaacagagtgtacatggtgggcaaggccaacagcgtgttcgaggacctgagcgtgaccctgagacagctgagaaacagactgttccaggagaacagcgtgctgagcagcctgcccctgaacagcctgagcagaaacaacgaggtggacctgctgttcctgagcgagctgcaggtgctgcacgacatcagcagcctgctgagcagacacaagcacctggccaaggaccacagccccgacctgtacagcctggagctggccggcctggacgagatcggcaagagatacggcgaggacagcgagcagttcagagacgccagcaagatcctggtggacgccctgcagaagttcgccgacgacatgtacagcctgtacggcggcaacgccgtggtggagctggtgaccgtgaagagcttcgacaccagcctgatcagaaagaccagaaccatcctggaggccaagcaggccaagaaccccgccagcccctacaacctggcctacaagtacaacttcgagtacagcgtggtgttcaacatggtgctgtggatcatgatcgccctggccctggccgtgatcatcaccagctacaacatctggaacatggaccccggctacgacagcatcatctacagaatgaccaaccagaagatcagaatggactag

SEQ ID NO: 159105 - DNA, 819 bp, Artificial Sequence
  derived and/or modified sequence
atggccgtgttcgtggtgctgctggccctggtggccggcgtgctgggcaacgagttcagcatcctgaagagccccggcagcgtggtgttcagaaacggcaactggcccatccccggcgagagaatccccgacgtggccgccctgagcatgggcttcagcgtgaaggaggacctgagctggcccggcctggccgtgggcaacctgttccacagacccagagccaccgtgatggtgatggtgaagggcgtgaacaagctggccctgccccccggcagcgtgatcagctaccccctggagaacgtggacctgctgttcctgagcgagctgcaggtgctgcacgacatcagcagcctgctgagcagacacaagcacctggccaaggaccacagccccgacctgtacagcctggagctggccggcctggacgagatcggcaagagatacggcgaggacagcgagcagttcagagacgccagcaagatcctggtggacgccctgcagaagttcgccgacgacatgtacagcctgtacggcggcaacgccgtggtggagctggtgaccgtgaagagcttcgacaccagcctgatcagaaagaccagaaccatcctggaggccaagcaggccaagaaccccgccagcccctacaacctggcctacaagtacaacttcgagtacagcgtggtgttcaacatggtgctgtggatcatgatcgccctggccctggccgtgatcatcaccagctacaacatctggaacatggaccccggctacgacagcatcatctacagaatgaccaaccagaagatcagaatggactag

SEQ ID NO: 159106 - DNA, 498 bp, Artificial Sequence
  derived and/or modified sequence
atggccgtgttcgtggtgctgctggccctggtggccggcgtgctgggcaacgagttcagcatcctgaagagccccggcagcgtggtgttcagaaacggcaactggcccatccccggcgagagaatccccgacgtggccgccctgagcatgggcttcagcgtgaaggaggacctgagctggcccggcctggccgtgggcaacctgttccacagacccagagccaccgtgatggtgatggtgaagggcgtgaacaagctggccctgccccccggcagcgtgatcagctaccccctggagaacgccgtgcccttcagcctggacagcgtggccaacagcatccacagcctgttcagcgaggagacccccgtggtgctgcagctggcccccagcgaggagagagtgtacatggtgggcaccatgaagctgacctgcagcttcttcctgaactgcaagtgctacatgatcttccaggcctgctgcctggtgatcagcatctag

SEQ ID NO: 159107 - DNA, 825 bp, Artificial Sequence
  derived and/or modified sequence
atggtgatggtgaagggcgtgaacaagctggccctgccccccggcagcgtgatcagctaccccctggagaacgccgtgcccttcagcctggacagcgtggccaacagcatccacagcctgttcagcgaggagacccccgtggtgctgcagctggcccccagcgaggagagagtgtacatggtgggcaaggccaacagcgtgttcgaggacctgagcgtgaccctgagacagctgagaaacagactgttccaggagaacagcgtgctgagcagcctgcccctgaacagcctgagcagaaacaacgaggtggacctgctgttcctgagcgagctgcaggtgctgcacgacatcagcagcctgctgagcagacacaagcacctggccaaggaccacagccccgacctgtacagcctggagctggccggcctggacgagatcggcaagagatacggcgaggacagcgagcagttcagagacgccagcaagatcctggtggacgccctgcagaagttcgccgacgacatgtacagcctgtacggcggcaacgccgtggtggagctggtgaccgtgaagagcttcgacaccagcctgatcagaaagaccagaaccatcctggaggccaagcaggccaagaaccccgccagcccctacaacctggcctacaagtacaacttcgagtacagcgtggtgttcaacatggtgctgtggatcatgatcgccctggccctggccgtgatcatcaccagctacaacatctggaacatggaccccggctacgacagcatcatctacagaatgaccaaccagaagatcagaatggactag

SEQ ID NO: 159108 - protein, 1045 aa, Artificial Sequence
  derived and/or modified sequence
MGEIEQRPTPGSRLGAPENSGISTLERGQKPPPTPSGKLVSIKIQMLDDTQEAFEVPQRAPGKVLLDAVCNHLNLVEGDYFGLEFPDHKKITVWLDLLKPIVKQIRRPKHVVVKFVVKFFPPDHTQLQEELTRYLFALQVKQDLAQGRLTCNDTSAALLISHIVQSEIGDFDEALDREHLAKNKYIPQQDALEDKIVEFHHNHIGQTPAESDFQLLEIARRLEMYGIRLHPAKDREGTKINLAVANTGILVFQGFTKINAFNWAKVRKLSFKRKRFLIKLRPDANSAYQDTLEFLMASRDFCKSFWKICVEHHAFFRLFEEPKPKPKPVLFSRGSSFRFSGRTQKQVLDYVKEGGHKKVQFERKHSKIHSIRSLASQPTELNSEVLEQSQQSTSLTFGEGAESPGGQSCRRGKEPKVSAGEPGSHPSPAPRRSPAGNKQADGAASAPTEEEEEVVKDRTQQSKPQPPQPSTGSLTGSPHLSELSVNSQGGVAPANVTLSPNLSPDTKQASPLISPLLNDQACPRTDDEDEGRRKRFPTDKAYFIAKEVSTTERTYLKDLEVITSWFQSTVSKEDAMPEALKSLIFPNFEPLHKFHTNFLKEIEQRLALWEGRSNAQIRDYQRIGDVMLKNIQGMKHLAAHLWKHSEALEALENGIKSSRRLENFCRDFELQKVCYLPLNTFLLRPLHRLMHYKQVLERLCKHHPPSHADFRDCRAALAEITEMVAQLHGTMIKMENFQKLHELKKDLIGIDNLVVPGREFIRLGSLSKLSGKGLQQRMFFLFNDVLLYTSRGLTASNQFKVHGQLPLYGMTIEESEDEWGVPHCLTLRGQRQSIIVAASSRSEMEKWVEDIQMAIDLAEKSSSPAPEFLASSPPDNKSPDEATAADQESEDDLSASRTSLERQAPHRGNTMVHVCWHRNTSVSMVDFSIAVENQLSGNLLRKFKNSNGWQKLWVVFTNFCLFFYKSHQDNHPLASLPLLGYSLTIPSESENIQKDYVFKLHFKSHVYYFRAESEYTFERWMEVIRSATSSASRPHVLSHKESLVY

SEQ ID NO: 159109 - protein, 360 aa, Artificial Sequence
  derived and/or modified sequence
MASRDFCKSFWKICVEHHAFFRLFEEPKPKPKPVLFSRGSSFRFSGRTQKQVLDYVKEGGHKKVQFERKHSKIHSIRSLASQPTELNSEVLEQSQQSTSLTFGEGAESPGGQSCRRGKEPKVSAGEPGSHPSPAPRRSPAGNKQADGAASAPTEEEEEVVKDRTQQSKPQPPQPSTGSLTGSPHLSELSVNSQGGVAPANVTLSPNLSPDTKQASPLISPLLNDQACPRTDDEDEGRRKRFPTDKAYFIAKEVSTTERTYLKDLEVITSWFQSTVSKEDAMPEALKSLIFPNFEPLHKFHTNFLKEIEQRLALWEGRSNAQIRDYQRIGDVMLKNIQGMKAGVQWRDLGSLQPPPPRFKP

SEQ ID NO: 159110 - protein, 184 aa, Artificial Sequence
  derived and/or modified sequence
  misc_feature (1)..(1): Xaa can be any naturally occurring amino acid
XSLTGSPHLSELSVNSQGGVAPANVTLSPNLSPDTKQASPLISPLLNDQACPRTDDEDEGRRKRFPTDKAYFIAKEVSTTERTYLKDLEVITSWFQSTVSKEDAMPEALKSLIFPNFEPLHKFHTNFLKEIEQRLALWEGRSNAQIRDYQRIGDVMLKNIQGMKAGVQWRDLGSLQPPPPRFKP

SEQ ID NO: 159111 - DNA, 3138 bp, Artificial Sequence
  derived and/or modified sequence
atgggcgagatcgagcagagacccacccccggcagcagactgggcgcccccgagaacagcggcatcagcaccctggagagaggccagaagcccccccccacccccagcggcaagctggtgagcatcaagatccagatgctggacgacacccaggaggccttcgaggtgccccagagagcccccggcaaggtgctgctggacgccgtgtgcaaccacctgaacctggtggagggcgactacttcggcctggagttccccgaccacaagaagatcaccgtgtggctggacctgctgaagcccatcgtgaagcagatcagaagacccaagcacgtggtggtgaagttcgtggtgaagttcttcccccccgaccacacccagctgcaggaggagctgaccagatacctgttcgccctgcaggtgaagcaggacctggcccagggcagactgacctgcaacgacaccagcgccgccctgctgatcagccacatcgtgcagagcgagatcggcgacttcgacgaggccctggacagagagcacctggccaagaacaagtacatcccccagcaggacgccctggaggacaagatcgtggagttccaccacaaccacatcggccagacccccgccgagagcgacttccagctgctggagatcgccagaagactggagatgtacggcatcagactgcaccccgccaaggacagagagggcaccaagatcaacctggccgtggccaacaccggcatcctggtgttccagggcttcaccaagatcaacgccttcaactgggccaaggtgagaaagctgagcttcaagagaaagagattcctgatcaagctgagacccgacgccaacagcgcctaccaggacaccctggagttcctgatggccagcagagacttctgcaagagcttctggaagatctgcgtggagcaccacgccttcttcagactgttcgaggagcccaagcccaagcccaagcccgtgctgttcagcagaggcagcagcttcagattcagcggcagaacccagaagcaggtgctggactacgtgaaggagggcggccacaagaaggtgcagttcgagagaaagcacagcaagatccacagcatcagaagcctggccagccagcccaccgagctgaacagcgaggtgctggagcagagccagcagagcaccagcctgaccttcggcgagggcgccgagagccccggcggccagagctgcagaagaggcaaggagcccaaggtgagcgccggcgagcccggcagccaccccagccccgcccccagaagaagccccgccggcaacaagcaggccgacggcgccgccagcgcccccaccgaggaggaggaggaggtggtgaaggacagaacccagcagagcaagccccagcccccccagcccagcaccggcagcctgaccggcagcccccacctgagcgagctgagcgtgaacagccagggcggcgtggcccccgccaacgtgaccctgagccccaacctgagccccgacaccaagcaggccagccccctgatcagccccctgctgaacgaccaggcctgccccagaaccgacgacgaggacgagggcagaagaaagagattccccaccgacaaggcctacttcatcgccaaggaggtgagcaccaccgagagaacctacctgaaggacctggaggtgatcaccagctggttccagagcaccgtgagcaaggaggacgccatgcccgaggccctgaagagcctgatcttccccaacttcgagcccctgcacaagttccacaccaacttcctgaaggagatcgagcagagactggccctgtgggagggcagaagcaacgcccagatcagagactaccagagaatcggcgacgtgatgctgaagaacatccagggcatgaagcacctggccgcccacctgtggaagcacagcgaggccctggaggccctggagaacggcatcaagagcagcagaagactggagaacttctgcagagacttcgagctgcagaaggtgtgctacctgcccctgaacaccttcctgctgagacccctgcacagactgatgcactacaagcaggtgctggagagactgtgcaagcaccacccccccagccacgccgacttcagagactgcagagccgccctggccgagatcaccgagatggtggcccagctgcacggcaccatgatcaagatggagaacttccagaagctgcacgagctgaagaaggacctgatcggcatcgacaacctggtggtgcccggcagagagttcatcagactgggcagcctgagcaagctgagcggcaagggcctgcagcagagaatgttcttcctgttcaacgacgtgctgctgtacaccagcagaggcctgaccgccagcaaccagttcaaggtgcacggccagctgcccctgtacggcatgaccatcgaggagagcgaggacgagtggggcgtgccccactgcctgaccctgagaggccagagacagagcatcatcgtggccgccagcagcagaagcgagatggagaagtgggtggaggacatccagatggccatcgacctggccgagaagagcagcagccccgcccccgagttcctggccagcagcccccccgacaacaagagccccgacgaggccaccgccgccgaccaggagagcgaggacgacctgagcgccagcagaaccagcctggagagacaggccccccacagaggcaacaccatggtgcacgtgtgctggcacagaaacaccagcgtgagcatggtggacttcagcatcgccgtggagaaccagctgagcggcaacctgctgagaaagttcaagaacagcaacggctggcagaagctgtgggtggtgttcaccaacttctgcctgttcttctacaagagccaccaggacaaccaccccctggccagcctgcccctgctgggctacagcctgaccatccccagcgagagcgagaacatccagaaggactacgtgttcaagctgcacttcaagagccacgtgtactacttcagagccgagagcgagtacaccttcgagagatggatggaggtgatcagaagcgccaccagcagcgccagcagaccccacgtgctgagccacaaggagagcctggtgtactag

SEQ ID NO: 159112 - DNA, 1083 bp, Artificial Sequence
  derived and/or modified sequence
atggccagcagagacttctgcaagagcttctggaagatctgcgtggagcaccacgccttcttcagactgttcgaggagcccaagcccaagcccaagcccgtgctgttcagcagaggcagcagcttcagattcagcggcagaacccagaagcaggtgctggactacgtgaaggagggcggccacaagaaggtgcagttcgagagaaagcacagcaagatccacagcatcagaagcctggccagccagcccaccgagctgaacagcgaggtgctggagcagagccagcagagcaccagcctgaccttcggcgagggcgccgagagccccggcggccagagctgcagaagaggcaaggagcccaaggtgagcgccggcgagcccggcagccaccccagccccgcccccagaagaagccccgccggcaacaagcaggccgacggcgccgccagcgcccccaccgaggaggaggaggaggtggtgaaggacagaacccagcagagcaagccccagcccccccagcccagcaccggcagcctgaccggcagcccccacctgagcgagctgagcgtgaacagccagggcggcgtggcccccgccaacgtgaccctgagccccaacctgagccccgacaccaagcaggccagccccctgatcagccccctgctgaacgaccaggcctgccccagaaccgacgacgaggacgagggcagaagaaagagattccccaccgacaaggcctacttcatcgccaaggaggtgagcaccaccgagagaacctacctgaaggacctggaggtgatcaccagctggttccagagcaccgtgagcaaggaggacgccatgcccgaggccctgaagagcctgatcttccccaacttcgagcccctgcacaagttccacaccaacttcctgaaggagatcgagcagagactggccctgtgggagggcagaagcaacgcccagatcagagactaccagagaatcggcgacgtgatgctgaagaacatccagggcatgaaggccggcgtgcagtggagagacctgggcagcctgcagccccccccccccagattcaagccctag

SEQ ID NO: 159113 - DNA, 555 bp, Artificial Sequence
  derived and/or modified sequence
tgaagcctgaccggcagcccccacctgagcgagctgagcgtgaacagccagggcggcgtggcccccgccaacgtgaccctgagccccaacctgagccccgacaccaagcaggccagccccctgatcagccccctgctgaacgaccaggcctgccccagaaccgacgacgaggacgagggcagaagaaagagattccccaccgacaaggcctacttcatcgccaaggaggtgagcaccaccgagagaacctacctgaaggacctggaggtgatcaccagctggttccagagcaccgtgagcaaggaggacgccatgcccgaggccctgaagagcctgatcttccccaacttcgagcccctgcacaagttccacaccaacttcctgaaggagatcgagcagagactggccctgtgggagggcagaagcaacgcccagatcagagactaccagagaatcggcgacgtgatgctgaagaacatccagggcatgaaggccggcgtgcagtggagagacctgggcagcctgcagccccccccccccagattcaagccctag

SEQ ID NO: 159114 - DNA, 4855 bp, Artificial Sequence
  derived and/or modified sequence
gcgacccggagcccgctccccacccaccccgcctgctccgccctcccctccgccccgcgccacctttgatggctcggacctcagccggccaccgccagccctgctcgcgcgcccgcgccgccgccgcccgcgggtattaatagccggcgccgccgcgccctcggccgccgggggcttgggagccgccgatcccggagcccgagccgggagagggagccgccgcagccgccggcgctgtggagatattctctaagccgctttcatcatgggagaaatagagcagaggccgaccccaggatcacgactgggggccccggaaaattcggggatcagtaccttggaacgtggacagaagccgcccccaacaccttcaggaaaactcgtgtccatcaaaatccagatgctggatgacacccaggaggcatttgaagttccacaaagagctcctgggaaggtgctgctggatgcagtttgcaaccacctcaacctcgtggaaggtgactattttggcctcgagtttcctgatcacaaaaagatcacggtgtggctggatctcctaaaacccattgtgaaacagattagaaggccaaagcacgttgttgttaagtttgtggtgaaattctttccgcctgaccacacacaactccaagaagaactcacaaggtacctgttcgcgctgcaggtgaagcaggacttggctcaaggcaggttgacgtgtaatgacaccagcgcagctctcttgatttcacacattgtgcaatctgagattggggattttgatgaagccttggacagagagcacttagcaaaaaataaatacatacctcagcaagacgcactagaggacaaaatcgtggaatttcaccataaccacattggacaaacaccagcagaatcagatttccagctcctagagattgcccgtcggctagagatgtatggaatccggttgcacccggccaaggacagggaaggcacgaagatcaatctggccgttgccaacacgggaattctagtgtttcagggtttcactaagatcaatgccttcaactgggccaaggtgcggaagctgagcttcaagaggaagcgctttctcatcaagctccggccagatgccaatagtgcgtaccaggataccttggaattcctgatggccagtcgggatttctgcaagtccttctggaaaatctgtgttgaacatcatgccttctttagactttttgaagagcccaaaccaaagcccaagcccgtcctctttagccgggggtcatcatttcggttcagtggtcggactcagaagcaggttctcgactatgttaaagaaggaggacataagaaggtgcagtttgaaaggaagcacagcaagattcattctatccggagccttgcttcacagcctacagaactgaattcggaagtgctggagcagtctcagcagagcaccagccttacatttggagaaggtgccgaatctccagggggccagagctgccggcgaggaaaggaaccgaaggtttccgccggggagccggggtcgcacccgagccctgcgccgaggagaagccccgcgggtaacaagcaggcggacggagccgcctcggcgcccacggaggaagaggaggaggtcgttaaggataggacccagcagagtaaacctcagcccccgcagccaagcacaggctccctgactggcagtcctcacctttccgagctgtctgtgaactcgcaggggggagtggcccctgccaacgtgaccttgtctcccaacctgagccccgacaccaagcaggcctctcccttgatcagcccgctgctgaatgaccaggcctgcccccggacggacgatgaggatgagggccggaggaagagattcccaactgataaagcgtacttcatagctaaggaagtgtctaccaccgagcgaacatatctgaaggatctcgaagttatcacttcgtggtttcagagcacagtgagcaaagaggacgccatgccggaagcactgaaaagtctcatattcccgaattttgaacctttgcacaaatttcatactaattttctcaaggaaattgagcaacgacttgccctgtgggaaggccgctcaaatgcccaaatcagagattaccaaagaatcggcgatgtcatgctgaagaacattcagggcatgaagcacctggcggctcacctgtggaagcacagcgaggccttggaggccctggagaatggaatcaagagctcccggcggctggagaacttctgcagagactttgagctgcagaaggtgtgttacctaccgctcaacaccttcctcctgcggccactgcaccggctcatgcactacaagcaggtcctggagcggctgtgcaaacaccacccgccgagccacgccgacttcagggactgccgagccgctttggcagagatcacggagatggtggcacagctccacggtacgatgatcaagatggagaatttccagaagctgcacgaactcaagaaagatttgattggcattgacaatcttgtggttccgggaagggagttcatccgtctgggcagcctcagcaagctctcggggaaggggctccagcagcgcatgttcttcctgttcaacgacgtcctgctatacacgagccgggggctgacggcctccaatcagtttaaagtccacgggcagctcccgctctatggcatgacgattgaggagagcgaagacgagtggggggtgccccactgcctgaccctccggggccagcggcagtccatcatcgtggccgccagttctcggtccgagatggagaagtgggttgaggacatccagatggccattgacctggcggagaagagcagcagccccgcccctgagttcctggccagcagcccccctgacaacaagtcccctgatgaagccaccgcggctgaccaggagtcagaggatgacctgagcgcctcgcgcacatcgctggagcgccaggccccgcaccgcggcaacacaatggtgcacgtgtgctggcaccgcaacaccagcgtctccatggtggacttcagcatcgcagtggagaatcagttgtctggaaacctgctgaggaaattcaaaaacagcaacgggtggcagaagctgtgggtggtgttcacaaacttctgcctgttcttctacaaatcacaccaggacaatcatccccttgccagcctgcctctgctcggctactcgctcaccatcccctctgagtccgagaacatccagaaagactacgtgttcaagctgcacttcaagtcccacgtctactacttcagggcggaaagcgagtacacgttcgaaaggtggatggaagtgatccgcagtgccaccagctctgcctcgcgaccccacgtgttgagtcacaaagagtctcttgtgtattgatggccggacacactcgtttccgcagtggctgctttcctggaagacgtttcctttcttctgtattaatgaagcctggtaaaattaacacctgtctgaaaatcaaaaacatggcttcccagcagctctcctgtctccacagccgcgttttttaaccccgacctctcagcgtctgaatgaacagcgctcccacctccagtcctggcatccgctgggggcgctgttctttagctagtgccagtattaaaacattgtcattacgagagtgccaaatgacatcttccctccaccctgcccctgaaaaacagtacacacacatccgttcaacacaagacagggcaagtgtttttcttcctaaaaaaagttctttcttttattattttcacctattggctgctgcattttacgaagtggacttcccggtgtttgtttgtttgtttgcaatacactcagtgcagccttaagcaaatgagatcattttcagatttcattttttttttcagtctttctacttttgtaataataggaagttagtaggactcacttctctgattaataagcaatttgcagcacacagcgttccactgcggggtttcacgctcacctgaaaacacctgttcccaacctacttcttggtgcaagttgaccaaatcgttttaagtggtaactctttccaaccgtagcagggttgttttctgttaagcaaagccgagatccagtgcaatacctggactgtcaccgtcctgtgagtggtgtacacaatgggaagataataagccgtggtgttttgctgtctgtctgtgtcacaagcatgaaaacccgtgtgtcattgatcagcaccatttgtggtatgttccgtgatgagcgtttagtgagcctgctggctgcagagcactatgaaatcatggtacgtagtccccggcacctgtcgttattcctatatcctcctgcaactgtggtttgaaactgcgcattctctagtagtatatatcgtgcctgtcttcaaaaacatttccctttttatactcattccccccaggcatggggtagtgtcagtcggactgcacagggaacacggtttccagtggctttggcccctactcgggaaacgtctgcctgttctcgatggtgatggggtggctgccattcccttggttttcctaagccctttctaacgagagtctcaaacaagcggaggcgagggccaattcaaccccattctttccagcgccccgcaccatagcacctgcccacctgagaaccaggaacgcaccctctctgtggagctctgactggtgtagctggaaacaaacagcaacttgcaaacggacgaagagcctgccgtgtgttaatcatttgccttacaagatgtaccagacggtttccagtactaacaaagggaataaaaatacctcacgccacaatccagcatattgatgttttaaggcaaaacaa

SEQ ID NO: 159115 - DNA, 550 bp, Artificial Sequence
  derived and/or modified sequence
gctccctgactggcagtcctcacctttccgagctgtctgtgaactcgcaggggggagtggcccctgccaacgtgaccttgtctcccaacctgagccccgacaccaagcaggcctctcccttgatcagcccgctgctgaatgaccaggcctgcccccggacggacgatgaggatgagggccggaggaagagattcccaactgataaagcgtacttcatagctaaggaagtgtctaccaccgagcgaacatatctgaaggatctcgaagttatcacttcgtggtttcagagcacagtgagcaaagaggacgccatgccggaagcactgaaaagtctcatattcccgaattttgaacctttgcacaaatttcatactaattttctcaaggaaattgagcaacgacttgccctgtgggaaggccgctcaaatgcccaaatcagagattaccaaagaatcggcgatgtcatgctgaagaacattcagggcatgaaggctggagtgcaatggcgcgatctcggctcactgcagcctccgcctcccaggttcaagcc

SEQ ID NO: 159116 - DNA, 3138 bp, Artificial Sequence
  derived and/or modified sequence
atgggcgaaattgagcagaggcccacaccaggttcgaggctgggagcaccggaaaattccggcatcagcacgctggagagaggccagaagccccccccaacgccaagtggaaagctagtgtccatcaagattcagatgctggacgacactcaggaggcattcgaagtgccccaacgggccccaggcaaggtgctcttggatgcggtttgtaaccatcttaatctggtagaaggcgattatttcggacttgagttcccagatcacaaaaagattaccgtatggctcgaccttctgaaaccaatcgtcaagcagattcgtcgtccaaaacacgtagttgtgaaattcgtggtgaaattctttccacccgaccatacccagctgcaggaggagctgacccggtatctctttgcacttcaggtgaagcaggacttggctcagggaaggctgacctgtaacgacacttcagccgccctgttgattagccatatcgtgcaatcagaaatcggagactttgacgaagcccttgatagagaacatctggccaaaaacaagtatatacctcaacaggacgcactcgaggacaagattgtggagttccaccataatcacatagggcaaaccccggccgaatccgattttcaacttctggagatcgcacggcgcttggaaatgtatggcatccggcttcaccctgccaaggatcgcgaggggactaaaatcaacctagccgtagcaaatactggcatattagtgttccagggattcacaaaaatcaacgcattcaactgggccaaggtgagaaagctgtcattcaagagaaagcgattccttattaagctaaggccagacgcaaatagcgcctaccaggataccttggagttcttaatggcgagccgcgatttttgtaagagtttctggaagatctgcgtggaacaccacgccttcttcagactgtttgaagaaccgaagccaaaacccaaacccgtgctgttttcccgaggatcctccttccgattttctgggcgtacccagaagcaggtgctcgattatgtcaaggaaggtgggcacaaaaaggtgcagtttgagcgaaagcacagtaaaattcacagtatcaggagcctcgccagccaacccaccgagttgaacagcgaggtgctagaacagtcacagcagagcactagtctgacattcggagaaggagctgaatcccccggtggtcagtcctgccgccggggaaaggaaccaaaggtcagtgctggcgaaccaggctcacacccctctcccgccccacggagaagcccagctggaaataagcaggctgacggggcagcatcagccccaaccgaagaagaggaagaggtggtaaaggatcgcacccagcagtcaaagccccagccgccccagccttcaacaggaagccttacgggctccccccatctctccgaactgagtgtgaatagtcagggcggagtagctccagctaacgttacactgtcccctaatctctcgcctgacaccaagcaggcatcccccttaatctcacctttgctcaatgatcaggcgtgtccaagaacagatgacgaagacgaagggaggcggaagcggttcccaaccgacaaagcctacttcatcgccaaagaggtaagcactactgaacgtacctacttgaaagatctcgaggtaattactagctggtttcagagcacggtatcgaaggaggacgctatgcctgaggctctcaagagcctgatctttccgaattttgagccactccacaagttccacaccaactttctcaaagagattgagcagcgactggctctctgggaagggagaagcaacgcgcaaattcgagactatcagcgcatcggcgacgtaatgctgaaaaacatccagggaatgaagcacttggcagctcatctgtggaagcacagcgaggctctggaagcccttgaaaatggcataaagagctcccggagactcgaaaatttctgccgcgatttcgagctgcagaaagtgtgctacctccccctcaacacctttcttttaaggccgcttcatcgacttatgcattataaacaggtgctggaaagactgtgtaagcatcatcccccatctcatgcagatttccgggactgtagagctgctctggccgaaatcacggaaatggtagctcagctgcacgggaccatgatcaaaatggagaacttccagaagctccacgagctgaaaaaagacctaatcggcattgacaatctggtggtgccaggccgcgaattcatacgcctgggatccctgagcaagctgtctggaaaaggcctccaacagcgaatgttctttttgtttaacgatgtgttactttacaccagtcgcggtcttacggcgagcaaccagtttaaggtccacggccaactccctctctacggcatgacaattgaagagagtgaggatgaatggggtgtgccgcattgtttgacattgcgggggcagcggcagtctataatcgtagcagctagctccagatcagagatggagaagtgggtcgaagatattcagatggccatcgatctcgccgagaaaagctctagtccagcaccggagtttctggcttcctcgcccccagataacaagtcgccggacgaggctacagctgccgatcaggaatctgaggatgacctcagtgcctcacggactagcctcgaaagacaagcaccccacagaggtaataccatggtccatgtctgctggcacagaaacaccagtgtctctatggtagactttagcatagctgttgaaaatcagctgagcggaaacctgctgcggaagtttaaaaactcaaacggatggcagaagctttgggtggtgttcactaacttctgcctgtttttttacaagtcacaccaggataatcatcccctcgcttcgctgccactgcttggatacagtctcaccatcccatcagagtcagagaacatccagaaggattacgtgtttaaactacacttcaaaagtcatgtgtactacttcagagctgaaagcgaatacacatttgagaggtggatggaggtgatccgctccgctacgtctagtgcatctcggcctcatgtactgtctcataaggaatccctcgtctattag

SEQ ID NO: 159117 - DNA, 1083 bp, Artificial Sequence
  derived and/or modified sequence
atggccagccgcgatttctgcaaaagcttctggaaaatctgcgttgaacatcacgctttctttcgcctgtttgaagaacccaaacccaaacccaagcccgtgttgttcagcagggggtcttcatttagattttccggccgtacccagaaacaagtgctggattacgtgaaggagggaggtcacaagaaggtccagttcgaacgcaagcattccaaaatccacagcattcgctccttggctagccagcctaccgaactgaacagcgaagtgctcgagcagtcccaacaatcaacttctttgactttcggcgaaggtgctgagagccctggaggacagtcatgtaggcgcggtaaggagccaaaagtaagtgctggcgagcccggaagccacccctccccagctcctcggcgcagccctgctggcaataagcaggccgatggagccgccagtgctccgaccgaagaggaagaagaggtagtgaaggatcggacccagcagtcaaagcctcagcctccacagccatcaacaggctccttgactgggtcccctcatctatccgagctgtctgtcaactcacagggcggggtggccccagccaatgtgaccctgagccccaacttgagcccagataccaagcaagcctctccgttgatttctccccttctgaatgatcaggcctgtcccagaaccgacgacgaggacgaagggcggcgaaaaagatttccgacggataaggcctatttcattgcaaaagaggtgagcacaaccgaacggacttacctcaaggatctcgaggtgatcacttcgtggtttcagagcaccgtgtccaaggaagacgccatgcccgaagccctaaagtccctcatctttcccaattttgagcccttacataagttccatacaaatttcctcaaggagattgaacagcgactcgccctctgggaaggaaggtcgaatgctcaaataagagattaccagcggattggtgacgtcatgttgaaaaatatccagggaatgaaggccggcgtccagtggcgcgatctcggatctttgcagccgcccccacctcgctttaagccatag

SEQ ID NO: 159118 - DNA, 555 bp, Artificial Sequence
  derived and/or modified sequence
taaagcctgactggcagccctcatctgtccgaactcagcgtgaattcacagggaggcgtggctccggcaaatgtgactcttagccctaatttgtccccagacacaaagcaggccagtcctctgatctctcctctactgaacgatcaggcctgtcccaggacggatgacgaagacgagggccggagaaagcgcttccctacagacaaagcttactttatcgccaaggaggtgtctacgaccgaaagaacctatctgaaggacctggaagtgataacgtcgtggtttcagagtactgtgtctaaagaagacgccatgccagaagcactaaaaagtctcatctttcctaactttgagccattacacaagtttcataccaacttcctcaaggaaatcgaacaaagactggctctctgggaaggcagatccaatgcgcagatcagggactaccaacgaatcggtgatgtgatgctgaaaaatattcagggaatgaaggctggagtgcagtggcgggacttggggtccctacagccgccaccaccacggttcaagccctag

SEQ ID NO: 159119 - DNA, 3138 bp, Artificial Sequence
  derived and/or modified sequence
atgggagaaattgagcagaggcccaccccaggcagccggctgggcgcccctgagaacagcggcatcagcaccctggagcggggccagaagcccccacccacccccagcggcaagctggtgtccatcaagatccagatgctggatgacacccaggaggcctttgaggtgccccagagggcccctgggaaggtgctgctggatgctgtgtgcaaccacctgaacctggtggagggggactacttcggcctggagttcccagaccacaagaagatcaccgtgtggctggacctgctgaagcccatcgtgaagcagatccggcggcccaagcacgtggtggtgaagtttgtggtgaagttcttccccccagaccacacccagctgcaggaggagctgacccgctacctgtttgccctgcaggtgaagcaggacctggcccagggccgcctgacctgcaatgacaccagcgctgccctgctgatcagccacatcgtgcagagcgagatcggggactttgatgaggccctggaccgggagcacctggccaagaacaagtacatcccccagcaggatgccctggaggacaagatcgtggagttccaccacaaccacatcggccagaccccagctgagagtgacttccagctgctggagatcgcccggcggctggagatgtatggcatccggctgcacccagccaaggaccgggagggcaccaagatcaacctggccgtggccaacacaggcatcctggtgttccagggcttcaccaagatcaatgccttcaactgggccaaggtgaggaagctgtccttcaagaggaagcgcttcctgatcaagctgcggccagatgccaacagcgcctaccaggacaccctggagttcctgatggccagccgggacttctgcaagagcttctggaagatctgtgtggagcaccacgccttcttccggctgtttgaggagcccaagcccaagcccaagcctgtgctcttcagccggggcagcagcttccgcttcagcggccgcacccagaagcaggtgctggactatgtgaaggagggcggccacaagaaggtgcagtttgagaggaagcacagcaagatccacagcatccgcagcctggccagccagcccacagagctgaacagcgaggtgctggagcagagccagcagagcaccagcctgacctttggagagggcgctgagagccctgggggccagagctgccggcggggcaaggagcccaaggtgtctgctggggagcccggcagccaccccagccctgcccccaggaggagccctgctggcaacaagcaggctgatggagctgccagcgcccccacagaggaggaggaggaggtggtgaaggacaggacccagcagagcaagccccagcccccccagcccagcacaggcagcctgaccggcagcccccacctgtctgagctgtctgtgaacagccagggcggcgtggccccagccaacgtgaccctgagccccaacctgagcccagacaccaagcaggccagccccctcatcagccccctgctgaatgaccaggcctgccccaggacagatgatgaagatgagggccgcaggaagcgcttccccacagacaaggcctacttcatcgccaaggaggtgtccaccacagagaggacctacctgaaggacctggaggtgatcacctcctggttccagagcacagtgtccaaagaagatgccatgcctgaggccctgaagagcctcatcttccccaactttgagcccctgcacaagttccacaccaacttcctgaaggagattgagcagaggctggccctgtgggagggccgcagcaatgcccagatccgggactaccagagaattggagatgtgatgctgaagaacatccagggcatgaagcacctggccgcccacctgtggaagcacagcgaggccctggaggccctggagaatggcatcaagagcagccggcggctggagaacttctgccgggactttgagctgcagaaggtgtgctacctgcccctgaacaccttcctgctgcggcccctgcaccggctgatgcactacaagcaggtgctggagcggctgtgcaagcaccacccccccagccacgccgacttccgggactgcagagctgccctggccgagatcacagagatggtggcccagctgcacggcaccatgatcaagatggagaacttccagaagctgcacgagctgaagaaggacctgattggcatcgacaacctggtggtgcccggccgggagttcatccggctgggcagcctgagcaagctgagcggcaagggcctgcagcagaggatgttcttcctgttcaatgatgtgctgctgtacaccagccggggcctgacagccagcaaccagttcaaggtgcacggccagctgcccctgtatggcatgaccatcgaggagagtgaagatgagtggggcgtgccccactgcctgaccctgcggggccagaggcagagcatcatcgtggccgccagcagccgctctgagatggagaagtgggtggaggacatccagatggccatcgacctggccgagaagagcagcagccctgcccctgagttcctggccagcagccccccagacaacaagagcccagatgaggccacagctgctgaccaggagagtgaagatgacctgagcgccagcaggaccagcctggagcggcaggccccccaccggggcaacaccatggtgcacgtgtgctggcacaggaacacctctgtgtccatggtggacttcagcattgctgtggagaaccagctgagcggcaacctgctgaggaagttcaagaacagcaatggctggcagaagctgtgggtggtgttcaccaacttctgcctcttcttctacaagagccaccaggacaaccaccccctggccagcctgcccctgctgggctacagcctgaccatccccagcgagagcgagaacatccagaaggactatgtgttcaagctgcacttcaagagccacgtgtactacttccgggcagagagcgagtacacctttgagcgctggatggaggtgatccgcagcgccaccagcagcgccagccggccccacgtgctgagccacaaggagagcctggtgtactag

SEQ ID NO: 159120 - DNA, 1083 bp, Artificial Sequence
  derived and/or modified sequence
atggccagccgggacttctgcaagagcttctggaagatctgtgtggagcaccacgccttcttccggctgtttgaggagcccaagcccaagcccaagcctgtgctcttcagccggggcagcagcttccgcttcagcggccgcacccagaagcaggtgctggactatgtgaaggagggcggccacaagaaggtgcagtttgagaggaagcacagcaagatccacagcatccgcagcctggccagccagcccacagagctgaacagcgaggtgctggagcagagccagcagagcaccagcctgaccttcggggagggcgctgagagccctgggggccagagctgcagaagaggcaaggagcccaaggtgtctgctggggagcccggcagccaccccagccctgccccccggcgcagccctgctggcaacaagcaggctgatggagctgccagcgcccccacagaggaggaggaggaggtggtgaaggacaggacccagcagagcaagccccagcccccccagcccagcacaggcagcctgaccggcagcccccacctgtctgagctgtctgtgaacagccagggcggcgtggccccagccaacgtgaccctgagccccaacctgagcccagacaccaagcaggccagccccctcatcagccccctgctgaatgaccaggcctgccccaggacagatgatgaagatgagggccgcaggaagcgcttccccacagacaaggcctacttcatcgccaaggaggtgtccaccacagagaggacctacctgaaggacctggaggtgatcacctcctggttccagagcacagtgtccaaggaggatgccatgcctgaggccctgaagagcctcatcttccccaactttgagcccctgcacaagttccacaccaacttcctgaaggagattgagcagaggctggccctgtgggagggccgcagcaatgcccagatccgggactaccagagaattggagatgtgatgctgaagaacatccagggcatgaaggccggcgtgcagtggagggacctgggcagcctgcagcccccaccaccccgcttcaagccctag

SEQ ID NO: 159121 - DNA, 555 bp, Artificial Sequence
  derived and/or modified sequence
tgaagcctgaccggcagcccccacctgtctgagctgtctgtgaacagccagggcggcgtggccccagccaacgtgaccctgagccccaacctgagcccagacaccaagcaggccagccccctcatcagccccctgctgaatgaccaggcctgccccaggacagatgatgaagatgagggccgcaggaagcgcttccccacagacaaggcctacttcatcgccaaggaggtgtccaccacagagaggacctacctgaaggacctggaggtgatcacctcctggttccagagcacagtgtccaaggaggatgccatgcctgaggccctgaagagcctcatcttccccaactttgagcccctgcacaagttccacaccaacttcctgaaggagattgagcagaggctggccctgtgggagggccgcagcaatgcccagatccgggactaccagagaattggagatgtgatgctgaagaacatccagggcatgaaggccggcgtgcagtggagggacctgggcagcctgcagcccccaccaccccgcttcaagccctag

SEQ ID NO: 159122 - DNA, 3138 bp, Artificial Sequence
  derived and/or modified sequence
atgggcgagatcgagcagcggcccacccccggcagccggctgggcgccccggagaattccggaatctccacgttggagcggggccagaagccccctcccaccccctccggaaaactggtgtctataaagatacaaatgcttgatgacacgcaagaggcgttcgaagtgccccaaagggcacctggaaaggtcttgctggacgctgtatgcaatcacctcaacctggtggagggcgactattttggcctggagttccctgatcataagaagatcaccgtgtggctggacttactgaaacctattgtaaaacagatcagaaggcctaaacacgtcgtggtcaaattcgtggtcaagttcttccctccagaccacacccagctccaggaggagctgacccgctacctgttcgccttacaggtcaaacaggacctcgctcagggcagactgacatgcaacgatacgagcgccgctcttctcataagccatatcgtccagagcgagatcggagattttgacgaggcattggaccgagaacatctcgcgaaaaacaaatacatcccccagcaggatgctctggaagataagatagttgagtttcaccataatcatatcggccaaacgcccgcagagagcgattttcagctgttggagatagcgcggagactagaaatgtacggcatccgtttgcaccctgcaaaagatcgagagggaacaaagattaacttggccgtggccaacaccgggatactggtttttcagggattcacaaagatcaatgccttcaactgggccaaggtgaggaagctgtcctttaagcgtaagcgttttctcatcaagcttcgaccagatgccaactcggcatatcaagatactctggagttcctcatggccagtagggacttctgcaaatctttttggaaaatttgtgttgaacatcatgctttctttagactcttcgaggaacctaaacccaaacccaagccggtgctctttagccggggctcctcatttagattttcagggcggacccagaagcaggtgttggactacgtgaaggagggggggcataaaaaggttcagttcgaacggaaacacagtaagatacacagcataagaagccttgcctctcagccaactgaattgaattcagaggttttggagcagtctcaacagagcactagcctgaccttcggagagggcgcggaatcgcccggtgggcaatcctgccggcgtggtaaggagcccaaggtgagtgctggcgagcccgggagccacccctccccagcaccccgcaggtcaccagccgggaataagcaggccgacggagctgcaagcgctccaaccgaggaagaagaggaagtggtcaaggacaggacccagcagtcgaagccgcagccgccgcagccctcgaccggatccctcacaggaagcccccacctgtcagaactatccgtcaactctcagggaggcgtagcccccgccaacgtgactctttcaccaaacctttccccggatacaaagcaggccagtcctctgatcagtccactgctgaacgatcaagcttgtcctcggaccgatgacgaggatgagggaagacggaagcgctttcccacagacaaggcttacttcatcgctaaagaggtctctaccacagaacgcacttatctgaaggatcttgaggttatcacttcatggttccagtctactgtgtccaaggaagacgccatgcctgaggctctcaagtccctcatcttccctaactttgagcccctacacaaattccatactaactttctcaaagaaattgagcaacgcttagcactttgggagggccgaagcaatgcccagatcagggactatcaacggatcggcgacgtgatgcttaagaatattcagggcatgaaacacctggctgcccatctctggaagcactctgaggctctcgaagctcttgagaatggcatcaaatccagcagaaggctggaaaatttttgtagagatttcgagcttcaaaaagtgtgctacctgcctcttaacacatttctattgcggccattgcacagacttatgcattacaagcaggttttggagcgcttgtgtaagcaccatcctcctagtcacgctgacttcagggattgccgagccgctctggctgaaatcactgagatggttgctcagctgcatggcacaatgattaagatggagaacttccagaaactccacgaactcaagaaagacctgatcggtattgacaacctagtggtccctggccgcgaattcatccgactcggctcgctgagtaagcttagcgggaagggactgcagcagaggatgtttttcctgttcaatgatgtgctgctttacacctctaggggtcttaccgcctccaatcagtttaaagtgcatggccagttaccactgtacggtatgactatagaagaatctgaggatgaatggggcgtaccccactgtttgactctgcgcgggcagcgccagtctatcatcgtcgccgcctccagccgctcagaaatggagaagtgggtcgaagatatccagatggccatcgacctggccgaaaaatcaagtagtcccgcccccgaatttctcgccagcagcccacccgacaacaagagtcctgacgaagctacggccgcggaccaggagtctgaggatgacttgtcagcctctcgcacctcattggaacgacaggctccccacaggggaaatacaatggtgcatgtttgttggcaccgaaacacatccgtgagtatggtagatttcagtatcgctgtcgagaaccagctcagtgggaacttgctccggaaatttaagaattctaatggatggcagaaattgtgggtagtttttacaaatttttgcctctttttctacaaatctcaccaagacaaccaccctttagctagcttacctctcctgggttactctttgaccatacccagcgagtctgaaaacatccaaaaagactatgtgttcaagttgcacttcaaaagccatgtctattatttcagagctgaaagcgagtacacgttcgagaggtggatggaggtgataaggtccgctacttcttccgcttctcggcctcatgtactttcccacaaagaatcccttgtgtactag

SEQ ID NO: 159123 - DNA, 1083 bp, Artificial Sequence
  derived and/or modified sequence
atggccagccgggacttctgcaagagcttctggaagatctgcgtggaacaccacgcattcttcaggttgtttgaagagcctaaacccaaacccaaaccagttttgttctccaggggctccagtttccggttctctgggcgcacccagaagcaggtgctggattacgtgaaagagggcggacacaagaaagtccagtttgagcgcaagcattcaaagattcactctatccggtctctggccagccagcctacggagctcaactccgaggtgctggaacagtcacaacagagtacaagtttgacatttggcgagggtgcggaatcacctgggggacagagctgtaggcgaggaaaagagcctaaggttagcgctggggaaccagggtctcacccttcaccggcgcctagaaggtcccccgcaggaaacaagcaggcagatggcgccgcctccgctccaaccgaggaggaagaggaagtggtcaaagatagaacccagcagtctaaaccacagccacctcagccatctaccgggtcgttgacgggctccccccatttgtcagaactctctgtgaactcccaaggaggtgtcgctcccgccaacgttactttgtctccaaatctctccccagataccaagcaggcctccccgctgatatcgcctctcctcaacgatcaggcttgtcctaggactgacgatgaagacgaaggtagacggaagcgattccctacagataaagcatattttatcgctaaagaggtgtccactaccgagagaacctacctgaaggatttagaagtcatcacgagttggtttcagtctaccgtgtcaaaagaggatgcgatgccagaggccctgaagtccttgatctttccaaactttgaacctctgcacaaattccatacgaattttttaaaggagattgagcagcgcctggccctgtgggaaggacgttccaacgctcagatcagagattaccagagaataggcgatgtcatgctaaagaatatacagggtatgaaagctggcgttcagtggcgcgacctgggctctttgcagccaccccccccacggttcaaaccctag

SEQ ID NO: 159124 - DNA, 555 bp, Artificial Sequence
  derived and/or modified sequence
tgaagcctgaccggcagcccccacctgagcgagctgagcgtgaacagccaggggggagtcgccccggccaacgtgaccctgtctcctaacttgtcgccggacacaaagcaggcttctcccctaatcagcccactgctgaatgaccaggcatgtccaaggactgatgatgaggacgagggaagaaggaagaggtttccgacagataaggcatattttatagctaaagaggttagtactacggagcgcacctatttaaaggatctcgaggttatcaccagttggtttcagtcaacggttagtaaagaagacgctatgcctgaggcccttaagagtctgatttttccaaatttcgaacccctccacaagtttcacacaaacttcttgaaagaaattgaacagaggctggccctgtgggagggccgttccaatgcgcagattagggactaccagcggattggtgatgtcatgcttaagaatattcaagggatgaaggctggcgtccagtggcgggacctcggatctctacagcccccacctcctaggtttaagccatag

SEQ ID NO: 159125 - DNA, 3138 bp, Artificial Sequence
  derived and/or modified sequence
atgggtgaaatagagcagcgacctacgccaggatctcgcctcggggcacctgagaactccggaattagcacacttgagcgcggtcagaagccaccgcctacaccatcaggaaagctggtcagtattaagattcagatgcttgatgatactcaggaagccttcgaggtacctcagagagctccaggcaaagttcttctggatgcagtatgcaatcacctgaacttggtggagggagattacttcggcctggagttccctgatcataagaagattaccgtgtggcttgacctacttaagccaatagttaagcaaatcaggaggcctaagcatgtggttgtcaaattcgtggtaaagttcttccctcctgaccatacacagcttcaagaggagctcacaagatatctcttcgcccttcaggtcaagcaagatcttgcccaaggccgactcacatgcaacgataccagtgctgcactgctcatatctcatattgtccaatccgagataggggatttcgatgaggccttagaccgagagcacctcgctaagaacaagtatattcctcagcaagatgccctcgaggataaaatcgtggagtttcatcataatcacattggacagacccccgcagagagcgattttcagttgctggagattgctaggcgactcgaaatgtatgggatccgcctgcaccccgcaaaggatagggaggggactaagatcaacctggcggtggccaatactgggatactcgtctttcagggatttacgaaaatcaacgctttcaattgggctaaagtgcgcaagctgagcttcaagcggaaaagattcttgatcaagctcagaccagatgctaactccgcctaccaggacaccttagaattcttgatggctagccgagacttttgcaaatcattttggaaaatttgcgtggagcatcacgcattctttcggcttttcgaggaaccgaaacccaagcctaagcctgttctgttttctcgcggaagctcttttaggttttccgggaggactcagaagcaggtgcttgactacgttaaagaagggggacacaagaaggtccagtttgagagaaaacactcaaagattcacagcatcagaagtctggcttctcagccaactgagcttaattcagaagtactggagcagtctcagcagtctacaagcctcacttttggcgaaggcgctgaaagccccggaggccaatcttgtcgcaggggcaaggaacctaaggtctccgcaggagaacctgggtctcaccccagccccgcaccgagacgcagtccagcaggcaacaagcaagctgacggggcagcctctgctcccacagaagaggaagaagaggtggtcaaagaccgcacgcagcaatctaagccccagccccctcagccatccactggctcactgaccggaagtcctcatctcagcgaactttccgtcaacagtcaaggcggtgtggcccctgcaaatgttacactgagccccaacctgtccccggacactaaacaagcttcccctcttatctctccattgctgaatgatcaagcttgccctagaaccgacgacgaggacgagggcaggaggaagcgctttcccactgataaagcctactttatagctaaagaagtgagcacaacagagagaacttatctgaaggatctggaggtgatcacttcttggtttcagagtaccgtgtctaaggaggacgcgatgcctgaagctttaaaaagccttatctttcctaactttgagcctctccacaaattccacaccaatttcttaaaggaaattgaacaaagactcgccctttgggaaggtcgcagtaacgctcagattagggactaccagcggatcggcgatgtcatgctcaagaacatccagggcatgaagcacctggccgctcacctttggaagcactccgaggcattggaagctcttgaaaacggtattaaaagctcacgccgactcgagaatttctgccgggatttcgagttgcagaaggtctgttacctcccccttaatacctttctgctgagacctctccatcggttgatgcactataaacaggtgttagagaggctgtgcaagcaccaccccccttcgcacgccgactttcgagactgccgcgcagctctagccgaaattaccgaaatggtggcccagctccacggtaccatgataaagatggaaaattttcaaaaacttcatgaactgaaaaaggacctgattggtatagacaacctggtcgtgcccggaagagagttcattcggctgggttcactgtctaaacttagtggcaaaggacttcagcagagaatgttctttctgtttaatgacgtgttgttatacacatccagaggcctgactgccagcaatcagtttaaggtgcacggacagcttccattgtatgggatgacaattgaggagtccgaagatgagtggggggtgccccactgtcttacgctcaggggtcagaggcagagtatcatcgtcgctgcttcttctcgcagtgaaatggaaaaatgggtggaggacatccaaatggctatcgatttggccgaaaagtcgtcaagccctgctcccgagtttttagcatcatcccccccagacaataagagtcctgacgaagcaacagccgctgaccaggagagcgaggacgacctgagcgcctcccggacttctctggagcgccaggcaccacataggggaaacacaatggtgcacgtctgttggcacaggaacacctctgtcagcatggtggacttcagtatcgccgttgaaaaccaacttagcggaaacctcctccgcaaatttaagaatagcaacggctggcagaagctgtgggtggtttttacgaatttttgtctctttttctacaaaagtcaccaggacaaccaccccctggcttctctcccccttctgggctattctcttaccatcccaagcgagtccgaaaacatccaaaaagactatgtcttcaaactgcactttaagtcccatgtgtactatttcagggccgagtccgagtatactttcgagcggtggatggaggtgattcggagtgcaacatcttcagcgtctcggccacatgtgttgtcacataaagagtccctggtatactag

SEQ ID NO: 159126 - DNA, 1083 bp, Artificial Sequence
  derived and/or modified sequence
atggccagccgagacttctgtaagtcattctggaaaatctgcgtggagcaccacgcatttttcaggttgtttgaggagcccaagccaaagccaaagcccgtgcttttctcacgaggatcttcctttcgcttttctggaaggactcagaagcaggtcctcgactatgttaaagaagggggacacaagaaagtccagtttgagaggaagcacagtaagatccatagtataagatccctggcctcccagcccaccgagctgaactcagaagtcttggagcagtctcaacagagcacgagcctgacctttggcgagggcgcagagtcgcccggtggacagtcttgtcgccgaggtaaagagcctaaagtatcggcgggtgaaccaggttcacacccgtccccagcccctcgaagatccccagccggaaataaacaggccgatggcgctgcgagtgctcctaccgaagaggaggaagaagttgtgaaggaccgcacccagcagagcaaaccgcagccaccccagccatcgactggatccctgacaggatccccccacctgtctgaactgagcgtcaactctcagggaggtgtcgcccctgcaaatgttaccctatctcccaatttaagtcctgataccaagcaggccagtcctcttatctctccactgcttaatgatcaggcttgcccccgaacagacgatgaagatgaaggcagacgcaagcggttcccaactgacaaagcctattttattgcgaaggaggtgtcgaccactgagcgcacctatctcaaagacctggaagtcatcacatcttggtttcaatcaaccgtgagcaaagaggatgcgatgccagaggccttgaagtctttaatatttcctaacttcgagccactgcataagttccacactaacttcctcaaggaaatagaacaacgcctagctctgtgggagggcagatctaatgcccagatccgcgactaccagagaatcggagacgtcatgctgaaaaacatccaggggatgaaggccggtgtccagtggagagatctgggtagcctgcagccaccccctcctcggtttaagccttag

SEQ ID NO: 159127 - DNA, 555 bp, Artificial Sequence
  derived and/or modified sequence
tgatctctgactgggtcacctcatctgtcagaactctccgtgaactcccagggaggtgtggcccctgccaatgttaccctgagtccaaacttgagtcccgacacaaagcaagcatcgcccctgatcagtccgctgctaaacgaccaggcgtgcccaagaaccgatgacgaggatgaaggccgtagaaagaggttccccaccgataaagcatatttcattgctaaggaggtcagtacaaccgaaaggacctatcttaaggatctggaggtgattaccagttggtttcagtccaccgttagtaaggaggacgccatgccggaggccttgaagtcactaattttccctaacttcgagccactgcacaagtttcacaccaatttcctgaaggaaatcgagcagaggctcgcgctttgggagggccgtagcaatgcgcaaatacgagattaccaaaggatcggcgatgtgatgctgaagaatatacagggcatgaaagccggagtgcagtggcgggacctgggcagcctgcagcctcctccaccccgttttaaaccatag

SEQ ID NO: 159128 - protein, 487 aa, Artificial Sequence
  derived and/or modified sequence
MASSAEGDEGTVVALAGVLQSGFQELSLNKLATSLGASEQALRLIISIFLGYPFALFYRHYLFYKETYLIHLFHTFTGLSIAYFNFGNQLYHSLLCIVLQFLILRLMGRTITAVLTTFCFQMAYLLAGYYYTATGNYDIKWTMPHCVLTLKLIGLAVDYFDGGKDQNSLSSEQQKYAIRGVPSLLEVAGFSYFYGAFLVGPQFSMNHYMKLVQGELIDIPGKIPNSIIPALKRLSLGLFYLVGYTLLSPHITEDYLLTEDYDNHPFWFRCMYMLIWGKFVLYKYVTCWLVTEGVCILTGLGFNGFEEKGKAKWDACANMKVWLFETNPRFTGTIASFNINTNAWVARYIFKRLKFLGNKELSQGLSLLFLALWHGLHSGYLVCFQMEFLIVIVERQAARLIQESPTLSKLAAITVLQPFYYLVQQTIHWLFMGYSMTAFCLFTWDKWLKVYKSIYFLGHIFFLSLLFILPYIHKAMVPRKEKLKKME

SEQ ID NO: 159129 - DNA, 1464 bp, Artificial Sequence
  derived and/or modified sequence
atggcctctagtgccgagggtgatgaaggcactgtggtggctctggcaggagtgctgcagagtgggtttcaggagctatccctgaacaaactggcaacttccctgggggcgagtgaacaagccttgagacttataatttccatctttctgggataccccttcgcactcttctaccgccattatctattctacaaagagacgtacctgatccacctgttccacacattcaccggcctcagcatagcctacttcaacttcggcaatcaactttatcatagtctgttgtgcatcgtgctgcagttccttatcttacgcttgatgggacgcaccattaccgcagtgttgaccactttctgctttcagatggcttatttactcgccggttactattataccgctaccggtaattacgatattaaatggaccatgcctcactgtgtactaaccctaaagctcatcggcctggctgtggactatttcgacggaggaaaagatcaaaatagtctgagtagcgagcagcaaaagtatgccatcagaggggtccctagcctgctcgaggttgccgggttttcctacttctatggcgcctttctggtgggcccacagttctctatgaatcattatatgaagttagtgcaaggcgaactgatcgatattcctggcaagattcccaattcaataattccagccctgaaaaggctctcactcgggttattctatctggtggggtatacactgctgagtccccacataactgaggactacctgcttacagaggactacgacaaccaccccttctggtttcgctgcatgtatatgctgatttggggcaaattcgttctgtataaatatgttacctgctggctggtcaccgaaggcgtgtgtatactcacaggattaggatttaacggatttgaagagaaaggcaaggccaagtgggacgcctgcgccaatatgaaagtgtggctattcgaaaccaatcccagattcaccggaacaatcgcatcattcaatattaatacaaatgcttgggtcgcgaggtacatctttaagcggctcaaatttctggggaataaagagctgtctcagggtctctccttgctcttcttagccctttggcatggcttacactccggttacctggtgtgtttccaaatggagtttctgattgtgattgtcgaaaggcaagccgcccgtctgattcaagagagccccacactgtcgaagcttgccgccataactgtcctgcagcccttttactacctcgtgcagcagactattcattggctgttcatggggtattcgatgactgccttctgcttgttcacatgggataagtggctgaaggtgtacaagtccatttacttcctgggccacatcttctttttgtccctacttttcattcttccgtatatacacaaggcaatggttccaaggaaagagaagctgaagaagatggagtag

SEQ ID NO: 159130 - DNA, 1464 bp, Artificial Sequence
  derived and/or modified sequence
atggccagcagcgcagaaggagatgagggcaccgtggtggccctggccggcgtgctgcagagcggcttccaggagctgagcctgaacaagctggccaccagcctgggcgccagcgagcaggccctgcggctcatcatcagcatcttcctgggctacccctttgccctcttctaccgccactacctgttctacaaggagacctacctgatccacctgttccacaccttcaccggcctgagcatcgcctacttcaactttggaaaccagctgtaccacagcctgctgtgcatcgtgctgcagttcctgatcctgcggctgatgggccgcaccatcacagctgtgctgaccaccttctgcttccagatggcctacctgctggccggctactactacacagccaccggcaactatgacatcaagtggaccatgccccactgtgtgctgaccctgaagctgattggcctggccgtggactactttgatggcggcaaggaccagaacagcctgagcagcgagcagcagaagtatgccatccggggcgtgcccagcctgctggaggtggccggcttctcctacttctacggggccttcctggtgggcccccagttctccatgaaccactacatgaagctggtgcagggcgagctgattgacatccctgggaagatccccaacagcatcatcccagccctgaagaggctgagcctgggcctcttctacctggtgggctacaccctgctgagcccccacatcacagaggactacctgctgacagaagattatgacaaccaccccttctggttccgctgcatgtacatgctgatctggggcaagtttgtgctgtacaagtatgtgacctgctggctggtgacagaaggagtgtgcatcctgaccggcctgggcttcaatggatttgaggagaagggcaaggccaagtgggatgcctgtgccaacatgaaggtgtggctgtttgagaccaacccccgcttcaccggcaccatcgccagcttcaacatcaacaccaatgcctgggtggcccgctacatcttcaagaggctgaagttcctgggcaacaaggagctgagccagggcctgagcctgctcttcctggccctgtggcacggcctgcacagcggctacctggtgtgcttccagatggagttcctgattgtcatcgtggagcggcaggccgcccggctcatccaggagagccccaccctgagcaagctggccgccatcaccgtgctgcagcccttctactacctggtgcagcagaccatccactggctgttcatgggctacagcatgacagccttctgcctcttcacctgggacaagtggctgaaggtgtacaagagcatctacttcctgggccacatcttcttcctgagcctgctcttcatcctgccctacatccacaaggccatggtgcccaggaaggagaagctgaagaagatggagtag

SEQ ID NO: 159131 - DNA, 2268 bp, Artificial Sequence
  derived and/or modified sequence
ccggaattgggggtgaagcgatagcgttttgcccgcattcggggcgcgcggagctggggggtccctgtggggctcccggagttaagatggcgtcctcagcggagggggacgaggggactgtggtggcgctggcgggggttctgcagtcgggtttccaggagctgagccttaacaagttggcgacgtccctgggcgcgtcagaacaggcgctgcggctgatcatctccatcttcctgggttacccctttgctttgttttatcggcattaccttttctacaaggagacctacctcatccacctcttccatacctttacaggcctctcaattgcttattttaactttggaaaccagctctaccactccctgctgtgtattgtgcttcagttcctcatccttcgactaatgggccgcaccatcactgccgtcctcactaccttttgcttccagatggcctaccttctggctggatactattacactgccaccggcaactacgatatcaagtggacaatgccacattgtgttctgactttgaagctgattggtttggctgttgactactttgacggagggaaagatcagaattccttgtcctctgagcaacagaaatatgccatacgtggtgttccttccctgctggaagttgctggtttctcctacttctatggggccttcttggtagggccccagttctcaatgaatcactacatgaagctggtgcagggagagctgattgacataccaggaaagataccaaacagcatcattcctgctctcaagcgcctgagtctgggccttttctacctagtgggctacacactgctcagcccccacatcacagaagactatctcctcactgaagactatgacaaccaccccttctggttccgctgcatgtacatgctgatctggggcaagtttgtgctgtacaaatatgtcacctgttggctggtcacagaaggagtatgcattttgacgggcctgggcttcaatggctttgaagaaaagggcaaggcaaagtgggatgcctgtgccaacatgaaggtgtggctctttgaaacaaacccccgcttcactggcaccattgcctcattcaacatcaacaccaacgcctgggtggcccgctacatcttcaaacgactcaagttccttggaaataaagaactctctcagggtctctcgttgctattcctggccctctggcacggcctgcactcaggatacctggtctgcttccagatggaattcctcattgttattgtggaaagacaggctgccaggctcattcaagagagccccaccctgagcaagctggccgccattactgtcctccagcccttctactatttggtgcaacagaccatccactggctcttcatgggttactccatgactgccttctgcctcttcacgtgggacaaatggcttaaggtgtataaatccatctatttccttggccacatcttcttcctgagcctactattcatattgccttatattcacaaagcaatggtgccaaggaaagagaagttaaagaagatggaataatccatttccctggtggcctgtgcgggactggtgcagaaactactcgtctcccttttcacagcactcctttgccccagagcagagaatggaaaagccagggaggtggaagatcgatgcttccagctgtgcctctgctgccagccaagtcttcatttggggccaaaggggaaacttttttttggagaaggcgtcttgctttgtcacccacgctggaatgcagtggcgggatctcagctcaccgcaacctccacctcctgggttcaagtgattttcctgcctcagcctcccaagtagctgggaatacaggcacgccaccatgcccagctaatttttgtattttcagtagaaacgggatttcaccacgttggccaggctggtctcgaactcctgaccgcaagtgatccacccgcctccgcctcccaaagtgctgggattacaggcgtgagccaccgtgcccggcccaaaggggaaactcttgtgggaggagcagaggggctcacatctcccctctgattcccccatgcacattgccttatctctccccatctagccaggaatctattgtgtttttcttctgccaatttactatgattgtgtatgtgccgctaccaccaccccccccatgggggggtggagaggggtgcaaggccctgcctgctccactttttctaccttggaactgtattagataaaatcacttctgtttgttcagtttttc

SEQ ID NO: 159132 - DNA, 1464 bp, Artificial Sequence
  derived and/or modified sequence
atggccagcagcgccgagggcgacgagggcaccgtggtggccctggcaggtgtgctccaatctggatttcaggaactctcgctgaacaaactcgccacatcactgggagctagtgaacaggcactgagattgataatttcaatattcttaggctatccatttgccctgttttaccgacattacctcttttacaaggaaacctacttgattcacctgtttcacaccttcactggcctttccattgcatatttcaattttggtaaccaactctaccatagcttactgtgtattgtgctccaattcctgatcctccgccttatgggccggaccatcactgctgtgctcacgactttctgtttccagatggcttatctgctagcgggatattactatacggccaccggtaactacgacattaagtggacaatgccacactgcgtgctgacgctaaagctgatcggactagctgtggattattttgatggcggtaaggatcagaactccctgagtagcgagcagcagaagtacgctattaggggagtccccagcctgctggaagtagccggattttcttatttttatggtgccttcctcgttggccctcagttttcaatgaaccactatatgaagctagtgcaaggcgaacttattgatattcccggtaaaatacccaatagtattatcccagctctcaagaggcttagcctggggctgttctaccttgtcggctataccttgctcagtcctcatattactgaggactatctgctcacagaggactacgataaccatcctttctggtttcgttgtatgtatatgttgatttggggtaagtttgtgctttacaaatacgtgacgtgttggttagtcaccgaaggtgtctgcatactcactgggctgggatttaatggattcgaggagaagggaaaagccaagtgggatgcttgcgcaaatatgaaggtctggctgtttgagacgaacccgcgcttcacaggcaccattgcctcttttaacattaacactaatgcctgggttgctcggtacattttcaaaaggcttaagttcctgggaaataaagagctgagccagggattgtccctactcttcttggcactgtggcacggcctccatagcgggtacctggtgtgcttccaaatggaatttttgattgtcattgtcgaaagacaggccgccagactgattcaggagtcacctacgctaagtaagttggccgctatcacggtactgcagccattctattatctggtacagcagacaatccattggctgttcatgggctactctatgaccgctttttgtctgttcacctgggacaagtggctgaaggtgtataaatcgatttatttccttgggcatatctttttcctgagtctcctttttatcctgccctacatccacaaagccatggtgcctcgaaaggaaaaactgaagaaaatggagtag

SEQ ID NO: 159133 - DNA, 1464 bp, Artificial Sequence
  derived and/or modified sequence
atggcaagcagtgcagaaggtgacgagggtactgtggtggccttagccggagtactccaatcaggctttcaagagctgtccttgaacaaactcgcaacaagcttgggggcttcagagcaagcgctgaggctgatcatttccatcttcctgggttatccgttcgctcttttttacaggcactacctgttctacaaggaaacctacctcattcacctgtttcacacttttactggcttgagcatcgcttacttcaacttcggtaaccagctgtaccacagtctgctgtgcatcgttctccaatttcttatactgagacttatggggcgtactattacagcggtcctaactacattttgctttcaaatggcatatctcctcgccggttattattacacagcaacaggcaattatgatatcaaatggacaatgccgcactgtgtcctgacactgaaactaattggccttgccgtggactactttgatggagggaaagatcagaatagcctcagttcagagcagcagaagtatgctattagaggtgtgcctagtctactggaagtcgccggtttctcatacttctacggggctttcctagtgggtccacaattttcgatgaatcactatatgaagctcgttcagggggaactgatcgatataccgggtaagatacctaactcaatcattcccgcattgaagcgcctctctctgggcctgttttacctcgttgggtacactctgctctccccacatattaccgaggattatttacttacagaagactacgacaaccaccccttttggtttagatgcatgtacatgctgatttggggaaagttcgtcttgtataagtacgtcacatgttggctggtgactgagggcgtgtgcattcttacagggctgggtttcaacggttttgaggagaaggggaaagctaaatgggacgcatgcgcaaacatgaaggtatggttgttcgaaacaaatccacgtttcactggaactattgcctcattcaatataaataccaatgcatgggtcgcgaggtatatattcaaacgactgaagttcctgggaaacaaagaactctcccaaggactcagcctgctgttcctggctctttggcacggattgcactcaggctatttagtgtgttttcagatggagtttctgatcgtcatcgttgaacggcaggcagcgagactgattcaagagtcaccaaccctctccaaattggccgcaatcacggttctgcaaccgttttattacctggtacaacaaaccatacactggctgttcatgggctattctatgacagctttctgcctcttcacttgggataaatggctgaaggtgtacaagagcatttactttctcggtcatatattcttcctgtccttgctgttcatcctaccctacatccataaagcaatggtccctaggaaggagaagttaaaaaagatggagtag

SEQ ID NO: 159134 - DNA, 1464 bp, Artificial Sequence
  derived and/or modified sequence
atggccagcagcgccgagggcgacgagggcaccgtggtggccctggccggcgtgctgcagagcggcttccaggagctgagcctgaacaagctggccaccagcctgggcgccagcgagcaggccctgagactgatcatcagcatcttcctgggctaccccttcgccctgttctacagacactacctgttctacaaggagacctacctgatccacctgttccacaccttcaccggcctgagcatcgcctacttcaacttcggcaaccagctgtaccacagcctgctgtgcatcgtgctgcagttcctgatcctgagactgatgggcagaaccatcaccgccgtgctgaccaccttctgcttccagatggcctacctgctggccggctactactacaccgccaccggcaactacgacatcaagtggaccatgccccactgcgtgctgaccctgaagctgatcggcctggccgtggactacttcgacggcggcaaggaccagaacagcctgagcagcgagcagcagaagtacgccatcagaggcgtgcccagcctgctggaggtggccggcttcagctacttctacggcgccttcctggtgggcccccagttcagcatgaaccactacatgaagctggtgcagggcgagctgatcgacatccccggcaagatccccaacagcatcatccccgccctgaagagactgagcctgggcctgttctacctggtgggctacaccctgctgagcccccacatcaccgaggactacctgctgaccgaggactacgacaaccaccccttctggttcagatgcatgtacatgctgatctggggcaagttcgtgctgtacaagtacgtgacctgctggctggtgaccgagggcgtgtgcatcctgaccggcctgggcttcaacggcttcgaggagaagggcaaggccaagtgggacgcctgcgccaacatgaaggtgtggctgttcgagaccaaccccagattcaccggcaccatcgccagcttcaacatcaacaccaacgcctgggtggccagatacatcttcaagagactgaagttcctgggcaacaaggagctgagccagggcctgagcctgctgttcctggccctgtggcacggcctgcacagcggctacctggtgtgcttccagatggagttcctgatcgtgatcgtggagagacaggccgccagactgatccaggagagccccaccctgagcaagctggccgccatcaccgtgctgcagcccttctactacctggtgcagcagaccatccactggctgttcatgggctacagcatgaccgccttctgcctgttcacctgggacaagtggctgaaggtgtacaagagcatctacttcctgggccacatcttcttcctgagcctgctgttcatcctgccctacatccacaaggccatggtgcccagaaaggagaagctgaagaagatggagtag

SEQ ID NO: 159135 - protein, 386 aa, Artificial Sequence
  derived and/or modified sequence
MLLPKKMKLLLFLVSQMAILALFFHMYSHNISSLSMKAQPERMHVLVLSSWRSGSSFVGQLFGQHPDVFYLMEPAWHVWMTFKQSTAWMLHMAVRDLIRAVFLCDMSVFDAYMEPGPRRQSSLFQWENSRALCSAPACDIIPQDEIIPRAHCRLLCSQQPFEVVEKACRSYSHVVLKEVRFFNLQSLYPLLKDPSLNLHIVHLVRDPRAVFRSRERTKGDLMIDSRIVMGQHEQKLKKEDQPYYVMQVICQSQLEIYKTIQSLPKALQERYLLVRYEDLARAPVAQTSRMYEFVGLEFLPHLQTWVHNITRGKGMGDHAFHTNARDALNVSQAWRWSLPYEKVSRLQKACGDAMNLLGYRHVRSEQEQRNLLLDLLSTWTVPEQIH

SEQ ID NO: 159136 - DNA, 1161 bp, Artificial Sequence
  derived and/or modified sequence
atgctgctgcccaagaagatgaagctgctgctgttcctggtgagccagatggccatcctggccctgttcttccacatgtacagccacaacatcagcagcctgagcatgaaggcccagcccgagagaatgcacgtgctggtgctgagcagctggagaagcggcagcagcttcgtgggccagctgttcggccagcaccccgacgtgttctacctgatggagcccgcctggcacgtgtggatgaccttcaagcagagcaccgcctggatgctgcacatggccgtgagagacctgatcagagccgtgttcctgtgcgacatgagcgtgttcgacgcctacatggagcccggccccagaagacagagcagcctgttccagtgggagaacagcagagccctgtgcagcgcccccgcctgcgacatcatcccccaggacgagatcatccccagagcccactgcagactgctgtgcagccagcagcccttcgaggtggtggagaaggcctgcagaagctacagccacgtggtgctgaaggaggtgagattcttcaacctgcagagcctgtaccccctgctgaaggaccccagcctgaacctgcacatcgtgcacctggtgagagaccccagagccgtgttcagaagcagagagagaaccaagggcgacctgatgatcgacagcagaatcgtgatgggccagcacgagcagaagctgaagaaggaggaccagccctactacgtgatgcaggtgatctgccagagccagctggagatctacaagaccatccagagcctgcccaaggccctgcaggagagatacctgctggtgagatacgaggacctggccagagcccccgtggcccagaccagcagaatgtacgagttcgtgggcctggagttcctgccccacctgcagacctgggtgcacaacatcaccagaggcaagggcatgggcgaccacgccttccacaccaacgccagagacgccctgaacgtgagccaggcctggagatggagcctgccctacgagaaggtgagcagactgcagaaggcctgcggcgacgccatgaacctgctgggctacagacacgtgagaagcgagcaggagcagagaaacctgctgctggacctgctgagcacctggaccgtgcccgagcagatccactag

SEQ ID NO: 159137 - DNA, 1161 bp, Artificial Sequence
  derived and/or modified sequence
atgctcttacctaaaaaaatgaaattgctgctgtttctggtttcacaaatggctatactagctctctttttccacatgtatagtcacaacatatcttcattgtccatgaaggcacaacccgagagaatgcacgttcttgtgctgtcttcctggcgctcaggcagctctttcgtcggacagctcttcggacagcacccggatgtgttctacctcatggagcctgcgtggcatgtttggatgacgttcaagcagtccacagcttggatgctgcacatggccgtgagggacctgattcgggccgtcttcttatgcgacatgagcgtatttgatgcttacatggaacctgggccacgccggcagtccagcctgtttcagtgggagaatagccgcgccctttgctcggctccggcctgcgacattatcccacaggatgaaatcataccccgcgcacactgtcggctgctgtgtagccagcaaccattcgaggtcgtagaaaaagcatgtaggtcttatagccatgtagtcctgaaagaagtgcggttctttaatctgcagtctttataccctctgctcaaggatccatccctcaacctgcacattgtgcatctggtgcgtgaccctcgggccgtgttccggagccgggagagaactaagggcgacctgatgattgactctcggatagtgatgggccaacacgaacagaaactgaagaaagaggaccaaccttattatgtgatgcaagtgatttgccagtctcagcttgagatctacaagacaattcaatccttgcctaaggcgctccaagagcgatacctgctggtgaggtatgaggacctcgcccgcgcccctgtggcacagactagccgtatgtatgaattcgtcggcctggagtttttgccacatctgcagacctgggtgcacaatatcacgagaggaaaagggatgggggaccatgcatttcataccaatgcacgagacgccctcaatgtttctcaggcctggcgatggtctctcccctatgagaaggtgagtcgcctccagaaggcctgcggagacgctatgaatctccttggctatagacatgtccggtccgaacaggagcagaggaaccttctacttgatctactcagcacctggaccgtccctgagcaaattcattag

SEQ ID NO: 159138 - DNA, 1161 bp, Artificial Sequence
  derived and/or modified sequence
atgctactgccgaaaaagatgaagttactgcttttcctggtgtcacaaatggcgattctggctttattctttcacatgtatagccataatatttcctccctctccatgaaagctcagcccgaaagaatgcatgtactggtgctgtctagctggagatctggatccagctttgtggggcaactctttggccagcaccccgatgtcttttacctgatggaacctgcttggcatgtgtggatgactttcaaacagtctaccgcctggatgctccacatggctgtgagagatctgattagagcagtgttcttgtgtgacatgtctgtgtttgacgcatacatggagccagggcctcggcgtcagtccagcctgttccagtgggagaatagcagggctctgtgctcagcccccgcgtgcgacattatccctcaggacgaaataattccccgcgctcattgcaggctcttatgctcccagcagccattcgaggtcgtagaaaaggcctgccggtcatactcgcacgtcgtcctgaaggaagtacgcttctttaatctccagtccctctatccccttttgaaagacccttcactaaatttacacatcgtgcacctcgtgagagatcccagagccgttttcaggtcccgggaaaggactaagggcgacttgatgattgattcacgcatcgtgatgggacagcacgagcagaagctgaaaaaggaggatcagccttactacgtcatgcaggtgatttgccagtctcagctcgaaatctacaagactattcaatcacttccaaaggcccttcaagagcgctacctcttggtgaggtacgaggatcttgcccgcgctcctgtggcccagaccagcagaatgtacgagtttgtgggacttgagtttctgccacacttgcaaacatgggtccataatatcacaaggggtaagggcatgggcgatcacgcctttcatacgaatgcccgtgatgcactgaacgtatctcaggcttggaggtggtctttgccctatgagaaagtaagtaggctccagaaagcatgcggggatgccatgaatttgttgggttatcgccacgtgagaagcgaacaggagcaaaggaacctgctgctggatctgctgagtacatggactgtgccagaacagatccactag

SEQ ID NO: 159139 - DNA, 1161 bp, Artificial Sequence
  derived and/or modified sequence
atgctgctgcccaagaagatgaagctgctgctcttcctggtgtcccagatggccatcctggccctcttcttccacatgtacagccacaacatcagcagcctgtccatgaaggcccagcctgagaggatgcacgtgctggtgctgagctcctggaggagcggcagcagctttgtgggccagctgtttggccagcacccagatgtgttctacctgatggagcccgcctggcacgtgtggatgaccttcaagcagagcacagcctggatgctgcacatggctgtgcgggacctgatccgggctgtgttcctgtgtgacatgtctgtgtttgatgcctacatggagcccggcccccggcggcagagcagcctcttccagtgggagaacagccgggccctgtgcagcgccccagcctgtgacatcatcccccaggatgagatcatcccccgggcccactgccgcctgctgtgcagccagcagccctttgaggtggtggagaaggcctgccgcagctacagccacgtggtgctgaaggaggtgcgcttcttcaacctgcagagcctgtaccccctgctgaaggaccccagcctgaacctgcacatcgtgcacctggtgcgggaccccagggctgtgttccgcagccgggagaggaccaagggggacctgatgattgacagcagaattgtgatgggccagcacgagcagaagctgaagaaggaggaccagccctactacgtgatgcaggtgatctgccagagccagctggagatctacaagaccatccagagcctgcccaaggccctgcaggagcgctacctgctggtgcgctatgaggacctggcccgggcccctgtggcccagaccagcaggatgtatgaatttgtgggcctggagttcctgccccacctgcagacctgggtgcacaacatcacccggggcaagggcatgggagaccacgccttccacaccaatgccagagatgccctgaatgtgtcccaggcctggcgctggagcctgccctatgagaaggtgtcccggctgcagaaggcctgtggagatgccatgaacctgctgggctacagacatgtgcgctctgagcaggagcagaggaacctgctgctggacctgctgagcacctggacagtgcctgagcagatccactag

SEQ ID NO: 159140 - DNA, 1161 bp, Artificial Sequence
  derived and/or modified sequence
atgctgctgcccaagaagatgaagctgctgctgttcctggtgagccaaatggcgattctagctctttttttccatatgtacagtcacaacatttctagcctctctatgaaggctcaacctgaaaggatgcacgtgctcgtgctgagctcttggagatctggatccagcttcgtggggcaactcttcggacagcatcccgacgtattctacttgatggagccagcctggcatgtctggatgacctttaaacagtccactgcctggatgctgcacatggcggtgcgagacctcataagagcagtgttcctatgtgatatgtctgtctttgatgcctacatggaacccgggccacgcaggcaatctagtctcttccagtgggagaatagcagagcgctctgttccgcacctgcctgtgatattattccacaggacgagattattcctcgcgctcactgtcggcttttatgctctcagcagcctttcgaggtcgtggaaaaggcctgcagaagctactcacacgtcgtgttgaaagaggttcggttctttaacctgcagtccctctatcctctgctaaaagatccatccctaaatctgcatattgttcatctggttcgcgacccgagagctgtgttcaggtctagagagcgcacaaaaggcgatctgatgattgatagcagaattgtgatgggacagcacgagcaaaagctgaaaaaggaggaccagccttactatgtgatgcaggtaatttgtcagtcccagctcgaaatctataagacaatacagtctctgcctaaggccctgcaggaaaggtaccttctggtgagatatgaagacctggctcgggctccggtcgcgcagaccagtaggatgtacgagttcgtgggtcttgagtttttacctcacctgcagacgtgggtccacaacataactagaggtaaagggatgggagatcatgccttccacacaaatgcaagggacgctctgaatgtgtcccaggcatggagatggagtctcccgtacgagaaagtcagtaggctccagaaagcttgtggagatgccatgaaccttcttggctatagacatgtccggtctgagcaggagcagcgtaatttgctcctagatctgctcagtacctggaccgttcccgaacagattcactag

SEQ ID NO: 159141 - DNA, 1161 bp, Artificial Sequence
  derived and/or modified sequence
atgctgctgcccaagaagatgaagctgctgctgttcctggtgagccagatggctatcctggccctttttttccacatgtattcacataacattagcagtctgagcatgaaggcgcagcctgagagaatgcacgtcctggtgctctcctcatggcgatccggtagttctttcgtcggacagctctttggacagcacccagacgtgttctatttgatggagccagcgtggcacgtatggatgacattcaaacaatcaacagcttggatgctgcatatggccgtaagagacctcatccgggccgtgttcttatgcgacatgtcagtgtttgatgcatacatggaaccaggcccccggagacagtcttctctgttccagtgggagaacagccgcgctctttgctcagcccctgcgtgcgacatcattccacaagacgaaatcatcccaagagcacattgtcggctgctctgcagccaacagccatttgaggtcgtggaaaaggcctgtcggtcttattcgcacgtggtccttaaggaggttagatttttcaatctgcagagcttataccctctcttaaaggatccatcactgaacctacacatcgtccacctcgtacgggaccctagagccgtgttcaggagtcgagagcggacaaaaggcgacctcatgatcgatagccggattgtaatgggtcagcatgagcagaagctcaaaaaggaggaccaaccatattacgtgatgcaggttatctgccagtcacagctggagatctacaagacgatccagtcattgccaaaagccctacaggagagataccttctagtgcgatatgaggatctcgctagggccccagttgcgcagacctctcgaatgtacgagtttgtgggcctggaatttcttccacacctgcaaacttgggtacacaatattacaagaggcaagggcatgggggaccatgcctttcataccaatgcgcgggacgcattgaatgtgagccaggcttggcgatggagcttgccctacgagaaagtcagtaggctgcagaaggcctgtggggacgctatgaacctactcgggtaccggcacgtgcgttctgagcaggaacagcggaacttactcctggatttactgtcaacgtggacggtgcctgaacagattcactag

SEQ ID NO: 159142 - DNA, 1161 bp, Artificial Sequence
  derived and/or modified sequence
atgttgttgccaaaaaaaatgaagcttctcctgtttctggtctctcagatggcaattctggccttattcttccatatgtactctcacaacatcagttcgctgagtatgaaggcccaaccagagaggatgcatgtgcttgtgctctcatcttggcggtctggcagcagctttgttgggcagctttttggccagcatcccgatgtgttttacttgatggagcccgcttggcatgtttggatgacgttcaaacagagtaccgcgtggatgctgcacatggcagtcagagacctcatcagggccgtttttctttgtgacatgtctgtgtttgatgcatacatggagcctggtcctaggcgccagagctcgctgttccagtgggagaacagtagagcactgtgtagcgctcctgcctgtgacattatcccccaggatgagataatccctcgtgcacactgtagactgctctgctctcaacagccctttgaggtagtggaaaaagcttgccggtcctacagtcacgtggtgctgaaagaggtgcggtttttcaatctacagtccttgtatccattgctgaaagaccctagtctgaacttgcatatcgtccacctggtgagggacccacgagccgttttccgctctagagaacggaccaaaggcgatcttatgatcgactctcggattgtgatgggccaacatgaacagaagctgaagaaagaggaccagccgtactacgtgatgcaggtgatttgtcagagccagctggagatctataaaaccatccaatcactcccgaaagctctgcaagagagatatctccttgttaggtatgaagacctcgcacgcgcacccgtggcgcaaacctcgcgcatgtatgaatttgtcggcttagagttccttcctcacctccagacctgggtgcataatattaccaggggtaaggggatgggtgaccacgccttccacaccaacgccagagacgctctgaacgtcagccaggcctggcgctggtcactgccttatgagaaggtaagccgcctgcaaaaggcttgtggcgacgccatgaacctgctcggttatcggcacgtgcgctctgaacaggagcagcggaacctcctgctggacctgcttagcacctggacagtgcccgagcagatccactag

SEQ ID NO: 159143 - DNA, 1161 bp, Artificial Sequence
  derived and/or modified sequence
atgctcctgcccaaaaaaatgaaacttctgcttttccttgtgtcgcagatggccatccttgcgctgttctttcacatgtactcccataacatctcttccctgtccatgaaggcacagccagagaggatgcacgtcctggttctatcatcctggcgctccgggagctccttcgtgggacaattatttggccagcatccagacgttttctatcttatggagccagcctggcatgtgtggatgactttcaaacaatcgactgcatggatgctccacatggcagtacgggatctaattcgggcagtatttctgtgcgatatgtccgtgttcgacgcttacatggagcctggaccaagacggcaaagcagtttgttccagtgggagaactcaagagccctttgtagtgcgccagcgtgtgatatcatcccccaggatgaaatcattcccagggcacattgtcgcctcctgtgctcgcaacagccttttgaggtggtggagaaggcttgtcgctcttactcccacgtggtcctgaaggaggtgagattttttaatctccagagcttgtatccactgctgaaggacccaagcctgaaccttcacattgtgcacctcgtccgagatcccagagctgtatttcgtagccgcgagcgcacgaagggcgatctcatgattgacagtagaatcgttatggggcaacacgagcagaaattgaaaaaagaggaccaaccgtattatgtgatgcaggttatctgtcagagccaactcgaaatctacaaaaccatccaatcgttgcccaaagctttgcaggaaagatacctgctggtaagatacgaggatctcgcacgcgctccagtggctcagacatctagaatgtacgagttcgttggcctggaatttttgccccacctgcagacatgggtgcacaacatcacccgcggaaaagggatgggcgatcacgctttccacacaaatgcaagggacgctttgaatgtcagtcaggcctggcgatggtctctcccctacgagaaggtgtcccgcttgcagaaagcctgcggagatgccatgaatctgctgggctatcgacacgtacggagcgagcaagagcagaggaacctcctcttggatctgctgagtacatggacagtgcctgagcagattcactag

SEQ ID NO: 159144 - DNA, 2106 bp, Artificial Sequence
  derived and/or modified sequence
acagttgcctttcagtagtcaacatgccaggatgcctccagtctgggggaaaatgcttcctcatttgcttctcccagcccacctcaagcagtctccccaccccttgagtctcagcagtgttaaagctgttactttcacagcttcctgggagcgagtgctttctcaagcccgtcttgcaaggtcttccacttcagcacaatgctactgcctaaaaaaatgaagctcctgctgtttctggtttcccagatggccatcttggctctattcttccacatgtacagccacaacatcagctccctgtctatgaaggcacagcccgagcgcatgcacgtgctggttctgtcttcctggcgctctggctcttcttttgtggggcagctttttgggcagcacccagatgttttctacctgatggagcccgcctggcacgtgtggatgaccttcaagcagagcaccgcctggatgctgcacatggctgtgcgggatctgatacgggccgtcttcttgtgcgacatgagcgtctttgatgcctacatggaacctggtccccggagacagtccagcctctttcagtgggagaacagccgggccctgtgttctgcacctgcctgtgacatcatcccacaagatgaaatcatcccccgggctcactgcaggctcctgtgcagtcaacagccctttgaggtggtggagaaggcctgccgctcctacagccacgtggtgctcaaggaggtgcgcttcttcaacctgcagtccctctacccgctgctgaaagacccctccctcaacctgcatatcgtgcacctggtccgggacccccgggccgtgttccgttcccgagaacgcacaaagggagatctcatgattgacagtcgcattgtgatggggcagcatgagcaaaaactcaagaaggaggaccaaccctactatgtgatgcaggtcatctgccaaagccagctggagatctacaagaccatccagtccttgcccaaggccctgcaggaacgctacctgcttgtgcgctatgaggacctggctcgagcccctgtggcccagacttcccgaatgtatgaattcgtgggattggaattcttgccccatcttcagacctgggtgcataacatcacccgaggcaagggcatgggtgaccacgctttccacacaaatgccagggatgcccttaatgtctcccaggcttggcgctggtctttgccctatgaaaaggtttctcgacttcagaaagcctgtggcgatgccatgaatttgctgggctaccgccacgtcagatctgaacaagaacagagaaacctgttgctggatcttctgtctacctggactgtccctgagcaaatccactaagagggttgagaaggctttgctgccacctggtgtcagcctcagtcactttctctgaatgcttctgagccttgcctacatctctgagccttaactacatgtctgtgggtatcacactgagtgtgagttgtgtccacacgtgctcaagcagaaggacttttgtgtccatgcttgtgtctagaaaacagactggggaaccttatgtgagcagcacatcccaccagtgaaacagggtattgctcttcttcttttcttgatcttcctgtctgggcagacttcagagactttgtggcctggaggcctattaagcacgacacagtatcagtggaattgatccataaacctccctgtccacatcttgcccaatggggaatggatctttcaccaaagagctcaccagcattttccacagagatgcaaattctgagcccttggagttcccagtggattcaaggaaggaagtgggaacaaggttggatgcctacttatgagcttgaccatcacagctatcggtaatcagaaatatgaaacaaaatctctgcacaaaagagcaagctcttaagttcacagggtgcctgggctgcatttgaatatcacttcccctctgcattttcccatcacatagaagactttgacctgtgaagctgccatctgttaatactaaaattcccaaataaggttctgtttagaatgtccctttttatgcttcttaattattagcagtaaatgttcatttttatgggatcctaa

SEQ ID NO: 159145 - DNA, 2174 bp, Artificial Sequence
  derived and/or modified sequence
gttaaagctgttactttcacagcttcctgggagcgagtgctttctcaagcccgtcttgcaaggtgggtccttttttgtttttggcagaagggagggacagtgaaatgtgctctgagtagggacggttatgcaaaagcaagtaggaggaggaagccaagaggggagttggtgagtcagaggagaaaagcgcatggcccggctagcagtgagcctctcaaaagcagcagggaagcccaagccacaaggtcttccacttcagcacaatgctactgcctaaaaaaatgaagctcctgctgtttctggtttcccagatggccatcttggctctattcttccacatgtacagccacaacatcagctccctgtctatgaaggcacagcccgagcgcatgcacgtgctggttctgtcttcctggcgctctggctcttcttttgtggggcagctttttgggcagcacccagatgttttctacctgatggagcccgcctggcacgtgtggatgaccttcaagcagagcaccgcctggatgctgcacatggctgtgcgggatctgatacgggccgtcttcttgtgcgacatgagcgtctttgatgcctacatggaacctggtccccggagacagtccagcctctttcagtgggagaacagccgggccctgtgttctgcacctgcctgtgacatcatcccacaagatgaaatcatcccccgggctcactgcaggctcctgtgcagtcaacagccctttgaggtggtggagaaggcctgccgctcctacagccacgtggtgctcaaggaggtgcgcttcttcaacctgcagtccctctacccgctgctgaaagacccctccctcaacctgcatatcgtgcacctggtccgggacccccgggccgtgttccgttcccgagaacgcacaaagggagatctcatgattgacagtcgcattgtgatggggcagcatgagcaaaaactcaagaaggaggaccaaccctactatgtgatgcaggtcatctgccaaagccagctggagatctacaagaccatccagtccttgcccaaggccctgcaggaacgctacctgcttgtgcgctatgaggacctggctcgagcccctgtggcccagacttcccgaatgtatgaattcgtgggattggaattcttgccccatcttcagacctgggtgcataacatcacccgaggcaagggcatgggtgaccacgctttccacacaaatgccagggatgcccttaatgtctcccaggcttggcgctggtctttgccctatgaaaaggtttctcgacttcagaaagcctgtggcgatgccatgaatttgctgggctaccgccacgtcagatctgaacaagaacagagaaacctgttgctggatcttctgtctacctggactgtccctgagcaaatccactaagagggttgagaaggctttgctgccacctggtgtcagcctcagtcactttctctgaatgcttctgagccttgcctacatctctgagccttaactacatgtctgtgggtatcacactgagtgtgagttgtgtccacacgtgctcaagcagaaggacttttgtgtccatgcttgtgtctagaaaacagactggggaaccttatgtgagcagcacatcccaccagtgaaacagggtattgctcttcttcttttcttgatcttcctgtctgggcagacttcagagactttgtggcctggaggcctattaagcacgacacagtatcagtggaattgatccataaacctccctgtccacatcttgcccaatggggaatggatctttcaccaaagagctcaccagcattttccacagagatgcaaattctgagcccttggagttcccagtggattcaaggaaggaagtgggaacaaggttggatgcctacttatgagcttgaccatcacagctatcggtaatcagaaatatgaaacaaaatctctgcacaaaagagcaagctcttaagttcacagggtgcctgggctgcatttgaatatcacttcccctctgcattttcccatcacatagaagactttgacctgtgaagctgccatctgttaatactaaaattcccaaataaggttctgtttagaatgtccctttttatgcttcttaattattagcagtaaatgttcatttttatgggatcctaagct

SEQ ID NO: 159146 - protein, 175 aa, Artificial Sequence
  derived and/or modified sequence
MATQAHSLSYAGCNFLRQRLVLSTLSGRPVKIRKIRARDDNPGLRDFEASFIRLLDKITNGSRIEINQTGTTLYYQPGLLYGGSVEHDCSVLRGIGYYLESLLCLAPFMKHPLKIVLRGVTNDQVDPSVSIENKPWCGFCFVSCHNPTCEKKVPYKAQFYYKCILLLLFTLRFRG

SEQ ID NO: 159147 - protein, 373 aa, Artificial Sequence
  derived and/or modified sequence
MATQAHSLSYAGCNFLRQRLVLSTLSGRPVKIRKIRARDDNPGLRDFEASFIRLLDKITNGSRIEINQTGTTLYYQPGLLYGGSVEHDCSVLRGIGYYLESLLCLAPFMKHPLKIVLRGVTNDQVDPSVDVLKATALPLLKQFGIDGESFELKIVRRGMPPGGGGEVVFSCPVRKVLKPIQLTDPGKIKRIRGMAYSVRVSPQMANRIVDSARSILNKFIPDIYIYTDHMKGVNSGKSPGFGLSLVAETTSGTFLSAELASNPQGQGAAVLPEDLGRNCARLLLEEIYRGGCVDSTNQSLALLLMTLGQQDVSKVLLGPLSPYTIEFLRHLKSFFQIMFKIETKPCGEELKGGDKVLMTCVGIGFSNLSKTLK

SEQ ID NO: 159148 - DNA, 528 bp, Artificial Sequence
  derived and/or modified sequence
atggccacccaggcccattccttgagttacgccgggtgcaacttcctcagacagcggttagtactgtccacactgtcaggtcgccccgtcaaaattaggaagatccgggctagggatgataaccccggacttagggacttcgaggcatctttcattcggctgctggataaaatcaccaatgggtctcgcatcgagattaatcagacgggcactacactgtactatcagcctggtctgctttatggtggctctgtggaacacgactgctctgtgcttagaggtataggttactatctcgagtccctgctgtgccttgcaccttttatgaagcacccattgaagatcgttcttagaggtgtgacaaacgaccaggttgatccttcagtatccatagaaaataagccttggtgtggcttctgtttcgtctcctgtcacaatccaacatgcgagaagaaagtgccttataaggcacaattctactacaagtgcatattactactgttattcaccttgagatttagggggtag

SEQ ID NO: 159149 - DNA, 1122 bp, Artificial Sequence
  derived and/or modified sequence
atggcaacccaagcccactctctctcctatgccggatgtaacttcctgcgccagagactggtactctctacacttagcggacggcctgtcaagatccgtaagatccgggctcgtgacgataatcctggcttaagggacttcgaggcgagctttatcaggttgctggataaaattaccaacgggtcccggattgaaatcaaccagacaggcactacactgtattatcagccgggactcctatatggtggtagcgtggagcatgattgctctgtactcaggggcatagggtactatctggaatcactgctgtgcctggccccattcatgaaacatccactgaaaattgtcttacgcggcgtgaccaacgaccaggttgaccccagtgtcgacgtgctgaaagcaaccgctctgcctcttctcaagcaatttggcatcgatggcgagtctttcgaactgaaaatcgtgagacgtgggatgccacccggaggtgggggagaagtggtattcagttgtccggtgcgtaaagtgttgaagcctatccaactcactgaccctggaaagattaaacggattcgcggcatggcttacagtgtaagggtgagcccccaaatggcaaaccggattgttgactctgctcggtcgattctcaacaagttcataccagacatatacatctacaccgatcacatgaagggtgtgaatagcggcaaaagcccaggcttcggattgagtctcgtggcagagacgacctccggtacctttctaagtgccgagctggctagtaatcctcagggacagggcgcggcggtgctccccgaggacctgggccggaactgtgcacgcctgcttcttgaggagatctatagaggagggtgtgttgacagcaccaaccagtccttggcgctcctcctgatgactctggggcagcaggatgtttctaaagtgctgctgggccccctttcaccctataccatcgagttccttaggcacctcaagtctttcttccagatcatgttcaaaattgaaacaaaaccatgtggcgaggagctcaaggggggcgacaaggttttaatgacctgcgtaggcatcggattttcgaatttatcgaagaccctgaagtag

SEQ ID NO: 159150 - DNA, 528 bp, Artificial Sequence
  derived and/or modified sequence
atggccacccaggcccacagcctgtcctatgccggctgcaacttcctgcggcagaggctggtgctgagcaccctgagcggccggcctgtgaagatcaggaagatccgggccagagatgacaaccctggcctgcgggactttgaggccagcttcatccggctgctggacaagatcaccaacggcagccgcatcgagatcaaccagacaggcaccaccctgtactaccagcccggcctgctgtatggaggctctgtggagcatgactgcagcgtgctgcggggcatcggctactacctggagagcctgctgtgcctggcccccttcatgaagcaccccctgaagatcgtgctgcggggcgtgaccaatgaccaggtggaccccagcgtgtccattgagaacaagccctggtgtggcttctgctttgtgtcctgccacaaccccacctgtgagaagaaggtgccctacaaggcccagttctactacaagtgcatcctgctgctgctcttcaccctgcgcttccggggctag

SEQ ID NO: 159151 - DNA, 1122 bp, Artificial Sequence
  derived and/or modified sequence
atggccacccaggcccacagcctgtcctatgccggctgcaacttcctgcggcagaggctggtgctgagcaccctgagcggccggcctgtgaagatcaggaagatccgggccagagatgacaaccctggcctgcgggactttgaggccagcttcatccggctgctggacaagatcaccaacggcagccgcatcgagatcaaccagacaggcaccaccctgtactaccagcccggcctgctgtatggaggctctgtggagcatgactgcagcgtgctgcggggcatcggctactacctggagagcctgctgtgcctggcccccttcatgaagcaccccctgaagatcgtgctgcggggcgtgaccaatgaccaggtggaccccagcgtggatgtgctgaaggccacagccctgcccctgctgaagcagtttggaattgatggagagagctttgagctgaagatcgtgcggcggggcatgcctcctgggggcggcggggaggtggtgttcagctgccctgtgaggaaggtgctgaagcccatccagctgacagatcctgggaagatcaagaggatccggggcatggcctacagcgtgcgggtgagcccccagatggccaaccgcatcgtggacagcgcccggagcatcctgaacaagttcatcccagacatctacatctacacagaccacatgaagggcgtgaacagcggcaagagccctggcttcggcctgagcctggtggccgagaccaccagcggcaccttcctgtctgctgagctggccagcaacccccagggccagggcgctgctgtgctgcctgaggacctgggcaggaactgtgcccggctgctgctggaggagatctaccggggcggctgtgtggacagcaccaaccagagcctggccctgctgctgatgaccctgggccagcaggatgtgtccaaggtgctgctgggccccctgagcccctacaccatcgagttcctgcggcacctgaagagcttcttccagatcatgttcaagattgagaccaagccctgtggggaggagctgaagggcggggacaaggtgctgatgacctgtgtgggcatcggcttcagcaacctgagcaagaccctgaagtag

SEQ ID NO: 159152 - DNA, 804 bp, Artificial Sequence
  derived and/or modified sequence
cagcccgagccgccgccgtcggtgtcgccgccaccaccaccatcggagtcacgagtcccgcgtctgtccgaagtcgccgctctcgggctgctcacgtctcttcggagagcgcgcacatggcgactcaggcgcactccctcagctacgcagggtgcaacttcttgcgccaacgtctggtcctgtctaccctgagcgggcgccccgtcaaaatccgaaagattcgggccagagacgacaacccgggcctccgagattttgaagccagcttcataaggctattggacaaaataacgaatggttctcgaattgaaataaaccaaacaggaacaaccttatattatcagcctggcctcctgtatggtggatctgtggaacatgactgtagcgtccttcgtggcattgggtattacctggagagtcttctttgcttggctccatttatgaagcacccgttaaaaatagttctacgaggagtgaccaatgatcaggttgacccttcagtgagtattgagaacaaaccgtggtgtggtttttgttttgtctcttgtcacaacccaacttgtgagaaaaaagttccttataaggcacagttttattacaaatgtatattgcttttgttatttactttgagatttagaggttaatcactccaggaggcagatgaaccaaaacttaggatcatcaaattcaggactattgttaacagttaccaaggtgccttttgttgttacctaagaaccttcaaaacagatgctctccgtctcatcatagttgacatgaactatagttctgctggctgtatat

SEQ ID NO: 159153 - DNA, 2134 bp, Artificial Sequence
  derived and/or modified sequence
gaggcggggaggtggccactggctccgccccgctcccctctgacccggtgtctagtctctccgtcttcctgttccaaaccacgtggacgcgtctgggctgctggaggcagcccgagccgccgccgtcggtgtcgccgccaccaccaccatcggagtcacgagtcccgcgtctgtccgaagtcgccgctctcgggctgctcacgtctcttcggagagcgcgcacatggcgactcaggcgcactccctcagctacgcagggtgcaacttcttgcgccaacgtctggtcctgtctaccctgagcgggcgccccgtcaaaatccgaaagattcgggccagagacgacaacccgggcctccgagattttgaagccagcttcataaggctattggacaaaataacgaatggttctcgaattgaaataaaccaaacaggaacaaccttatattatcagcctggcctcctgtatggtggatctgtggaacatgactgtagcgtccttcgtggcattgggtattacctggagagtcttctttgcttggctccatttatgaagcacccgttaaaaatagttctacgaggagtgaccaatgatcaggttgacccttcagttgatgttcttaaggcaacagcactccctttgttgaaacaatttgggattgatggtgaatcatttgaactgaagattgtgcgacggggaatgcctcccggaggaggaggcgaagtggttttctcatgtcctgtgaggaaggtcttgaagcccattcaactcacagatccaggaaaaatcaaacgtattagaggaatggcgtactctgtacgtgtgtcacctcagatggcgaaccggattgtggattctgcaaggagcatcctcaacaagttcatacctgatatctatatttacacagatcacatgaaaggagtcaactctgggaagtctccgggctttgggttgtcactggttgctgagaccaccagtggcaccttcctcagtgctgaactggcctccaacccccagggccagggagcagcagtacttccagaggaccttggcaggaactgtgcccggctgctgctggaggaaatctacaggggtggatgcgtagactcgaccaaccaaagcctggcgctactactcatgacccttggacagcaggatgtttccaaagtcctgctaggccctctctctccctacacgatagaatttttgcggcatttgaagagctttttccagattatgtttaaaattgaaaccaagccatgtggtgaagaactcaagggtggggataaagtgctgatgacctgtgttggcattggtttctccaaccttagcaagaccctcaagtgataaccatcacaagataaggccccaatgcctacagacaaagcagaagctgccacggacaccaatgggaccaagtccaaatggattaatccaggacagaatagccacttgcttaattttctgtgaagaaatatcaatatacaaataaaagacatccctgtagcatatggtttccagctgtttctccagtggcattgccattgcccaggaggggcccagtcaccatgagagctcccttgccttacctggaggaagaatgtgccttcaggccacagtcgtgctgctagaacagtctcgtagctgcagttcagctgtgcttcctcagcctactatcataggcttcctcagccctctgtcatatggctgttttgcaaacctgtggagtctgttactgttctttctgcaaggactcacctccttgagccttggtttttgttgtagggattaaatgagataatatgagtggcagctcttcatgagtcctgcagtgctaagcaaatgtcagaaattggtgtattagactatttatctttgatcttctgaatggattgctgtcatggacacggacacggatcttcatctggttcattgtatttatatgtgagggatggatggctgcggggctccaagtaagttattgggatgtttttatattccaggtgtgctgtacattcttattttattttcacaatagctctgtgatgtaagtgctatctccatgagaaaattcataaagggtgttttgttcctttgaaatgtataatgtaaagacattaaatctcctcatttaag

SEQ ID NO: 159154 - DNA, 528 bp, Artificial Sequence
  derived and/or modified sequence
atggccacccaggcccacagcctgagctacgccggctgcaacttcttaaggcagaggctggtcttgagcacactctcagggaggcctgtcaaaattcgtaagattcgggccagggacgacaaccctggcctacgggacttcgaggcctcgtttatacgcttgctcgacaagattaccaatggctctcgcatcgaaattaaccagaccggtactaccctgtattaccagcctggtctgctatacggggggagtgtagagcatgattgtagtgtgctgagaggaatcggttattatcttgagagcctcttgtgtctcgccccattcatgaagcatccgcttaagatcgtactgcgcggcgtgactaacgatcaggtggaccctagtgtttcaatcgaaaataaaccctggtgcggattctgtttcgtcagctgtcacaaccccacctgcgagaagaaggtgccctacaaagcacagttctactataagtgcatcctcctgttgctgttcactctgagatttcggggctag

SEQ ID NO: 159155 - DNA, 1122 bp, Artificial Sequence
  derived and/or modified sequence
atggccacccaggcccacagcctgagctacgccggctgcaacttcctaagacagaggctagtactctctactctgagtgggaggcctgtaaagatcaggaaaatccgggcccgcgacgataatccagggctgcgagattttgaggcaagttttataaggctgctggataagataaccaatggcagtcgcattgagattaaccagaccggcaccaccctgtactatcaacccggcttgctgtacgggggcagtgtcgagcatgattgctccgtgttgagggggataggatattacctcgaatctctgctatgcctggccccattcatgaagcaccctcttaagatcgtcctgcgcggcgttaccaatgaccaggtcgacccctcagtcgacgtgctgaaggcaactgcgctgcccttactaaagcaatttggaatcgacggcgagtcctttgagttgaagattgtgaggcgcgggatgccccccgggggtggaggggaggtggtgttttcctgtcccgtgcggaaggtgctgaagcccattcagcttacagaccccgggaaaatcaaacgtattcggggaatggcttacagcgtcagggtatctccccaaatggcgaatagaatcgtggacagtgcacggtcaattcttaacaagtttatcccagatatctatatttatacagaccacatgaagggggtgaatagcgggaaatctccaggttttggtttgtctctggtcgcggagaccacctccggcacgttcctgtcagcagaactcgcttctaatccacagggacagggagccgccgtgctgcctgaggacttaggtaggaactgcgccagattgctgctagaggagatttacaggggagggtgcgtggactccaccaatcagtccctcgcccttctgttgatgactctaggccagcaggacgtctctaaggtgttgcttggcccgctgagcccctatacaatcgagtttctgcggcacttgaagtctttctttcagatcatgttcaaaatcgaaaccaagccctgcggcgaggaactgaaaggaggagacaaggtgctcatgacatgtgtaggtatcggcttctcaaacctgagcaaaacgctcaagtag

SEQ ID NO: 159156 - DNA, 528 bp, Artificial Sequence
  derived and/or modified sequence
atggcaacacaggctcattcactgtcttatgctggctgtaacttcctcaggcaacggctggtgctgtcaactctaagtggacgcccagtgaaaatacgaaagataagggctcgggacgacaacccaggtttaagagattttgaggcttcgttcattcgccttctggacaagattacaaacgggagccgaatcgagataaaccagacaggtaccaccctgtattatcagccgggtctcctgtatgggggaagtgtggagcacgattgctctgtgctgcgtggaattggctattacttggagagcttgctctgcctcgccccattcatgaagcacccgctcaagattgtcctgcgcggagtgacaaacgaccaagtcgatccaagcgtgtctattgagaataagccctggtgtggattttgtttcgtttcttgccacaacccaacctgcgaaaagaaagtgccatataaggcccagttttactataagtgcattttactcttgctcttcacgctccggtttcggggatag

SEQ ID NO: 159157 - DNA, 1122 bp, Artificial Sequence
  derived and/or modified sequence
atggctacacaggcccattcactatcatatgctgggtgtaacttcctacgccagaggttggtgttaagtacattgagcggccgacctgttaagataaggaaaattcgggcaagggacgacaaccccggtttgcgtgatttcgaagcttcattcatccgattgcttgataaaataactaacggctcgaggattgagattaaccaaactggcaccacactctactaccagccagggcttctttatggaggcagtgtggagcatgattgtagcgtgctgcggggaattggctactatctggagagcctcctctgtttggctcctttcatgaaacatcctctcaaaatcgtgttacgaggggtgacaaacgatcaagtcgacccctctgtggacgttcttaaggcaactgccctgcccctgctgaagcagttcggaatcgatggcgagtcatttgaactgaagatcgtacggaggggaatgccaccgggaggtggtggcgaggtggtgtttagctgccccgtgcgcaaggtgctcaagcctatccaactgaccgacccaggcaagatcaaaaggattagaggcatggcatactccgtgcgtgtgagcccccagatggccaatcgcattgtagattccgctaggagcattctaaacaagttcataccagacatctatatatatactgaccacatgaagggggtgaattctgggaagtcccccggttttggcctgagcttagtagctgagaccacatcaggaacattcctgtctgcagagctggcatctaatccacagggccaaggagcggctgtcctacctgaggatttagggagaaattgtgcacgcctgctgctggaggaaatataccgtggcggatgcgtggattccacgaaccagtctcttgcgctgctgctaatgacccttggtcagcaggacgtgtcgaaagtgctgcttggtcccctgagcccatacacgattgagttcctcagacacctgaaaagtttctttcagatcatgttcaagatagaaacaaaaccctgcggtgaagagttgaagggcggagataaagtgctgatgacatgcgtagggattggattttcaaatctctccaaaacgctgaagtag

SEQ ID NO: 159158 - DNA, 528 bp, Artificial Sequence
  derived and/or modified sequence
atggccacccaggcccacagcctgagctacgccggctgcaacttcctgagacagagactggtgctgagcaccctgagcggcagacccgtgaagatcagaaagatcagagccagagacgacaaccccggcctgagagacttcgaggccagcttcatcagactgctggacaagatcaccaacggcagcagaatcgagatcaaccagaccggcaccaccctgtactaccagcccggcctgctgtacggcggcagcgtggagcacgactgcagcgtgctgagaggcatcggctactacctggagagcctgctgtgcctggcccccttcatgaagcaccccctgaagatcgtgctgagaggcgtgaccaacgaccaggtggaccccagcgtgagcatcgagaacaagccctggtgcggcttctgcttcgtgagctgccacaaccccacctgcgagaagaaggtgccctacaaggcccagttctactacaagtgcatcctgctgctgctgttcaccctgagattcagaggctag

SEQ ID NO: 159159 - DNA, 1122 bp, Artificial Sequence
  derived and/or modified sequence
atggccacccaggcccacagcctgagctacgccggctgcaacttcctgagacagagactggtgctgagcaccctgagcggcagacccgtgaagatcagaaagatcagagccagagacgacaaccccggcctgagagacttcgaggccagcttcatcagactgctggacaagatcaccaacggcagcagaatcgagatcaaccagaccggcaccaccctgtactaccagcccggcctgctgtacggcggcagcgtggagcacgactgcagcgtgctgagaggcatcggctactacctggagagcctgctgtgcctggcccccttcatgaagcaccccctgaagatcgtgctgagaggcgtgaccaacgaccaggtggaccccagcgtggacgtgctgaaggccaccgccctgcccctgctgaagcagttcggcatcgacggcgagagcttcgagctgaagatcgtgagaagaggcatgccccccggcggcggcggcgaggtggtgttcagctgccccgtgagaaaggtgctgaagcccatccagctgaccgaccccggcaagatcaagagaatcagaggcatggcctacagcgtgagagtgagcccccagatggccaacagaatcgtggacagcgccagaagcatcctgaacaagttcatccccgacatctacatctacaccgaccacatgaagggcgtgaacagcggcaagagccccggcttcggcctgagcctggtggccgagaccaccagcggcaccttcctgagcgccgagctggccagcaacccccagggccagggcgccgccgtgctgcccgaggacctgggcagaaactgcgccagactgctgctggaggagatctacagaggcggctgcgtggacagcaccaaccagagcctggccctgctgctgatgaccctgggccagcaggacgtgagcaaggtgctgctgggccccctgagcccctacaccatcgagttcctgagacacctgaagagcttcttccagatcatgttcaagatcgagaccaagccctgcggcgaggagctgaagggcggcgacaaggtgctgatgacctgcgtgggcatcggcttcagcaacctgagcaagaccctgaagtag

SEQ ID NO: 159160 - protein, 671 aa, Artificial Sequence
  derived and/or modified sequence
MQGPPRSLRAGLSLDDFIPGHLQSHIGSSSRGTRVPVIRNGGSNTLNFQFHDPAPRTVCNGGYTPRRDASQHPDPAWYQTWPGPGSKPSASTKIPASQHTQNWSATWTKDSKRRDKRWVKYEGIGPVDESGMPIAPRSSVDRPRDWYRRMFQQIHRKMPDLQLDWTFEEPPRDPRHLGAQQRPAHRPGPATSSSGRSWDHSEELPRSTFNYRPGAFSTVLQPSNQVLRRREKVDNVWTEESWNQFLQELETGQRPKKPLVDDPGEKPSQPIEVLLERELAELSAELDKDLRAIETRLPSPKSSPAPRRAPEQRPPAGPASAWSSSYPHAPYLGSARSLSPHKMADGGSPFLGRRDFVYPSSTRDPSASNGGGSPARREEKKRKAARLKFDFQAQSPKELTLQKGDIVYIHKEVDKNWLEGEHHGRLGIFPANYVEVLPADEIPKPIKPPTYQVLEYGEAVAQYTFKGDLEVELSFRKGEHICLIRKVNENWYEGRITGTGRQGIFPASYVQVSREPRLRLCDDGPQLPTSPRLTAAARSARHPSSPSALRSPADPIDLGGQTSPRRTGFSFPTQEPRPQTQNLGTPGPALSHSRGPSHPLDLGTSSPNTSQIHWTPYRAMYQYRPQNEDELELREGDRVDVMQQCDDGWFVGVSRRTQKFGTFPGNYVAPV

SEQ ID NO: 159161 - DNA, 2016 bp, Artificial Sequence
  derived and/or modified sequence
atgcagggcccccccagaagcctgagagccggcctgagcctggacgacttcatccccggccacctgcagagccacatcggcagcagcagcagaggcaccagagtgcccgtgatcagaaacggcggcagcaacaccctgaacttccagttccacgaccccgcccccagaaccgtgtgcaacggcggctacacccccagaagagacgccagccagcaccccgaccccgcctggtaccagacctggcccggccccggcagcaagcccagcgccagcaccaagatccccgccagccagcacacccagaactggagcgccacctggaccaaggacagcaagagaagagacaagagatgggtgaagtacgagggcatcggccccgtggacgagagcggcatgcccatcgcccccagaagcagcgtggacagacccagagactggtacagaagaatgttccagcagatccacagaaagatgcccgacctgcagctggactggaccttcgaggagccccccagagaccccagacacctgggcgcccagcagagacccgcccacagacccggccccgccaccagcagcagcggcagaagctgggaccacagcgaggagctgcccagaagcaccttcaactacagacccggcgccttcagcaccgtgctgcagcccagcaaccaggtgctgagaagaagagagaaggtggacaacgtgtggaccgaggagagctggaaccagttcctgcaggagctggagaccggccagagacccaagaagcccctggtggacgaccccggcgagaagcccagccagcccatcgaggtgctgctggagagagagctggccgagctgagcgccgagctggacaaggacctgagagccatcgagaccagactgcccagccccaagagcagccccgcccccagaagagcccccgagcagagaccccccgccggccccgccagcgcctggagcagcagctacccccacgccccctacctgggcagcgccagaagcctgagcccccacaagatggccgacggcggcagccccttcctgggcagaagagacttcgtgtaccccagcagcaccagagaccccagcgccagcaacggcggcggcagccccgccagaagagaggagaagaagagaaaggccgccagactgaagttcgacttccaggcccagagccccaaggagctgaccctgcagaagggcgacatcgtgtacatccacaaggaggtggacaagaactggctggagggcgagcaccacggcagactgggcatcttccccgccaactacgtggaggtgctgcccgccgacgagatccccaagcccatcaagccccccacctaccaggtgctggagtacggcgaggccgtggcccagtacaccttcaagggcgacctggaggtggagctgagcttcagaaagggcgagcacatctgcctgatcagaaaggtgaacgagaactggtacgagggcagaatcaccggcaccggcagacagggcatcttccccgccagctacgtgcaggtgagcagagagcccagactgagactgtgcgacgacggcccccagctgcccaccagccccagactgaccgccgccgccagaagcgccagacaccccagcagccccagcgccctgagaagccccgccgaccccatcgacctgggcggccagaccagccccagaagaaccggcttcagcttccccacccaggagcccagaccccagacccagaacctgggcacccccggccccgccctgagccacagcagaggccccagccaccccctggacctgggcaccagcagccccaacaccagccagatccactggaccccctacagagccatgtaccagtacagaccccagaacgaggacgagctggagctgagagagggcgacagagtggacgtgatgcagcagtgcgacgacggctggttcgtgggcgtgagcagaagaacccagaagttcggcaccttccccggcaactacgtggcccccgtgtag

SEQ ID NO: 159162 - DNA, 2016 bp, Artificial Sequence
  derived and/or modified sequence
atgcagggacccccacggagcctgagggccggcttgagtttggatgactttattccagggcatctgcaaagtcatattggcagttctagcaggggtacgcgggtccctgtgattcggaacggcggcagcaataccctcaacttccagtttcacgaccccgcacccaggactgtttgcaacggcgggtacacacctcgcagggatgcatcccaacatccagacccggcgtggtatcagacctggccagggcccggaagcaaaccaagcgcctccaccaaaatacctgccagccagcatactcagaattggagcgcgacgtggaccaaagactcaaaacgacgagacaaaagatgggtgaagtacgaaggcataggccccgttgacgaaagtggcatgcctatcgctccgaggtcatccgttgatcgtccccgggactggtatagacggatgtttcagcaaattcatcgaaagatgccagacctacagctcgactggacttttgaggagccgcccagagatcctcgacatctaggggcacagcagaggcctgcccaccgacctggccccgcaacctctagttcaggtcgctcttgggaccactccgaagagctgccacggtccacttttaactaccggccaggcgcattttctactgtgctgcagccttctaaccaggttctgagaagacgagagaaagtggataatgtatggaccgaggaatcctggaatcagttcttgcaggaattagagactgggcagaggccaaagaagccattagttgacgacccaggagagaaaccgtcccagcccatcgaagtgctgttggagagggagctcgctgaactgtcagcagaacttgataaggacctacgtgccattgagaccagactcccttcacctaagtctagtcccgcacccagacgcgctcccgaacaaaggccccctgctggacccgcctccgcctggtctagttcctacccacatgctccttatttgggttctgctcggagtctttcaccccacaaaatggctgatgggggctcgccttttctcggaagaagggacttcgtttacccctcaagcaccagagacccaagcgccagcaatgggggggggagtccagccaggagagaggaaaagaagaggaaagctgctaggctgaagttcgattttcaggcccagtctccaaaagagctgacattacagaaaggggacatcgtctatatccataaggaggtggacaagaattggctagagggagaacaccacggccgcctcggcatctttcctgctaactacgtggaggtattacctgccgacgaaattcccaagccaattaaacctcctacgtatcaggtgttggagtacggggaagcagttgcccagtacacctttaagggcgacctggaggttgagctgagcttccgcaagggtgaacatatttgtttgattcggaaggtgaacgagaattggtacgagggaaggatcactggcacaggcagacagggaattttcccagcctcatacgtgcaagtgagtcgggaaccgcgcctgcgcttgtgtgatgatggtccacagttacccacctcacctcgattgaccgccgccgctagaagcgccagacatccaagctcgccctccgccctgcggagcccagccgacccaatcgatttaggcggacagacttccccaaggcgcaccggcttcagctttccaacccaggagccgagaccgcaaacccaaaacctggggacacccggtcctgcattatcacattcccggggaccctctcaccctctcgacttgggaaccagttcacccaacacctctcaaatccactggaccccttaccgcgccatgtatcagtatagaccgcagaatgaggacgaattggagctaagggagggggatagagtggatgtgatgcagcagtgcgatgatggctggtttgttggagtgagtaggcgtactcagaagttcggaaccttccccggcaactatgtggccccagtgtag

SEQ ID NO: 159163 - DNA, 2016 bp, Artificial Sequence
  derived and/or modified sequence
atgcagggcccccccaggagcctgcgggccggcctgagcctggatgacttcatccctggccacctgcagagccacatcggcagcagcagccggggcaccagggtgcctgtgatcagaaatggaggcagcaacaccctgaacttccagttccatgaccctgcccccaggacagtgtgcaatggaggctacacccccaggagagatgccagccagcacccagaccctgcctggtaccagacctggccaggccctggcagcaagcccagcgccagcaccaagatcccagccagccagcacacccagaactggagcgccacctggaccaaggacagcaagagaagagacaagcgctgggtgaagtatgagggcatcggccctgtggatgagagcggcatgcccatcgcccccaggagctctgtggaccggccccgggactggtacagaaggatgttccagcagatccacaggaagatgccagacctgcagctggactggacctttgaggagcccccccgggaccccaggcacctgggcgcccagcagaggcctgcccacaggcctggccctgccaccagcagcagcggccgctcctgggaccacagcgaggagctgcccaggagcaccttcaactacagacctggggccttcagcacagtgctgcagcccagcaaccaggtgctgcggcggcgggagaaggtggacaacgtgtggacagaggagagctggaaccagttcctgcaggagctggagaccggccagaggcccaagaagcccctggtggatgatcctggagagaagcccagccagcccatcgaggtgctgctggagcgggagctggccgagctgtctgctgagctggacaaggacctgcgggccatcgagacccggctgcccagccccaagagcagccctgccccccggcgggcccctgagcagaggcccccagctggccctgccagcgcctggagcagcagctacccccacgccccctacctgggcagcgcccggagcctgagcccccacaagatggctgatggcggcagccccttcctgggcagaagagactttgtgtaccccagcagcacccgggaccccagcgccagcaatggaggcggcagccctgcccggcgggaggagaagaagaggaaggccgcccggctgaagtttgacttccaggcccagagccccaaggagctgaccctgcagaagggggacatcgtgtacatccacaaggaggtggacaagaactggctggagggggagcaccacggccgcctgggcatcttccctgccaactacgtggaggtgctgcctgcagatgagatccccaagcccatcaagccacccacctaccaggtgctggagtatggagaggccgtggcccagtacaccttcaagggggacctggaggtggagctgtccttcagaaaaggagagcacatctgcctgatcaggaaggtgaatgaaaactggtatgagggccgcatcactggaacaggccggcagggcatcttccctgccagctatgtgcaggtgtcccgggagccccggctgcggctgtgtgatgatggcccccagctgcccaccagcccccggctgacagctgctgcccggagcgcccggcaccccagcagccccagcgccctgcggagccctgctgaccccatcgacctgggcggccagaccagccccaggagaacaggcttctccttccccacccaggagccccggccccagacccagaacctgggcaccccaggccctgccctgagccacagccggggccccagccaccccctggacctgggcaccagcagccccaacaccagccagatccactggaccccctaccgggccatgtaccagtaccggccccagaatgaagatgagctggagctgcgggagggggacagagtggatgtgatgcagcagtgtgatgatggctggtttgtgggcgtgtccaggaggacccagaagtttggcaccttccctggcaactacgtggcccctgtgtag

SEQ ID NO: 159164 - DNA, 2016 bp, Artificial Sequence
  derived and/or modified sequence
atgcagggccccccccggagcctgcgggccggcctgagcctggacgatttcatcccgggacacctgcagagtcacattgggagctcatcccgcggcactagggtccccgttatcagaaatggaggttctaacaccctcaacttccaatttcatgatcctgcaccaagaaccgtgtgtaatggaggttatacaccacgtagagatgcctctcaacatcccgatcctgcctggtaccagacatggcctggacctggttccaagcccagcgcctctacaaagatcccagcctcacagcacacgcaaaactggtcagcaacctggaccaaagatagcaagaggagagataagcgatgggttaagtacgaaggcatcggccctgtggacgaatccggtatgcccatcgccccacggtctagtgtagaccgcccaagggattggtatcgacggatgtttcagcagatccacagaaagatgcctgatctccagctcgactggaccttcgaggaacccccaagagatccccggcacctgggcgcacagcagcgacccgcccataggccgggccccgccacatcatccagtggacgcagctgggaccactccgaggagctcccgcggtccacattcaattaccgtccgggggctttctccaccgtgctacagccatccaatcaggtgctgcgaagacgcgaaaaagttgataatgtctggaccgaagaatcatggaatcagttcctgcaggaattggagaccggtcagcgcccaaaaaaaccgctggtggacgatcccggtgaaaagccatcccaacccatcgaggtgcttcttgagcgtgagttggctgagcttagcgctgagttagataaggatctgagggcaattgagacaaggctcccctctcctaagagtagccctgccccacgccgtgccccagagcagcggccacccgcgggccccgcttctgcctggtcttcttcctaccctcatgcaccatatctgggttctgccaggagcttatccccacataaaatggccgatggagggtctccctttcttggacgccgcgacttcgtctatccttcgtctacacgggacccctccgcctctaacggcggaggctcccccgcccgaagggaagaaaagaagcgcaaggcagcccgcctgaagtttgacttccaagctcagtccccgaaagaactcactctgcaaaagggcgatatcgtgtacatccacaaggaagtggataagaattggctggaaggcgaacaccacggcaggctgggcatattcccagctaactacgtggaagtcctgcccgcagacgagattcctaagcctatcaagccaccaacttaccaagttctcgagtatggggaggcagtcgcccaatacacctttaaaggggacctcgaggtagagttgagttttcggaaaggcgaacacatctgtttgattcgcaaggtcaatgaaaattggtacgagggacgcattacaggaaccggtagacaagggatctttcccgcatcttacgtacaggtgtctagagagcctcggttgcgactgtgtgacgacggcccacagctgccaacttcccctagactgacagccgctgctagaagtgctaggcacccgagtagcccttcggccctacgatctccggcagacccaattgatctcggcggccaaaccagcccccgacgaacaggcttcagcttccccacccaggaacctcgcccacaaacccaaaatctggggactccaggccctgccctatcgcatagccgagggcccagccaccctctcgaccttggaaccagcagccctaacacctcccagattcactggacaccttatagagcaatgtatcagtaccggcctcagaacgaagatgagcttgaactgagggaaggggaccgggtcgatgtcatgcagcagtgcgatgacgggtggtttgtgggagtgagccggcgaacacagaaattcggaacttttcctggcaattacgtggcaccagtatag

SEQ ID NO: 159165 - DNA, 2016 bp, Artificial Sequence
  derived and/or modified sequence
atgcagggaccacctcgaagccttcgggcagggttatccctcgacgatttcattcccggacacttacagtcccacattggatcttcctcccggggtacccgggtgcctgtgatccgaaacggcggaagtaataccctgaatttccaatttcatgatccagcgccacgcaccgtttgtaacggaggctacactcctcgccgagatgctagccaacacccagacccggcttggtatcaaacctggccagggccaggaagtaagccaagtgcgagcactaagattcctgcatcacagcacacccaaaactggtctgccacctggaccaaggactcgaaaaggcgggataagaggtgggtgaaatacgagggaatcggtccggttgatgagagcgggatgccaattgctcctcgttccagcgtagaccggccaagagattggtatcggcgtatgttccagcaaattcacaggaaaatgcctgatctgcagctcgactggacatttgaggagccaccacgcgatccccgacatctcggcgcacagcagcgccctgcccatcgtcctggccctgccacatcgtcctctggtaggtcctgggatcatagcgaggagttgcctcgatctaccttcaattatcgccctggcgctttttccacagtgctgcagccatcaaaccaggtgctgaggcgccgagagaaggtggacaatgtctggaccgaggaatcttggaatcaatttttgcaggagctagaaacggggcagagacccaagaaacccctggtcgacgatcccggagaaaagccaagccagcctattgaagtcttgctggaacgcgaactggcagagctgtctgccgaactggacaaggacctgcgggcaatcgaaacaagattgccatctccgaaatcttcacctgctccccgaagggcaccggagcagcggcctccggctgggccagcaagtgcatggtcttctagctatccccacgccccttatctcggatctgctcggagtctgtctccacataaaatggctgatggaggaagccccttcttgggccgtcgggattttgtttacccgagcagtacacgagacccctccgcttccaatggcggaggaagcccagcaagacgcgaggagaagaaacgcaaggccgctaggctaaagttcgactttcaggctcagtccccaaaggagttgaccctgcaaaagggcgatatcgtctatatccataaagaggtggacaaaaactggctggaaggcgagcatcacggacggctgggcatcttcccagcaaactatgttgaggtgctgcctgccgacgagattcccaaacccatcaagccgccaacctatcaagtcctggagtacggagaagcagtggcacagtacacgttcaagggggacctagaagtcgagttgtccttccgcaaaggtgagcatatctgcttgattcggaaggtgaacgaaaactggtacgagggcagaattacgggcactgggcgacaaggaatcttcccagcatcatatgtgcaggtgtcgagggaaccgagattacggctgtgcgacgatggtccccagttgcctacatcccccagactgacagcagccgcacgcagcgcgaggcatccttctagcccgtcggccttgaggtcaccagccgacccgatcgacctcgggggacagacgtccccacggagaaccggatttagcttcccgacccaagaaccaaggccacaaacccaaaacctcgggaccccagggcctgcattatcccattcccgcggtccaagtcaccccctggacctgggaaccagcagtccaaacacatcccagatacattggactccgtacagggctatgtatcagtatcgtccccagaacgaggacgaactggagctccgagaaggtgaccgcgttgacgttatgcagcagtgcgacgatggctggttcgtgggtgtgagccgtagaacccagaagtttggaacctttccgggtaactatgttgcacccgtatag

SEQ ID NO: 159166 - DNA, 3459 bp, Artificial Sequence
  derived and/or modified sequence
cgcgcgcgccccgacggacggagagcactcgcacgtccctcctctccggcccagccccggcccgcagtccagatccgagacccaaactccgcccgccccgccgcgcgactctcacggtccggcctccggcgcgcgccccttcggcctccctcttcctgcgccggcgcccggcccggcccggcccgtcctgacccggtcacgagggccgcgacggcccgcgcttctccttgcccttcctcctcgagcgcccgcgccaggcagcagccgggcagggatgctcctgcgctcccgggcggcctcgggcccagccacctgctcgccggggaagaggacacgcagaggagcagctggcttgcccggagtcctcccaccttgacccaagcatgcagggcccaccccgcagcctccgcgctgggctcagcctggacgacttcatccctggccacctccagtcccacatagggtcttcctcccgggggacacgggtgcccgtgatccggaatggtggctccaacacccttaatttccagttccacgaccccgcgcccaggactgtgtgcaatgggggctacacaccaagacgagatgcttcccagcacccggaccctgcgtggtatcagacctggccaggccctgggagcaagccctctgcaagcacaaagatccctgcctcccagcacacccagaactggtcagccacgtggaccaaggacagcaagcgtcgggacaagcgctgggtcaagtacgagggaatcgggcccgtggacgagagcggcatgcccattgccccccgatccagcgttgacagacccagagactggtaccggagaatgttccagcagattcaccggaaaatgccagacttgcagctggactggaccttcgaggagccacccagagaccccaggcatctaggagcccagcaaagacctgcccacaggcccggcccggcaacatcttccagtggaagaagctgggaccactctgaagagttacctagaagcaccttcaactacagacctggagcattctccactgtgctgcagccctcaaatcaggtgctcagacgccgggaaaaagtagacaatgtctggacggaagagtcctggaaccagtttctgcaggaactagagactgggcagaggcccaagaaaccgctggtggacgaccctggtgagaagccctcccagcccattgaggtgctgctggagagagagctggccgagctgagcgccgagctggacaaggacctgcgggcaattgagacccgactgccgtcccccaagagctcgccggcgccccgacgggccccggagcagcggcccccggccggcccggcctcagcctggagctccagctacccacatgcaccttacctgggttccgcccggtccctgagtccccacaaaatggctgatggaggaagccccttcctaggtcggagggactttgtctacccttcctcaacccgagaccctagtgcctctaacggagggggcagcccagccaggagggaagagaagaagagaaaggccgccaggctcaagtttgacttccaggcgcagtcccccaaggagctgactctgcagaagggtgacattgtctacatccacaaggaggtggacaagaactggctggagggagagcaccacggccgcctgggcatcttccctgctaattatgtggaggtgctgcccgcagatgagatccctaagcccatcaagcccccgacctaccaggtgctggagtatggagaggctgtggcccagtacaccttcaagggggacctggaggtggagctgtccttccgcaagggagagcacatctgcctgatccgcaaggtgaacgagaactggtacgagggacgcatcacgggcacggggcgccaaggcatattccctgccagctacgtgcaggtgtctcgtgaaccccggctccggctctgtgacgacggcccccagctccccacgtctccccgcctgaccgctgccgcccgctcagcccgtcaccccagctccccctcagccctgcgcagcccagctgaccccatcgacttggggggacagacctccccccgtcgcactggcttctccttccccacccaggagcctagaccccagacccagaatcttggcacccctggtccagctctgtcccactctcgaggtcccagccatcccctggacctggggacctcctctcctaacacctctcagatacactggaccccgtaccgggcgatgtaccagtacaggccccagaacgaagacgagctggagctgcgcgagggggacagggtggatgtcatgcagcagtgtgacgatggctggtttgtgggtgtctcccggaggacccagaaattcggaacgttccctggaaattacgttgccccggtgtgagtggtctccatggcaacttggagccagccaggatggggtggggagcggtggcactcgtgggagggagaggacccccgcccacatcctccttccccaggacctgagctcccagcatctgcagacgacccccgcagcctttccctcggacccccctcgaagccccctggactgattcccacccacgactcacaggcattcctcccacagccctttcatttcctccccaccccactccccaaatacagaggtctgctttgaagcggagaccatttccaggccttattgagaccagaccccaagtcccccacccccatcctgctccagcgtttcctctaacagggaccagctctccgctttgcccccacggggttcctctaaccagaaccagcttcctagcctcgtagagaccaaaggccgcccccgcctgctggggttcctcccagcaccccagcttgctggctgccctctttgccttctggcctccagctgggtgtgggggggcggagcaaggcgggggacagacgcagcaccttcttagcgatctaggcctggcaagagctctggccccaaggcctcctcttcccaggggctgccaagtcctggccctggccctggcatatcaccccgcactgtggggccaggcaccactagcctggctcaaatattccccagggagactgctgtgtgctgcccgcctgcctgctggctctcccccagccccacatcccctctggaagagaatgtaaaataaacctggacacaagggaccttgtctctgcggccttttccttggggtaggggatgcctcctcctgtctaggagatgggaattccttctgtggagggctgtgctgggagacaggtgggacaggtgtgtgtgtaagaggaggaggatggaaaaacaccattattacctccaaagatctctgcccttgggtgtcaggcaggttgcggcagcccccacaattgggcagctgtgtggcaagaagtgctgggagaatgaacagtgccaggccctggtagcagggagacaccagagatgggggactgaatgtggcctt

SEQ ID NO: 159167 - protein, 520 aa, Artificial Sequence
  derived and/or modified sequence
MWGDSRPANRTGPFRGSQEERFAPGWNRDYPPPPLKSHAQERHSGNFPGRDSLPFDFQGHSGPPFANVEEHSFSYGARDGPHGDYRGGEGPGHDFRGGDFSSSDFQSRDSSQLDFRGRDIHSGDFRDREGPPMDYRGGDGTSMDYRGREAPHMNYRDRDAHAVDFRGRDAPPSDFRGRGTYDLDFRGRDGSHADFRGRDLSDLDFRAREQSRSDFRNRDVSDLDFRDKDGTQVDFRGRGSGTTDLDFRDRDTPHSDFRGRHRSRTDQDFRGREMGSCMEFKDREMPPVDPNILDYIQPSTQDREHSGMNVNRREESTHDHTIERPAFGIQKGEFEHSETREGETQGVAFEHESPADFQNSQSPVQDQDKSQLSGREEQSSDAGLFKEEGGLDFLGRQDTDYRSMEYRDVDHRLPGSQMFGYGQSKSFPEGKTARDAQRDLQDQDYRTGPSEEKPSRLIRLSGVPEDATKEEILNAFRTPDGMPVKNLQLKEYNTGNSNDPGQRSYPGVCIKPGFLVLQTM

SEQ ID NO: 159168 - protein, 142 aa, Artificial Sequence
  derived and/or modified sequence
MWGDSRPANRTGPFRGSQEERFAPGWNRDYPPPPLKSHAQERHSGNFPGRDSLPFDFQGHSGPPFANVEEHSFSYGARDGPHGDYRGGEGPGHDFRGGDFSSSDFQSRDSSQLDFRGRDIHSGDFRDREGPPMDYRGGDGTS

SEQ ID NO: 159169 - protein, 76 aa, Artificial Sequence
  derived and/or modified sequence
MWGDSRPANRTGPFRGSQEERFAPGWNRDYPPPPLKSHAQERHSGNFPGRDSLPFDFQGHSGPPFANVEEHSFSYG

SEQ ID NO: 159170 - protein, 1123 aa, Artificial Sequence
  derived and/or modified sequence
MWGDSRPANRTGPFRGSQEERFAPGWNRDYPPPPLKSHAQERHSGNFPGRDSLPFDFQGHSGPPFANVEEHSFSYGARDGPHGDYRGGEGPGHDFRGGDFSSSDFQSRDSSQLDFRGRDIHSGDFRDREGPPMDYRGGDGTSMDYRGREAPHMNYRDRDAHAVDFRGRDAPPSDFRGRGTYDLDFRGRDGSHADFRGRDLSDLDFRAREQSRSDFRNRDVSDLDFRDKDGTQVDFRGRGSGTTDLDFRDRDTPHSDFRGRHRSRTDQDFRGREMGSCMEFKDREMPPVDPNILDYIQPSTQDREHSGMNVNRREESTHDHTIERPAFGIQKGEFEHSETREGETQGVAFEHESPADFQNSQSPVQDQDKSQLSGREEQSSDAGLFKEEGGLDFLGRQDTDYRSMEYRDVDHRLPGSQMFGYGQSKSFPEGKTARDAQRDLQDQDYRTGPSEEKPSRLIRLSGVPEDATKEEILNAFRTPDGMPVKNLQLKEYNTGYDYGYVCVEFSLLEDAIGCMEANQGTLMIQDKEVTLEYVSSLDFWYCKRCKANIGGHRSSCSFCKNPREVTEAKQELITYPQPQKTSIPAPLEKQPNQPLRPADKEPEPRKREEGQESRLGHQKREAERYLPPSRREGPTFRRDRERESWSGETRQDGESKTIMLKRIYRSTPPEVIVEVLEPYVRLTTANVRIIKNRTGPMGHTYGFIDLDSHAEALRVVKILQNLDPPFSIDGKMVAVNLATGKRRNDSGDHSDHMHYYQGKKYFRDRRGGGRNSDWSSDTNRQGQQSSSDCYIYDSATGYYYDPLAGTYYDPNTQQEVYVPQDPGLPEEEEIKEKKPTSQGKSSSKKEMSKRDGKEKKDRGVTRFQENASEGKAPAEDVFKKPLPPTVKKEESPPPPKVVNPLIGLLGEYGGDSDYEEEEEEEQTPPPQPRTAQPQKREEQTKKENEEDKLTDWNKLACLLCRRQFPNKEVLIKHQQLSDLHKQNLEIHRKIKQSEQELAYLERREREGKFKGRGNDRREKLQSFDSPERKRIKYSRETDSDRKLVDKEDIDTSSKGGCVQQATGWRKGTGLGYGHPGLASSEEAEGRMRGPSVGASGRTSKRQSNETYRDAVRRVMFARYKELD

SEQ ID NO: 159171 - DNA, 1886 bp, Artificial Sequence
  derived and/or modified sequence
cggtgtccgcggcgctgggtcggtggcggaggctgaggagaaggaggagcgggccgtggaggcttcgccgcctaggtactgctataaccagaatttggtagaaaaaggatttacttgttggggccctcttgataaaaagagatgtggggggattctcgacctgctaacagaactggaccttttcgtgggagccaagaagaaaggtttgctcccgggtggaacagggattatcctcctcctccccttaagagtcatgctcaagagagacactctggcaactttcctggcagagattcacttccctttgatttccaggggcattcggggcctccttttgcaaatgtagaggagcattctttcagctatggagctagagacggaccgcatggtgactatcgaggaggggagggacctggacatgatttcagggggggagatttttcgtcttctgatttccagagcagagattcatcacagttggacttcaggggtagggacatacattctggggattttcgggatagagaaggaccacctatggactataggggtggagatggtacttctatggattatagaggtagggaggcacctcatatgaactacagagacagggatgctcacgctgttgacttcagaggtagggatgctcctccatctgacttcaggggccggggcacttatgatttagattttagaggccgggatggatcccatgcagattttaggggaagggatttatcagatttggattttagggccagagaacagtcccgttctgattttaggaatagagatgtatctgatttggactttagagacaaagacggaacacaagtagactttagaggccgaggttcaggtactactgatctagactttagggacagggatacgccacattcagatttcagaggtagacaccgatctaggactgatcaggattttaggggcagagagatgggatcttgtatggaatttaaagatagggagatgccccctgtggatccaaatattttggattacattcagccctctacacaagatagagaacattctggtatgaatgtgaacaggagagaagaatccacacatgaccatacgatagaaaggcctgcttttggcattcagaagggagaatttgagcattcagaaacaagagaaggagaaacacaaggtgtagcctttgaacatgagtctccagcagactttcagaacagccaaagtccagttcaagaccaagataagtcacagctttctggacgtgaagagcagagttcagatgctggtctgtttaaagaagaaggcggtctggactttcttgggcggcaagacaccgattacagaagcatggagtaccgtgatgtggatcataggctgccaggaagccagatgtttggctatggccagagcaagtcttttccagagggcaaaactgcccgagatgcccaacgggaccttcaggatcaagattataggaccggcccaagtgaggagaaacccagcaggcttattcgattaagtggggtacctgaagatgccacaaaagaagagattcttaatgcttttcggactcctgatggcatgcctgtaaagaacttgcagttgaaggagtataacacagggaactctaatgatccaggacaaagaagttaccctggagtatgtatcaagcctggatttttggtactgcaaacgatgtaaggcaaacattggtgggcaccgatcttcctgttcattctgcaagaacccaagagaagtgacagaggccaagcaagaattaataacctaccctcagcctcagaaaacatccataccagcaccattggaaaaacagcccaaccagcccctaagaccagctgataaggaacctgaacccaggaaga

SEQ ID NO: 159172 - DNA, 4010 bp, Artificial Sequence
  derived and/or modified sequence
agtaagagtctgcgggaccggcagctgtacttcatctcccagcgggccgagcgctgaaggcagcggcgcggcgcctttgtggtagcagtggccccgcgcggaggaagttccggtgtccgcggcgctgggtcggtggcggaggctgaggagaaggaggagcgggccgtggaggcttcgccgcctaggtactgctataaccagaatttggtagaaaaaggatttacttgttggggccctcttgataaaaagagatgtggggggattctcgacctgctaacagaactggaccttttcggactgggtgaaagctttttctgcagcagtcatgttgaaaaccttgtgttgactttcctcgtgttctgaaatgggagcataaaagtttactccgccacttcgtcttaaaatagcaaaactttgctgttttctgcagatctaggaccttgttacagaactctgccaaaaaaaaaatgtttacagaagaatgtgctgtgattagagaagaatatgctggtgtgtagatttcaaactctctggacaatatgaataacactgtctttgtttctacagtgggagccaagaagaaaggtttgctcccgggtggaacagggattatcctcctcctccccttaagagtcatgctcaagagagacactctggcaactttcctggcagagattcacttccctttgatttccaggggcattcggggcctccttttgcaaatgtagaggagcattctttcagctatggagctagagacggaccgcatggtgactatcgaggaggggagggacctggacatgatttcagggggggagatttttcgtcttctgatttccagagcagagattcatcacagttggacttcaggggtagggacatacattctggggattttcgggatagagaaggaccacctatggactataggggtggagatggtacttctatggattatagaggtagggaggcacctcatatgaactacagagacagggatgctcacgctgttgacttcagaggtagggatgctcctccatctgacttcaggggccggggcacttatgatttagattttagaggccgggatggatcccatgcagattttaggggaagggatttatcagatttggattttagggccagagaacagtcccgttctgattttaggaatagagatgtatctgatttggactttagagacaaagacggaacacaagtagactttagaggccgaggttcaggtactactgatctagactttagggacagggatacgccacattcagatttcagaggtagacaccgatctaggactgatcaggattttaggggcagagagatgggatcttgtatggaatttaaagatagggagatgccccctgtggatccaaatattttggattacattcagccctctacacaagatagagaacattctggtatgaatgtgaacaggagagaagaatccacacatgaccatacgatagaaaggcctgcttttggcattcagaagggagaatttgagcattcagaaacaagagaaggagaaacacaaggtgtagcctttgaacatgagtctccagcagactttcagaacagccaaagtccagttcaagaccaagataagtcacagctttctggacgtgaagagcagagttcagatgctggtctgtttaaagaagaaggcggtctggactttcttgggcggcaagacaccgattacagaagcatggagtaccgtgatgtggatcataggctgccaggaagccagatgtttggctatggccagagcaagtcttttccagagggcaaaactgcccgagatgcccaacgggaccttcaggatcaagattataggaccggcccaagtgaggagaaacccagcaggcttattcgattaagtggggtacctgaagatgccacaaaagaagagattcttaatgcttttcggactcctgatggcatgcctgtaaagaacttgcagttgaaggagtataacacaggttacgactatggctatgtctgcgtggagttttcactcttggaagatgccatcggatgcatggaggccaaccagggaactctaatgatccaggacaaagaagttaccctggagtatgtatcaagcctggatttttggtactgcaaacgatgtaaggcaaacattggtgggcaccgatcttcctgttcattctgcaagaacccaagagaagtgacagaggccaagcaagaattaataacctaccctcagcctcagaaaacatccataccagcaccattggaaaaacagcccaaccagcccctaagaccagctgataaggaacctgaacccaggaagagggaagaaggccaagagtcacgcttaggacatcaaaagagagaagcagaaaggtatctgcctccttctcgaagggaagggccaactttccgaagagaccgagagagggagtcatggtctggagagacacgccaggatggagagagcaaaactatcatgctaaagcgtatctatcgttccacaccacctgaggtgatagtggaagtgctggagccctatgtccgccttactactgccaacgtccgtatcatcaagaacagaacaggccctatggggcatacctatggctttattgacctcgactcccatgcggaagctcttcgtgtggtgaagatcttacagaaccttgatccgccatttagcattgatgggaagatggtagctgtaaacctggccactggaaaacgaagaaatgattctggggaccattctgaccacatgcattactatcagggtaaaaaatatttccgagataggaggggaggtggcagaaattcagactggtcttcagatacaaatcgacaaggacaacagtcatcatctgactgctacatatatgattctgctactggctactattatgaccccttggcaggaacttattatgaccccaatacccagcaagaagtctatgtgccccaggatcctggattacctgaggaagaagagatcaaggaaaaaaaacccaccagtcaaggaaagtcaagtagcaagaaggaaatgtctaaaagagatggcaaggagaaaaaagacagaggagtgacgaggtttcaggaaaatgccagtgaagggaaggcccctgcagaagacgtctttaagaagcccctgcctcctactgtgaagaaggaagagagtccccctccacctaaagtggtaaacccactgatcggcctcttgggtgaatatggaggagacagtgactatgaggaggaagaagaggaggaacagacccctcccccacagccccgcacagcacagccccagaagcgagaggagcaaaccaagaaggagaatgaagaagacaaactcactgactggaataaactggcttgtctgctttgcagaaggcagtttcccaataaagaagttctgatcaaacaccagcagctgtcagacctgcacaagcaaaacctggaaatccaccggaagataaaacagtctgagcaggagctagcctatctggaaaggagagaacgagagggaaagtttaaaggaagaggaaatgatcgcagggaaaagctccagtcttttgactctccagaaaggaaacggattaagtactccagggaaactgacagtgatcgtaaacttgttgataaagaagatatcgacactagcagcaaaggaggctgtgtccaacaggctactggctggaggaaagggacaggcctgggatatggccatcctggattggcttcatcagaggaggctgaaggccggatgaggggccccagtgttggagcctcaggaagaaccagcaaaagacagtccaacgagacttaccgagatgctgttcgaagagtcatgtttgctcgatataaagaactcgattaagaaaggagacaagttccatgggatacaacctccctcttgttttgtttgtctctccttttcttttgttactgttcttgctgctagaacttttttaaataaactttttttcaatgtg

SEQ ID NO: 159173 - DNA, 591 bp, Artificial Sequence
  derived and/or modified sequence
ttcatctcccagcgggccgagcgctgaaggcagcggcgcggcgcctttgtggtagcagtggccccgcgcggaggaagttccggtgtccgcggcgctgggtactgctataaccagaatttggtagaaaaaggatttacttgttggggccctcttgataaaaagagatgtggggggattctcgacctgctaacagaactggaccttttcgtgggagccaagaagaaaggtttgctcccgggtggaacagggattatcctcctcctccccttaagagtcatgctcaagagagacactctggcaactttcctggcagagattcacttccctttgatttccaggggcattcggggcctccttttgcaaatgtagaggagcattctttcagctatggagctagagacggaccgcatggtgactatcgaggaggggagggacctggacatgatttcagggggggagatttttcgtcttctgatttccagagcagagattcatcacagttggacttcaggggtagggacatacattctggggattttcgggatagagaaggaccacctatggactataggggtggagatggtacttcta

SEQ ID NO: 159174 - DNA, 582 bp, Artificial Sequence
  derived and/or modified sequence
agtagattaccggtcccgccgcggagcggccagctgtgaggctggggccggcgcgtggttgcggctctgtgctcctactcttcggagctgtaagcgggctgttcttgcggttttcctgtttcagatccaattctgtggcatcactaggaagggagctcttgtgcttagcacgtagcctcgtcctcagacttggacagacacaagggaggctccgctggaccggagggcacaagagctccgagcccggtcgtcggggcggtagaacctggaagcgggagagtggtctggtactgctataaccagaatttggtagaaaaaggatttacttgttggggccctcttgataaaaagagatgtggggggattctcgacctgctaacagaactggaccttttcgtgggagccaagaagaaaggtttgctcccgggtggaacagggattatcctcctcctccccttaagagtcatgctcaagagagacactctggcaactttcctggcagagattcacttccctttgatttccaggggcattcggggcctccttttgcaaatgtagaggagcattctttcagctatggag

SEQ ID NO: 159175 - DNA, 3748 bp, Artificial Sequence
  derived and/or modified sequence
acggcgggagtaagagtctgcgggaccggcagctgtacttcatctcccagcgggccgagcgctgaaggcagcggcgcggcgcctttgtggtagcagtggccccgcgcggaggaagttccggtgtccgcggcgctgggtcggtggcggaggctgaggagaaggaggagcgggccgtggaggcttcgccgcctaggtactgctataaccagaatttggtagaaaaaggatttacttgttggggccctcttgataaaaagagatgtggggggattctcgacctgctaacagaactggaccttttcgtgggagccaagaagaaaggtttgctcccgggtggaacagggattatcctcctcctccccttaagagtcatgctcaagagagacactctggcaactttcctggcagagattcacttccctttgatttccaggggcattcggggcctccttttgcaaatgtagaggagcattctttcagctatggagctagagacggaccgcatggtgactatcgaggaggggagggacctggacatgatttcagggggggagatttttcgtcttctgatttccagagcagagattcatcacagttggacttcaggggtagggacatacattctggggattttcgggatagagaaggaccacctatggactataggggtggagatggtacttctatggattatagaggtagggaggcacctcatatgaactacagagacagggatgctcacgctgttgacttcagaggtagggatgctcctccatctgacttcaggggccggggcacttatgatttagattttagaggccgggatggatcccatgcagattttaggggaagggatttatcagatttggattttagggccagagaacagtcccgttctgattttaggaatagagatgtatctgatttggactttagagacaaagacggaacacaagtagactttagaggccgaggttcaggtactactgatctagactttagggacagggatacgccacattcagatttcagaggtagacaccgatctaggactgatcaggattttaggggcagagagatgggatcttgtatggaatttaaagatagggagatgccccctgtggatccaaatattttggattacattcagccctctacacaagatagagaacattctggtatgaatgtgaacaggagagaagaatccacacatgaccatacgatagaaaggcctgcttttggcattcagaagggagaatttgagcattcagaaacaagagaaggagaaacacaaggtgtagcctttgaacatgagtctccagcagactttcagaacagccaaagtccagttcaagaccaagataagtcacagctttctggacgtgaagagcagagttcagatgctggtctgtttaaagaagaaggcggtctggactttcttgggcggcaagacaccgattacagaagcatggagtaccgtgatgtggatcataggctgccaggaagccagatgtttggctatggccagagcaagtcttttccagagggcaaaactgcccgagatgcccaacgggaccttcaggatcaagattataggaccggcccaagtgaggagaaacccagcaggcttattcgattaagtggggtacctgaagatgccacaaaagaagagattcttaatgcttttcggactcctgatggcatgcctgtaaagaacttgcagttgaaggagtataacacaggttacgactatggctatgtctgcgtggagttttcactcttggaagatgccatcggatgcatggaggccaaccagggaactctaatgatccaggacaaagaagttaccctggagtatgtatcaagcctggatttttggtactgcaaacgatgtaaggcaaacattggtgggcaccgatcttcctgttcattctgcaagaacccaagagaagtgacagaggccaagcaagaattaataacctaccctcagcctcagaaaacatccataccagcaccattggaaaaacagcccaaccagcccctaagaccagctgataaggaacctgaacccaggaagagggaagaaggccaagagtcacgcttaggacatcaaaagagagaagcagaaaggtatctgcctccttctcgaagggaagggccaactttccgaagagaccgagagagggagtcatggtctggagagacacgccaggatggagagagcaaaactatcatgctaaagcgtatctatcgttccacaccacctgaggtgatagtggaagtgctggagccctatgtccgccttactactgccaacgtccgtatcatcaagaacagaacaggccctatggggcatacctatggctttattgacctcgactcccatgcggaagctcttcgtgtggtgaagatcttacagaaccttgatccgccatttagcattgatgggaagatggtagctgtaaacctggccactggaaaacgaagaaatgattctggggaccattctgaccacatgcattactatcagggtaaaaaatatttccgagataggaggggaggtggcagaaattcagactggtcttcagatacaaatcgacaaggacaacagtcatcatctgactgctacatatatgattctgctactggctactattatgaccccttggcaggaacttattatgaccccaatacccagcaagaagtctatgtgccccaggatcctggattacctgaggaagaagagatcaaggaaaaaaaacccaccagtcaaggaaagtcaagtagcaagaaggaaatgtctaaaagagatggcaaggagaaaaaagacagaggagtgacgaggtttcaggaaaatgccagtgaagggaaggcccctgcagaagacgtctttaagaagcccctgcctcctactgtgaagaaggaagagagtccccctccacctaaagtggtaaacccactgatcggcctcttgggtgaatatggaggagacagtgactatgaggaggaagaagaggaggaacagacccctcccccacagccccgcacagcacagccccagaagcgagaggagcaaaccaagaaggagaatgaagaagacaaactcactgactggaataaactggcttgtctgctttgcagaaggcagtttcccaataaagaagttctgatcaaacaccagcagctgtcagacctgcacaagcaaaacctggaaatccaccggaagataaaacagtctgagcaggagctagcctatctggaaaggagagaacgagagggaaagtttaaaggaagaggaaatgatcgcagggaaaagctccagtcttttgactctccagaaaggaaacggattaagtactccagggaaactgacagtgatcgtaaacttgttgataaagaagatatcgacactagcagcaaaggaggctgtgtccaacaggctactggctggaggaaagggacaggcctgggatatggccatcctggattggcttcatcagaggaggctgaaggccggatgaggggccccagtgttggagcctcaggaagaaccagcaaaagacagtccaacgagacttaccgagatgctgttcgaagagtcatgtttgctcgatataaagaactcgattaagaaaggagacaagttccatgggatacaacctccctcttgttttgtttgtctctccttttcttttgttactgttcttgctgctagaacttttttaaataaactttttttcaatgtgat

SEQ ID NO: 159176 - DNA, 3372 bp, Artificial Sequence
  derived and/or modified sequence
atgtggggtgactcaagaccggccaacagaaccgggccctttcggggatcccaggaggaaagatttgcccctggatggaaccgggactacccgcctcctcccctgaaatcgcacgctcaggagcgacactctggcaactttcccggaagggactccctacccttcgacttccaagggcattcgggcccaccttttgccaatgttgaggaacacagtttcagctatggcgcccgtgatgggccccacggtgattaccgggggggggagggtcctggacacgacttcagaggtggggatttttcatcttctgacttccaatcccgggactcaagtcagttggattttagaggccgcgacatccactctggggattttcgggatcgtgaaggcccacccatggactacagggggggagacggcaccagcatggactaccgggggcgcgaagcccctcacatgaattatagagaccgcgacgcccatgccgttgatttccgcggacgcgatgcccctccatctgactttcggggccgcgggacctatgacctggactttcgagggcgtgacggtagtcacgctgactttcgagggcgtgacctgtctgacctggattttcgcgcccgggaacaatcacgatcagactttagaaatagggacgtgagcgatcttgattttcgagataaggacggcacccaggttgatttccgcggtaggggaagcggcactaccgatctcgattttcgagacagggatacaccacattccgacttccgcggcagacatcgttccagaacagatcaggactttcggggtcgggaaatgggtagctgcatggagtttaaagatcgcgagatgccccctgtagaccccaacattctcgattacatccagccatctacacaggaccgggagcactctggtatgaatgtgaatcggagggaagaatccacccatgaccacacgatcgagaggccagcctttgggattcaaaagggcgaattcgagcactccgagacccgcgaaggggagacacaaggtgtcgcgtttgaacatgagagtccagcggacttccagaatagccaatctcccgtgcaggatcaggataagagtcaactgagcggtagggaagagcagtcatcagacgcaggattatttaaagaagagggcggcttagatttcttggggcggcaggacactgattaccgcagtatggagtacagggacgtcgatcataggttaccaggctcccaaatgtttggctatgggcaatccaagtcatttcccgaggggaaaaccgctagagatgcccagcgagaccttcaggatcaagactaccgcaccggcccatcagaggagaaaccttctcggttgatccgactaagcggagtccctgaagatgctaccaaggaagaaattctgaatgcgttcagaaccccagatggcatgccagtcaagaacctgcaacttaaagagtataacacaggctatgactatggatacgtctgtgtggagttctctctgttggaagatgcaatcggctgtatggaggctaatcagggcactttgatgatccaggataaggaggttacacttgagtatgtgtctagtctggacttttggtattgtaaacggtgtaaagccaacatcggggggcatagaagtagttgcagtttctgtaagaaccctcgcgaggtgacggaagccaagcaggagctcatcacctacccccaacctcagaagacctccatccctgcaccactggagaaacagccaaatcagccccttcggcccgctgacaaggagcctgaacccaggaagcgggaagaaggtcaggagagccgattggggcatcagaagcgagaggcggaacggtatctgcctccgtctcgaagggaaggccccaccttccgcagggacagagagcgcgagtcttggagcggcgagacccggcaggacggtgaaagcaagaccatcatgcttaaacggatttacagatcgacgccccctgaagtaattgtggaagttctggagccttatgtgagacttactacagcaaacgtacggatcatcaagaaccggacaggccctatgggccacacctacggtttcatcgacctggactctcatgcggaggctcttcgagttgtcaaaatacttcagaatctcgaccccccattctcaatcgacggcaagatggttgctgtcaacctcgccactggaaaacgaagaaatgactccggcgaccacagcgatcatatgcattactaccagggcaaaaagtacttcagagatagacggggcggcggcagaaacagtgactggtctagcgacaccaaccggcaaggacagcagtccagcagcgactgttacatttatgattctgccaccggctattattacgaccctctcgctggaacgtactacgacccgaatacccagcaggaagtatatgtgccccaggaccccgggctgcccgaggaggaggaaatcaaagagaaaaagcctacatcccagggcaagtcaagctcaaaaaaagaaatgtccaagagagacggcaaagaaaaaaaggacaggggagtcacacgattccaggagaacgctagcgagggcaaggctcctgctgaggacgtttttaaaaagccactcccaccaacagtgaaaaaagaagaatcaccccccccccctaaagtcgtcaatcctcttattggtctgctcggtgagtacggcggcgactctgactatgaagaggaggaggaagaagagcagactcctcctccacagcctaggaccgcgcagcctcaaaaaagggaagaacaaacaaaaaaggagaatgaagaggacaaattgaccgactggaacaaactagcctgtctgctgtgtcgaaggcagttccccaacaaggaggtgcttatcaagcaccaacagctctcggatctgcacaagcaaaatttagaaatccatcgcaaaatcaagcagtctgaacaagagctcgcttacctagagagacgcgaacgggagggaaagtttaaaggtcggggaaacgaccggagggaaaagctacagagcttcgactccccggagagaaagcgcattaagtactcccgcgagacagactccgacaggaagctggtcgataaagaagacatagatacaagcagcaaaggaggatgcgttcagcaggcgacaggctggcgtaagggaaccggactgggctatggacaccctggcctcgcgagctctgaggaagcagaagggcggatgcgtggcccctcagtgggggcaagtggccgcacgtctaaacgccaatctaatgagacatatagagatgctgtcaggcgggtaatgttcgcgcggtataaggagctggactag

SEQ ID NO: 159177 - DNA, 429 bp, Artificial Sequence
  derived and/or modified sequence
atgtggggggacagtagacccgctaataggactggcccatttagggggtcacaggaagagaggtttgcccctggctggaatagagattaccctccaccacctctgaaatcccacgcccaggaacgccactccgggaactttcccggtagggacagcttaccctttgacttccagggccactctggccctcccttcgcaaatgttgaggaacacagcttctcgtatggtgcccgcgacggtcctcacggtgactataggggcggggagggccccggtcatgactttaggggaggagacttctcatcgagcgatttccagtcccgtgattcctcccaattagacttccgtggaagagatatccactcgggcgatttccgagatagggagggtccacccatggattatcgaggtggtgacgggactagctag

SEQ ID NO: 159178 - DNA, 1563 bp, Artificial Sequence
  derived and/or modified sequence
atgtggggggacagtagaccagccaatcgcaccggtccattccggggtagccaggaagaacgattcgctcccggctggaaccgagattacccaccgccccccctcaagagccacgcacaagagcgccactcaggaaacttccccggtcgggatagcctaccatttgattttcaggggcactccggccctccctttgcaaatgtcgaggaacacagtttcagctatggcgcccgggatggtccgcatggagattaccgcggcggcgagggcccggggcacgatttcagggggggggacttttcaagctctgactttcagtctagggacagtagtcagttggactttcgtggacgcgacatacatagcggggactttcgggatcgcgagggacctcctatggactatcgggggggcgatgggacttcaatggactatcggggccgcgaagcgccgcatatgaattatagggacagagatgcccacgcagtggactttcgagggagggacgcacccccctcagattttcggggtagggggacatatgacctggatttcagaggacgtgacgggtctcacgcagacttcagaggacgcgaccttagcgacctcgactttcgcgcgcgtgaacagtccagaagcgactttcgaaatcgggatgtgagcgatcttgattttcgcgacaaagacggtactcaggtggatttccggggccgcgggagtggtactaccgacctggatttcagagatcgcgacaccccgcattcagatttcagaggacgccacagaagccgcactgaccaggactttcgcgggcgagaaatgggcagttgcatggagttcaaagatagggagatgcctcccgtggacccaaacattctggattatatccagccgtccacccaggaccgtgagcacagcggtatgaacgttaaccggcgcgaggagtcaacccatgatcatacaatcgaacgccccgctttcggcattcagaaaggcgaattcgagcactctgaaactcgagaaggggagacccagggtgtcgcttttgaacacgaatctcccgccgacttccaaaacagtcagagtccagtccaggatcaggataaatcacagttgtccggtcgggaggaacagtcctccgatgcgggactgtttaaggaggaaggcgggttagattttctggggcggcaagacaccgactatcgctcaatggagtaccgcgatgttgaccatcggctccctgggtcacagatgtttggatatggccagtctaaatcttttcccgagggcaaaacggcaagagatgctcagagggacctccaagaccaggactacaggaccggtccctcagaagagaaaccctcaagactgattaggctgtcaggtgtgccagaagatgcaaccaaagaagagattctcaacgcgttcaggacaccagatggcatgcctgttaagaacctgcagcttaaggagtataacacgggaaactctaatgatccaggacagaggagttaccccggagtctgcattaagccgggcttcctcgtgctgcagacaatgtag

SEQ ID NO: 159179 - DNA, 231 bp, Artificial Sequence
  derived and/or modified sequence
atgtggggagactctcgtcccgcaaaccggacaggccctttccgcggctcacaggaagaacggttcgcccctggttggaacagggactatccccctcccccattaaagagccatgcccaagagcgtcactccggtaatttcccaggtagagatagtttgccatttgattttcaaggccattctggtcccccctttgctaacgtcgaggaacacagtttttcctacggatag

SEQ ID NO: 159180 - DNA, 3372 bp, Artificial Sequence
  derived and/or modified sequence
atgtggggagacagcaggcctgccaacagaacaggccccttccggggcagccaggaggagagatttgcccctggctggaacagagactacccacctccacccctgaagagccacgcccaggagcggcacagcggcaacttccctggccgggacagcctgccctttgacttccagggccacagcggccccccatttgccaacgtggaggagcacagcttctcctatggagccagagatggcccccacggggactacagaggaggagagggccctggccatgacttccggggcggggacttcagcagcagtgacttccagagccgggacagcagccagctggacttccggggccgggacatccacagcggggacttccgggaccgggagggcccccccatggactacagaggaggagatggcacctccatggactaccggggccgggaggccccccacatgaactacagagacagagatgcccatgctgtggacttccggggcagagatgcccccccaagtgacttccggggccggggcacctatgacctggacttccggggcagagatggcagccatgctgacttccggggccgggacctgagtgacctggacttccgggcccgggagcagagcagaagtgacttcaggaacagagatgtgtctgacctggacttccgggacaaggatggcacccaggtggacttccggggccggggcagcggcaccacagacctggacttccgggaccgggacaccccccacagcgacttccggggccgccacaggagcaggacagaccaggacttccggggccgggagatgggcagctgcatggagttcaaggaccgggagatgcctcctgtggaccccaacatcctggactacatccagcccagcacccaggaccgggagcacagcggcatgaatgtgaacagaagagaggagagcacccatgaccacaccatcgagaggcctgccttcggcatccagaagggggagtttgagcacagcgagacccgggagggggagacccagggcgtggcctttgaacatgagagccctgctgacttccagaacagccagagccctgtgcaggaccaggacaagagccagctgagcggccgggaggagcagagcagtgatgctggcctcttcaaggaggagggcggcctggacttcctgggccggcaggacacagactaccgctccatggagtacagagatgtggaccaccggctgcccggcagccagatgtttggctacggccagagcaagagcttccctgagggcaagacagccagagatgcccagagggacctgcaggaccaggactacagaacaggccccagcgaggagaagcccagccgcctcatccggctgtctggagtgcctgaagatgccaccaaggaggagatcctgaatgccttccgcaccccagatggcatgcctgtgaagaacctgcagctgaaggagtacaacacaggctatgactatggctacgtgtgtgtggagttcagcctgctggaggatgccatcggctgcatggaggccaaccagggcaccctgatgatccaggacaaggaggtgaccctggagtatgtgagcagcctggacttctggtactgcaagcgctgcaaggccaacattggaggccacaggagcagctgcagcttctgcaagaacccccgggaggtgacagaggccaagcaggagctgatcacctacccccagccccagaagaccagcatcccagcccccctggagaagcagcccaaccagcccctgcggcctgctgacaaggagcctgagcccaggaagcgggaggagggccaggagagccggctgggccaccagaagcgggaggccgagcgctacctgccccccagccggcgggagggccccaccttcagaagagaccgggagcgggagagctggagcggggagacccggcaggatggagagagcaagaccatcatgctgaagaggatctaccgcagcaccccacctgaggtgattgtggaggtgctggagccctacgtgcggctgaccacagccaacgtgcgcatcatcaagaacagaacaggccccatgggccacacctacggcttcatcgacctggacagccacgccgaggccctgcgggtggtgaagatcctgcagaacctggacccccccttcagcattgatggcaagatggtggccgtgaacctggccaccgggaagagaagaaatgacagcggggaccacagcgaccacatgcactactaccagggcaagaagtacttccgggacagaagaggaggcggcaggaacagcgactggagcagtgacaccaaccggcagggccagcagagcagcagtgactgctacatctatgacagcgccaccggctactactatgaccccctggccggcacctactatgaccccaacacccagcaggaggtgtatgtgccccaggaccccggcctgcctgaggaggaggagatcaaggagaagaagcccaccagccagggcaagagcagcagcaagaaggagatgagcaagagagatggcaaggagaagaaggacagaggagtgacccgcttccaggagaatgccagcgagggcaaggccccagcagaagatgtgttcaagaagcccctgcccccaacagtgaagaaggaggagagccccccaccacccaaggtggtgaaccccctcatcggcctgctgggggagtatggaggagacagcgactatgaggaggaggaggaggaggagcagaccccaccaccccagcccaggacagcccagccccagaagcgggaggagcagaccaagaaggaaaatgaggaggacaagctgacagactggaacaagctggcctgcctgctgtgccggcggcagttccccaacaaggaggtgctgatcaagcaccagcagctgagtgacctgcacaagcagaacctggagatccacaggaagatcaagcagagcgagcaggagctggcctacctggagcggcgggagcgggagggcaagttcaagggcagaggaaatgaccggcgggagaagctgcagagctttgacagccctgagaggaagaggatcaagtacagccgggagacagacagcgacaggaagctggtggacaaggaggacatcgacaccagcagcaagggcggctgtgtgcagcaggccaccggctggaggaagggcaccggcctgggctacggccaccctggcctggccagcagcgaggaggccgagggccgcatgaggggccccagcgtgggcgccagcggccgcaccagcaagaggcagagcaatgagacctacagagatgctgtgcggcgggtgatgtttgcccgctacaaggagctggactag

SEQ ID NO: 159181 - DNA, 429 bp, Artificial Sequence
  derived and/or modified sequence
atgtggggagacagcaggcctgccaacagaacaggccccttccggggcagccaggaggagagatttgcccctggctggaacagagactacccacctccacccctgaagagccacgcccaggagcggcacagcggcaacttccctggccgggacagcctgccctttgacttccagggccacagcggccccccatttgccaacgtggaggagcacagcttctcctatggagccagagatggcccccacggggactacagaggaggagagggccctggccatgacttccggggcggggacttcagcagcagtgacttccagagccgggacagcagccagctggacttccggggccgggacatccacagcggggacttccgggaccgggagggcccccccatggactacagaggaggagatggcaccagctag

SEQ ID NO: 159182 - DNA, 1563 bp, Artificial Sequence
  derived and/or modified sequence
atgtggggagacagcaggcctgccaacagaacaggccccttccggggcagccaggaggagagatttgcccctggctggaacagagactacccacctccacccctgaagagccacgcccaggagcggcacagcggcaacttccctggccgggacagcctgccctttgacttccagggccacagcggccccccatttgccaacgtggaggagcacagcttctcctatggagccagagatggcccccacggggactacagaggaggagagggccctggccatgacttccggggcggggacttcagcagcagtgacttccagagccgggacagcagccagctggacttccggggccgggacatccacagcggggacttccgggaccgggagggcccccccatggactacagaggaggagatggcacctccatggactaccggggccgggaggccccccacatgaactacagagacagagatgcccatgctgtggacttccggggcagagatgcccccccaagtgacttccggggccggggcacctatgacctggacttccggggcagagatggcagccatgctgacttccggggccgggacctgagtgacctggacttccgggcccgggagcagagcagaagtgacttcaggaacagagatgtgtctgacctggacttccgggacaaggatggcacccaggtggacttccggggccggggcagcggcaccacagacctggacttccgggaccgggacaccccccacagcgacttccggggccgccacaggagcaggacagaccaggacttccggggccgggagatgggcagctgcatggagttcaaggaccgggagatgcctcctgtggaccccaacatcctggactacatccagcccagcacccaggaccgggagcacagcggcatgaatgtgaacagaagagaggagagcacccatgaccacaccatcgagaggcctgccttcggcatccagaagggggagtttgagcacagcgagacccgggagggggagacccagggcgtggcctttgaacatgagagccctgctgacttccagaacagccagagccctgtgcaggaccaggacaagagccagctgagcggccgggaggagcagagcagtgatgctggcctcttcaaggaggagggcggcctggacttcctgggccggcaggacacagactaccgctccatggagtacagagatgtggaccaccggctgcccggcagccagatgtttggctacggccagagcaagagcttccctgagggcaagacagccagagatgcccagagggacctgcaggaccaggactacagaacaggccccagcgaggagaagcccagccgcctcatccggctgtctggagtgcctgaagatgccaccaaggaggagatcctgaatgccttccgcaccccagatggcatgcctgtgaagaacctgcagctgaaggagtacaacacaggcaacagcaatgaccccggccagaggagctacccaggagtgtgcatcaagccaggcttcctggtgctgcagaccatgtag

SEQ ID NO: 159183 - DNA, 231 bp, Artificial Sequence
  derived and/or modified sequence
atgtggggagacagcaggcctgccaacagaacaggccccttccggggcagccaggaggagagatttgcccctggctggaacagagactacccacctccacccctgaagagccacgcccaggagcggcacagcggcaacttccctggccgggacagcctgccctttgacttccagggccacagcggccccccatttgccaacgtggaggagcacagcttctcctatggatag

SEQ ID NO: 159184 - DNA, 3372 bp, Artificial Sequence
  derived and/or modified sequence
atgtggggcgacagccggcccgccaaccggaccggccccttccgggggtcccaagaggaacggtttgcgccgggctggaaccgcgactaccccccccctcccctgaagtctcatgctcaggaaaggcatagcggtaattttccagggagggattcgctgccattcgatttccagggccatagtggcccacctttcgcaaacgtcgaggagcattccttttcctatggtgctcgtgacgggccacatggggattataggggcggggagggacctggacatgacttccggggcggtgatttttctagtagtgattttcagtcaagagacagcagtcaattggactttagggggagggacatccattcaggtgatttcagggatcgtgaaggacccccgatggactatagaggaggggacggcaccagcatggactaccgcgggcgggaagccccccacatgaattatcgggatcgggacgcacatgccgtggactttcgcgggagggatgctcccccttctgactttaggggtaggggcacctatgatctggattttaggggccgcgatggaagccacgccgatttccgggggcgagatctttcagatttagacttccgtgctagggaacagagccggtcggatttcaggaatcgagatgtcagtgatttagattttcgtgataaggacgggactcaggtcgatttccggggaaggggaagtggaaccactgacctggatttccgggatcgggacactccacattcagactttcgcggcagacacaggtcacgcactgaccaggatttccgcgggcgcgagatggggtcctgtatggagtttaaagatagagaaatgccacccgtagaccctaacattctggactacattcagcccagcactcaggaccgcgagcacagcggaatgaacgtaaatcgaagagaagagagcacacatgatcataccattgaaaggccagcatttggcatccagaaaggtgagtttgagcactccgagacacgagagggcgagacccagggggtggcgtttgagcatgagtcccccgctgactttcagaactctcagtcccctgtgcaagaccaggataaatcccagctgtctgggagagaagagcagtccagtgatgccggattatttaaggaagagggcggactagacttcctgggaaggcaagataccgattacaggtcgatggagtatcgggatgttgaccaccgcctccctggtagccaaatgttcgggtatggacagtctaaatctttccctgaagggaaaaccgccagagacgcccaaagggacctccaagaccaagattacaggacaggcccgtcggaagagaagccgtcacgtctgatccgtctttctggcgtccccgaggacgccaccaaagaagaaatcctgaacgcattccggacacccgacgggatgcccgtgaaaaatctgcaactgaaggagtataacacgggctacgactacggctacgtgtgcgtggagttctccctgctcgaggacgctattggttgcatggaggccaatcagggaactctaatgattcaggataaggaggtgacgctggaatacgtgtcttctctggatttctggtactgtaagcggtgcaaagccaatatcgggggacatagatcctcatgttcattctgcaaaaaccctcgcgaggtgacagaggcaaaacaggaattgatcacctatcctcagcctcagaaaacgagtattccagcccctctcgaaaaacagccaaaccagcccttgcgtccggctgataaagaacctgagccccgcaagcgagaggagggacaggagtctagactcggccaccaaaagcgcgaagcggagaggtacctgcccccctctcgccgtgaggggccgactttccggcgtgacagagagcgggaatcctggtccggtgagactagacaagatggcgaaagtaagaccataatgttgaagaggatctataggtcaaccccacctgaggtgatagtggaggtgcttgagccttacgtccggcttaccactgccaatgtcagaatcatcaagaatcgaaccggacctatggggcatacatatggcttcatcgacctggactcccacgccgaagccctcagggttgtgaagatcttacagaatctggaccccccattcagcattgatggtaaaatggttgccgtgaacctggcaaccgggaagcgcaggaacgattcaggggaccactcagatcacatgcactactaccaaggcaaaaaatatttcagggatagacgcgggggtggaaggaacagcgattggtccagcgatactaataggcaaggccagcagagctcttccgattgctatatctacgatagcgctacgggctactactatgaccccctagccggtacttactacgaccctaatacccagcaagaagtgtatgtaccccaggaccctgggttaccagaggaagaagaaatcaaggaaaagaagcctacatcacaaggcaaatcttcttctaaaaaagagatgtcaaagcgcgacggcaaagagaagaaagacaggggcgtgaccagattccaagagaacgcttcagaaggtaaagccccggctgaagatgtgtttaagaaacccctgccccccactgtaaaaaaagaggagtcccctcctcctcccaaagttgtcaacccccttatcgggttgctcggggaatacgggggggattccgattatgaggaggaggaggaagaagaacagacccctcccccccagccgaggaccgcccaaccccagaaacgggaagagcaaactaagaaagaaaatgaggaggataaactcacagactggaacaagctggcttgtttactgtgtcggagacagtttccgaacaaggaggtgctgatcaagcaccaacaactcagcgacctgcataagcagaacctcgagattcacagaaagataaaacagtctgagcaagagctggcctatctggaacggagggagcgcgagggaaagtttaagggaaggggcaatgatcgacgggaaaaactgcagtcgttcgacagccccgaaaggaagcgaattaaatattcaagagagactgattcagaccgcaaacttgtcgataaggaggatatcgatacgtcctcaaaaggaggatgtgttcagcaggccacaggctggcgcaaggggacaggtcttggatatggccaccctggactggcaagctccgaggaagccgagggcagaatgagggggcctagtgttggcgcttccggtaggacgtctaaaaggcagtcaaacgaaacctaccgtgacgcggttaggcgagttatgttcgcccgatacaaggagctcgattag

SEQ ID NO: 159185 - DNA, 429 bp, Artificial Sequence
  derived and/or modified sequence
atgtggggcgacagccggcccgccaaccggaccggccccttccggggcagccaagaggagcgttttgcccccggctggaatcgcgattaccccccacccccactcaaatcacacgcccaggagaggcactcgggaaactttcccgggcgcgactccctgccgtttgattttcagggccactcaggacctccattcgcgaatgtggaagaacatagcttttcttatggtgctagggatggaccccacggcgattaccgtggaggtgagggcccagggcatgacttcagaggcggcgacttcagttcatctgattttcagagtagggacagctcacagcttgattttcggggccgagacatccatagcggggatttcagagaccgtgagggacctccaatggattacagggggggcgacggaacatcctag

SEQ ID NO: 159186 - DNA, 1563 bp, Artificial Sequence
  derived and/or modified sequence
atgtggggcgacagccggcccgccaaccggaccggccccttccgggggagtcaggaagaaaggttcgcccctggatggaatcgtgattacccccccccaccactcaagagccatgcccaagaaagacattcggggaattttcctggccgggatagcctgcccttcgattttcagggtcatagcggccctccgttcgcaaacgtagaggagcacagtttcagttacggggccagggatggaccccacggggactatcggggtggtgagggtccaggccacgacttcaggggcggagacttctctagttcagatttccagtcacgtgacagtagccaattggatttcagggggcgggatatacactccggggattttcgggacagagagggcccacctatggattaccggggaggggacggcacttctatggattaccgggggcgagaagcaccccatatgaattaccgagacagagacgctcacgccgtggactttagaggcagagacgcaccgcctagtgactttcgagggcggggcacatatgacctggatttccgcggacgggatggatcccacgctgatttccgcggccgggacctgtctgatctggatttcagagcacgagaacagtcccggtccgattttcggaacagggatgtgagcgatctcgatttcagggacaaggatggtactcaggtggattttcgcggccgcggctctgggacaaccgacttggattttcgtgaccgggacactcctcactcagactttcgcggccgccacaggtcaaggactgatcaggacttccggggtagggagatggggtcctgtatggagtttaaagatcgggaaatgccccctgtggaccctaacatcttagattacatccagccttctacccaggatcgggaacatagcgggatgaatgtaaatagacgggaagagtcgacccatgaccatacgatcgaaaggcccgcattcggcatccagaaaggagagtttgagcattcggagactcgggaaggcgagacacagggagtggcgtttgaacatgagtcaccggccgattttcaaaatagccaatcgcccgtacaggatcaggacaagtcccagctgtcagggagagaggagcagagctcggacgctgggctgtttaaagaagaaggcggactggatttcctcggccggcaggataccgattataggtcgatggaatatcgtgacgtggaccatcggttaccagggagccaaatgttcggttatggccaaagcaagagcttccctgagggtaagacagcaagagacgcccagagggacctgcaggaccaggattataggaccgggccatcagaggagaagccaagcaggctgatcaggctcagcggtgttcccgaagatgcgacaaaagaggagatcttaaacgccttcaggacacctgatggtatgcctgtgaaaaatttgcaactgaaagaatacaacacagggaattccaacgatcctggccagagatcatacccgggggtgtgcatcaagcctggtttcctggtgttgcaaaccatgtag

SEQ ID NO: 159187 - DNA, 231 bp, Artificial Sequence
  derived and/or modified sequence
atgtggggcgacagccggcccgccaaccggaccggccccttccggggctcgcaagaagaacgcttcgcacccggctggaatagagactacccccccccccctctgaagagccacgcacaggaacgccactctggcaacttccctggccgggacagcctgccctttgatttccaagggcactcaggccctccgtttgcaaatgtcgaagagcattcgttcagttacgggtag

SEQ ID NO: 159188 - DNA, 3372 bp, Artificial Sequence
  derived and/or modified sequence
atgtggggggacagccgcccagcgaatcgtactgggccattccgcggtagccaagaagagcgcttcgccccagggtggaatcgggactacccacctcccccactcaagtcgcacgcccaggagagacatagcggaaattttccaggcagagactcgctaccctttgacttccaaggacattccggaccaccgttcgccaacgtggaagagcattcgttctcctacggcgctcgcgatggaccccatggggactacaggggcggagagggcccaggacacgacttcagaggcggtgatttcagctcttcagacttccagtctagggactcatctcagctggacttcagagggagagatattcatagcggcgattttagggatcgggagggtcccccaatggactatcgcggaggagacggcacatcgatggactatcggggaagggaggctccccatatgaattatcgggatcgggatgcccatgcagttgatttccggggtcgtgacgccccacctagtgacttccgtggccgtggaacctatgatctagacttcagggggagagatgggtcacacgctgactttcgtggcagggacctgagcgacttggatttccgagcacgggagcagtctcggagcgatttcagaaatcgcgatgtaagcgaccttgattttcgggacaaagacggcacgcaggtagactttcgagggagaggatctggaaccacagacctggattttcgggatagggacacgccacattctgactttcgcggacggcaccgctcaagaaccgatcaagactttcgaggacgggagatgggcagctgtatggagtttaaggaccgcgaaatgccccctgttgatcccaacatcctcgattatatccaaccatctacccaggatcgggagcatagcggaatgaacgtcaataggagggaagagtcaacgcacgaccacaccatagagaggcccgcattcggaatccagaaaggcgagtttgagcacagcgagacacgggaaggagagacacagggcgtggccttcgaacacgaatccccagctgacttccagaacagccaatctcccgtgcaggatcaagataagtcacagttgtctggacgcgaagagcagagctctgatgcagggctgtttaaagaagaaggcggacttgatttcttggggagacaagataccgattacagatccatggaatacagagatgtggatcacagactccccggatcccagatgtttggatacggacaaagcaagtccttccccgagggcaaaaccgctagagatgctcaacgcgacttgcaggatcaggactaccgcacaggccctagcgaagaaaagccttccaggctgatcagactatccggcgtgcctgaagacgcaaccaaggaagagatcctcaatgctttcagaacccctgacggcatgcctgtgaagaacctgcaactgaaggagtacaatactggatacgattacggctacgtctgcgtggagtttagtcttttagaggacgccatagggtgcatggaggccaaccaggggacccttatgattcaggataaggaagttaccctcgaatacgtgtcttccctggatttttggtattgcaagcgatgcaaggccaacatcggaggccatcgctctagttgttcattctgcaagaaccctagagaggtaaccgaagccaagcaggagctcatcacctacccacagccgcaaaagactagcatccccgctcctttagagaagcagccaaatcagcccctcagacctgcggacaaagagcctgaaccaagaaagagagaggaaggccaagagtccagactgggtcaccagaaacgggaagctgagcgttacctgccgcctagccggcgtgaggggcctacctttcggcgtgaccgggaacgcgagagctggagtggagagaccagacaagacggagagagcaaaacaattatgctgaagaggatataccggtcgactcccccagaggtgatcgttgaggtgttagagccatacgttcgtctaacaaccgccaacgtgaggattatcaagaaccgtaccgggccaatggggcacacatatggctttatcgatctggacagtcatgctgaagccttgcgggtggtgaagattctgcaaaatctggacccaccgttctccatcgacggaaaaatggtggctgtcaatctcgccaccggaaaaagacggaatgatagcggcgaccacagcgaccacatgcattactaccagggcaaaaagtattttcgcgatcggcgtggcggtggcaggaatagcgactggagctccgacaccaacagacagggccaacagtctagtagtgattgttacatctatgacagcgccacgggttactactatgatcccctggccggaacatactacgaccctaatacccagcaggaagtgtatgtgccgcaggacccagggttgcccgaagaggaggagataaaagaaaaaaaaccaacaagccagggcaaatcaagttccaagaaagagatgagtaagcgagacggtaaggagaaaaaggaccgaggggttactcggtttcaggaaaacgcttccgagggaaaggcccctgccgaggacgttttcaagaaacctctgccccctacggtgaaaaaggaagaaagccctcctccccctaaggtcgtaaatcctttaataggcctgcttggagagtatgggggagactcagactatgaggaagaggaagaggaggagcaaaccccacccccacaaccccgaactgctcagccacagaagcgggaggagcaaacaaaaaaggagaacgaggaggacaagctgacagattggaacaagctcgcatgcctgctctgccgacgtcagtttcccaataaggaggtactgatcaaacaccagcaactctcagacctacacaaacagaatcttgaaatccatcgcaagatcaagcagtccgagcaagagctggcatacttggagagaagagagcgtgaggggaaatttaagggcagagggaatgaccgaagggagaaactccagagcttcgactccccggagaggaaaaggatcaagtattctagagaaaccgacagcgaccgtaaattagtcgacaaagaagacatcgatactagttcgaagggaggatgcgtacaacaggcaacaggttggcgcaaggggaccggcttgggatatggccatcccggtttagcaagcagtgaggaagccgagggtaggatgagggggcctagtgtcggagcttctggcagaacaagcaaaaggcaaagcaacgagacttaccgtgacgccgtgcgcagagtgatgtttgctcggtacaaagaactggactag

SEQ ID NO: 159189 - DNA, 429 bp, Artificial Sequence
  derived and/or modified sequence
atgtggggcgactcaaggcccgctaacaggactggcccttttcgtggcagtcaggaggaacggtttgctccgggttggaatcgggactaccctccccctccacttaagtctcacgcgcaggaaagacatagcggaaacttccccggacgtgatagtctgccctttgactttcaaggccacagcggcccaccattcgcaaacgtggaagaacattcattcagctacggcgcacgcgacgggccacacggcgattacagaggcggtgaaggcccaggacatgacttccggggtggggatttcagtagcagcgacttccagagtagggactctagccagcttgatttccgaggaagggatatccacagtggggactttagagacagagagggtcctccaatggactaccggggaggggacggtaccagctag

SEQ ID NO: 159190 - DNA, 1563 bp, Artificial Sequence
  derived and/or modified sequence
atgtggggggatagtcgtcccgctaaccgtacgggtcctttccgaggcagtcaggaggaacgctttgccccagggtggaaccgagactaccccccacccccactcaaatctcacgcccaggagaggcactctgggaactttcctggtcgggattcactcccatttgatttccaggggcactcagggccacctttcgcgaacgtcgaagagcattctttcagctacggcgctcgtgacggccctcacggtgattatcggggaggcgagggacccggacacgacttcaggggcggtgacttctccagcagcgacttccagagccgtgactcttcccaactggatttcagggggagagatatccattccggggacttcagggatcgggaaggcccaccaatggactatcgaggaggggatgggacctctatggactatcgcggtcgggaagcccctcatatgaattatagggatagagatgcccacgctgttgatttcaggggtagggatgccccaccgtctgacttcaggggaagagggacctatgatctggatttcaggggacgcgacgggtcgcacgccgacttccgaggacgagatctgagcgacctggatttcagagccagagaacagagccggagcgattttcgcaacagggatgtgagtgaccttgattttcgagacaaggacggcacccaagtagacttcagaggcagaggaagcgggaccaccgatttggacttcagggacagagacacaccccacagcgacttccggggacgacacagatctcgaactgatcaggatttcagaggtagagagatgggttcttgcatggaattcaaagatcgagagatgccccctgtggaccccaatattctggattacatccaaccatctacccaggaccgggagcatagcggaatgaatgtcaaccgccgagaagaatccacacatgaccatacaatagagagacccgcatttggcatccagaagggtgaatttgagcatagcgaaaccagagagggagaaacacaaggtgtggcttttgaacatgagtccccggctgattttcagaattctcaatcccccgtgcaggatcaggacaaatctcaactgtccggcagggaggaacaatcttccgatgctggcctgttcaaggaagagggcggtctggactttctcgggaggcaggatacagattatcgatctatggagtatcgagatgttgatcacagactgcccggttcgcagatgtttggttatggccagtctaagagctttccggagggtaagacggccagagatgctcagcgagacctgcaagatcaagactatagaaccgggccatccgaggaaaagcctagccgactgataaggctttcgggcgtccccgaggatgctaccaaggaggagatcctgaacgcctttcgcacacctgatggcatgccagtcaagaacctgcaactgaaggaatataacacaggtaactcgaacgaccccggtcaacggtcatatccgggtgtgtgtatcaaacccggattcctggttctccagactatgtag

SEQ ID NO: 159191 - DNA, 231 bp, Artificial Sequence
  derived and/or modified sequence
atgtggggagactctcggccagcgaatcgtactggaccatttcggggatctcaggaggaacgttttgccccaggatggaaccgagactaccccccacccccacttaagtcacacgctcaggaacgacattccggcaatttccctggcagggattcactgccattcgatttccagggacactcaggacccccatttgccaacgtcgaggagcattcttttagctatggctag

SEQ ID NO: 159192 - DNA, 3372 bp, Artificial Sequence
  derived and/or modified sequence
atgtggggcgacagcagacccgccaacagaaccggccccttcagaggcagccaggaggagagattcgcccccggctggaacagagactacccccccccccccctgaagagccacgcccaggagagacacagcggcaacttccccggcagagacagcctgcccttcgacttccagggccacagcggcccccccttcgccaacgtggaggagcacagcttcagctacggcgccagagacggcccccacggcgactacagaggcggcgagggccccggccacgacttcagaggcggcgacttcagcagcagcgacttccagagcagagacagcagccagctggacttcagaggcagagacatccacagcggcgacttcagagacagagagggcccccccatggactacagaggcggcgacggcaccagcatggactacagaggcagagaggccccccacatgaactacagagacagagacgcccacgccgtggacttcagaggcagagacgccccccccagcgacttcagaggcagaggcacctacgacctggacttcagaggcagagacggcagccacgccgacttcagaggcagagacctgagcgacctggacttcagagccagagagcagagcagaagcgacttcagaaacagagacgtgagcgacctggacttcagagacaaggacggcacccaggtggacttcagaggcagaggcagcggcaccaccgacctggacttcagagacagagacaccccccacagcgacttcagaggcagacacagaagcagaaccgaccaggacttcagaggcagagagatgggcagctgcatggagttcaaggacagagagatgccccccgtggaccccaacatcctggactacatccagcccagcacccaggacagagagcacagcggcatgaacgtgaacagaagagaggagagcacccacgaccacaccatcgagagacccgccttcggcatccagaagggcgagttcgagcacagcgagaccagagagggcgagacccagggcgtggccttcgagcacgagagccccgccgacttccagaacagccagagccccgtgcaggaccaggacaagagccagctgagcggcagagaggagcagagcagcgacgccggcctgttcaaggaggagggcggcctggacttcctgggcagacaggacaccgactacagaagcatggagtacagagacgtggaccacagactgcccggcagccagatgttcggctacggccagagcaagagcttccccgagggcaagaccgccagagacgcccagagagacctgcaggaccaggactacagaaccggccccagcgaggagaagcccagcagactgatcagactgagcggcgtgcccgaggacgccaccaaggaggagatcctgaacgccttcagaacccccgacggcatgcccgtgaagaacctgcagctgaaggagtacaacaccggctacgactacggctacgtgtgcgtggagttcagcctgctggaggacgccatcggctgcatggaggccaaccagggcaccctgatgatccaggacaaggaggtgaccctggagtacgtgagcagcctggacttctggtactgcaagagatgcaaggccaacatcggcggccacagaagcagctgcagcttctgcaagaaccccagagaggtgaccgaggccaagcaggagctgatcacctacccccagccccagaagaccagcatccccgcccccctggagaagcagcccaaccagcccctgagacccgccgacaaggagcccgagcccagaaagagagaggagggccaggagagcagactgggccaccagaagagagaggccgagagatacctgccccccagcagaagagagggccccaccttcagaagagacagagagagagagagctggagcggcgagaccagacaggacggcgagagcaagaccatcatgctgaagagaatctacagaagcaccccccccgaggtgatcgtggaggtgctggagccctacgtgagactgaccaccgccaacgtgagaatcatcaagaacagaaccggccccatgggccacacctacggcttcatcgacctggacagccacgccgaggccctgagagtggtgaagatcctgcagaacctggacccccccttcagcatcgacggcaagatggtggccgtgaacctggccaccggcaagagaagaaacgacagcggcgaccacagcgaccacatgcactactaccagggcaagaagtacttcagagacagaagaggcggcggcagaaacagcgactggagcagcgacaccaacagacagggccagcagagcagcagcgactgctacatctacgacagcgccaccggctactactacgaccccctggccggcacctactacgaccccaacacccagcaggaggtgtacgtgccccaggaccccggcctgcccgaggaggaggagatcaaggagaagaagcccaccagccagggcaagagcagcagcaagaaggagatgagcaagagagacggcaaggagaagaaggacagaggcgtgaccagattccaggagaacgccagcgagggcaaggcccccgccgaggacgtgttcaagaagcccctgccccccaccgtgaagaaggaggagagcccccccccccccaaggtggtgaaccccctgatcggcctgctgggcgagtacggcggcgacagcgactacgaggaggaggaggaggaggagcagaccccccccccccagcccagaaccgcccagccccagaagagagaggagcagaccaagaaggagaacgaggaggacaagctgaccgactggaacaagctggcctgcctgctgtgcagaagacagttccccaacaaggaggtgctgatcaagcaccagcagctgagcgacctgcacaagcagaacctggagatccacagaaagatcaagcagagcgagcaggagctggcctacctggagagaagagagagagagggcaagttcaagggcagaggcaacgacagaagagagaagctgcagagcttcgacagccccgagagaaagagaatcaagtacagcagagagaccgacagcgacagaaagctggtggacaaggaggacatcgacaccagcagcaagggcggctgcgtgcagcaggccaccggctggagaaagggcaccggcctgggctacggccaccccggcctggccagcagcgaggaggccgagggcagaatgagaggccccagcgtgggcgccagcggcagaaccagcaagagacagagcaacgagacctacagagacgccgtgagaagagtgatgttcgccagatacaaggagctggactag

SEQ ID NO: 159193 - DNA, 429 bp, Artificial Sequence
  derived and/or modified sequence
atgtggggcgacagcagacccgccaacagaaccggccccttcagaggcagccaggaggagagattcgcccccggctggaacagagactacccccccccccccctgaagagccacgcccaggagagacacagcggcaacttccccggcagagacagcctgcccttcgacttccagggccacagcggcccccccttcgccaacgtggaggagcacagcttcagctacggcgccagagacggcccccacggcgactacagaggcggcgagggccccggccacgacttcagaggcggcgacttcagcagcagcgacttccagagcagagacagcagccagctggacttcagaggcagagacatccacagcggcgacttcagagacagagagggcccccccatggactacagaggcggcgacggcaccagctag

SEQ ID NO: 159194 - DNA, 1563 bp, Artificial Sequence
  derived and/or modified sequence
atgtggggcgacagcagacccgccaacagaaccggccccttcagaggcagccaggaggagagattcgcccccggctggaacagagactacccccccccccccctgaagagccacgcccaggagagacacagcggcaacttccccggcagagacagcctgcccttcgacttccagggccacagcggcccccccttcgccaacgtggaggagcacagcttcagctacggcgccagagacggcccccacggcgactacagaggcggcgagggccccggccacgacttcagaggcggcgacttcagcagcagcgacttccagagcagagacagcagccagctggacttcagaggcagagacatccacagcggcgacttcagagacagagagggcccccccatggactacagaggcggcgacggcaccagcatggactacagaggcagagaggccccccacatgaactacagagacagagacgcccacgccgtggacttcagaggcagagacgccccccccagcgacttcagaggcagaggcacctacgacctggacttcagaggcagagacggcagccacgccgacttcagaggcagagacctgagcgacctggacttcagagccagagagcagagcagaagcgacttcagaaacagagacgtgagcgacctggacttcagagacaaggacggcacccaggtggacttcagaggcagaggcagcggcaccaccgacctggacttcagagacagagacaccccccacagcgacttcagaggcagacacagaagcagaaccgaccaggacttcagaggcagagagatgggcagctgcatggagttcaaggacagagagatgccccccgtggaccccaacatcctggactacatccagcccagcacccaggacagagagcacagcggcatgaacgtgaacagaagagaggagagcacccacgaccacaccatcgagagacccgccttcggcatccagaagggcgagttcgagcacagcgagaccagagagggcgagacccagggcgtggccttcgagcacgagagccccgccgacttccagaacagccagagccccgtgcaggaccaggacaagagccagctgagcggcagagaggagcagagcagcgacgccggcctgttcaaggaggagggcggcctggacttcctgggcagacaggacaccgactacagaagcatggagtacagagacgtggaccacagactgcccggcagccagatgttcggctacggccagagcaagagcttccccgagggcaagaccgccagagacgcccagagagacctgcaggaccaggactacagaaccggccccagcgaggagaagcccagcagactgatcagactgagcggcgtgcccgaggacgccaccaaggaggagatcctgaacgccttcagaacccccgacggcatgcccgtgaagaacctgcagctgaaggagtacaacaccggcaacagcaacgaccccggccagagaagctaccccggcgtgtgcatcaagcccggcttcctggtgctgcagaccatgtag

SEQ ID NO: 159195 - DNA, 231 bp, Artificial Sequence
  derived and/or modified sequence
atgtggggcgacagcagacccgccaacagaaccggccccttcagaggcagccaggaggagagattcgcccccggctggaacagagactacccccccccccccctgaagagccacgcccaggagagacacagcggcaacttccccggcagagacagcctgcccttcgacttccagggccacagcggcccccccttcgccaacgtggaggagcacagcttcagctacggctag

SEQ ID NO: 159196 - protein, 815 aa, Artificial Sequence
  derived and/or modified sequence
MGSDKRVSRTERSGRYGSIIDRDDRDERESRSRRRDSDYKRSSDDRRGDRYDDYRDYDSPERERERRNSDRSEDGYHSDGDYGEHDYRHDISDERESKTIMLRGLPITITESDIREMMESFEGPQPADVRLMKRKTGVSRGFAFVEFYHLQDATSWMEANQKKLVIQGKHIAMHYSNPRPKFEDWLCNKCCLNNFRKRLKCFRCGADKFDSEQEVPPGTTESVQSVDYYCDTIILRNIAPHTVVDSIMTALSPYASLAVNNIRLIKDKQTQQNRGFAFVQLSSAMDASQLLQILQSLHPPLKIDGKTIGVDFAKSARKDLVLSDGNRVSAFSVASTAIAAAQWSSTQSQSGEGGSVDYSYLQPGQDGYAQYAQYSQDYQQFYQQQAGGLESDASSASGTAVTTTSAAVVSQSPQLYNQTSNPPGSPTEEAQPSTSTSTQAPAASPTGVVPGTKYAVPDTSTYQYDESSGYYYDPTTGLYYDPNSQYYYNSLTQQYLYWDGEKETYVPAAESSSHQQSGLPPAKEGKEKKEKPKSKTAQQIAKDMERWAKSLNKQKENFKNSFQPVNSLREEERRESAAADAGFALFEKKGALAERQQLIPELVRNGDEENPLKRGLVAAYSGDSDNEEELVERLESEEEKLADWKKMACLLCRRQFPNKDALVRHQQLSDLHKQNMDIYRRSRLSEQELEALELREREMKYRDRAAERREKYGIPEPPEPKRKKQFDAGTVNYEQPTKDGIDHSNIGNKMLQAMGWREGSGLGRKCQGITAPIEAQVRLKGAGLGAKGSAYGLSGADSYKDAVRKAMFARFTEME

SEQ ID NO: 159197 - protein, 814 aa, Artificial Sequence
  derived and/or modified sequence
GTKCRVSRTERSGRYGSIIDRDDRDERESRSRRRDSDYKRSSDDRRGDRYDDYRDYDSPERERERRNSDRSEDGYHSDGDYGEHDYRHDISDERESKTIMLRGLPITITESDIREMMESFEGPQPADVRLMKRKTGVSRGFAFVEFYHLQDATSWMEANQKKLVIQGKHIAMHYSNPRPKFEDWLCNKCCLNNFRKRLKCFRCGADKFDSEQEVPPGTTESVQSVDYYCDTIILRNIAPHTVVDSIMTALSPYASLAVNNIRLIKDKQTQQNRGFAFVQLSSAMDASQLLQILQSLHPPLKIDGKTIGVDFAKSARKDLVLSDGNRVSAFSVASTAIAAAQWSSTQSQSGEGGSVDYSYLQPGQDGYAQYAQYSQDYQQFYQQQAGGLESDASSASGTAVTTTSAAVVSQSPQLYNQTSNPPGSPTEEAQPSTSTSTQAPAASPTGVVPGTKYAVPDTSTYQYDESSGYYYDPTTGLYYDPNSQYYYNSLTQQYLYWDGEKETYVPAAESSSHQQSGLPPAKEGKEKKEKPKSKTAQQIAKDMERWAKSLNKQKENFKNSFQPVNSLREEERRESAAADAGFALFEKKGALAERQQLIPELVRNGDEENPLKRGLVAAYSGDSDNEEELVERLESEEEKLADWKKMACLLCRRQFPNKDALVRHQQLSDLHKQNMDIYRRSRLSEQELEALELREREMKYRDRAAERREKYGIPEPPEPKRKKQFDAGTVNYEQPTKDGIDHSNIGNKMLQAMGWREGSGLGRKCQGITAPIEAQVRLKGAGLGAKGSAYGLSGADSYKDAVRKAMFARFTEME

SEQ ID NO: 159198 - protein, 120 aa, Artificial Sequence
  derived and/or modified sequence
MGSDKRVSRTERSGRYGSIIDRDDRDERESRSRRRDSDYKRSSDDRRGDRYDDYRDYDSPERERERRNSDRSEDGYHSDGDYGEHDYRHDISDERESKTIMLRGLPITITESDIREMMES

SEQ ID NO: 159199 - protein, 105 aa, Artificial Sequence
  derived and/or modified sequence
MGSDKRVSRTERSGRYGSIIDRDDRDERESRSRRRDSDYKRSSDDRRGDRYDDYRDYDSPERERERRNSDRSEDGYHSDGDYGEHDYRHDISDERESKTIMLRGL

SEQ ID NO: 159200 - DNA, 3188 bp, Artificial Sequence
  derived and/or modified sequence
aagcgtgaggtactgtgggtaggagacggccgtcggcggaggcgccattttgtgtagccgccgaaccttgttggaggttctggggcgcagaaccgctactgctgcttcggtctctccttgggaaaaaataaaatttgaaccttttggagctgtgtgctaaatcttcagtgggacaatgggttcagacaaaagagtgagtagaacagagcgtagtggaagatacggttccatcatagacagggatgaccgtgatgagcgtgaatcccgaagcaggcggagggactcagattacaaaagatctagtgatgatcggaggggtgatagatatgatgactaccgagactatgacagtccagagagagagcgtgaaagaaggaacagtgaccgatccgaagatggctaccattcagatggtgactatggtgagcacgactataggcatgacatcagtgacgagagggagagcaagaccatcatgctgcgcggccttcccatcaccatcacagagagcgatattcgagaaatgatggagtccttcgaaggccctcagcctgcggatgtgaggctgatgaagaggaaaacaggtgtaagccgtggtttcgccttcgtggagttttatcacttgcaagatgctaccagctggatggaagccaatcagaaaaagttggtgattcaaggaaagcacattgcaatgcattatagcaatcccagacctaagtttgaagattggctttgtaacaagtgctgccttaacaatttcaggaaaagactaaaatgcttccgatgtggagcagacaagtttgactctgaacaggaagtgcctcctggaaccacagagtcggttcagtctgtggattactactgtgatacgatcattcttcggaacatagctccgcacactgtggtggattccatcatgacagcactgtctccttacgcgtctttagctgtcaataacatccgcctcataaaagacaaacagacccagcagaacagaggcttcgcatttgtgcagctgtcctctgcaatggatgcttctcagctgcttcagatattacagagtctccatcctcctttgaaaattgatggcaaaactattggggttgattttgcaaaaagtgccagaaaagacttggtcctctcagatggtaaccgcgtcagcgctttctctgtagctagtacggctattgctgctgctcagtggtcatccacccagtctcaaagtggtgaaggaggcagtgttgactacagttatctgcaaccaggtcaagatggctatgcccaatatgctcagtattcacaggattatcagcagttttatcaacaacaagctggaggattggaatctgatgcatcatctgcatcaggcacagcagtgaccaccacctcagcggctgtagtgtcccagagtcctcagctgtataatcaaacctccaatccacctggctctccgactgaggaagcacagcctagcactagcacaagtacacaggccccagccgcttcccctactggtgtagttcctggtaccaaatatgcagtacctgacacgtccacttaccagtatgatgaatcttcaggatattactatgatccgacaacagggctctattatgaccccaactcgcaatactactataattccttgacccagcagtacctttactgggatggggaaaaagagacctacgtgccagctgcagagtctagctcccaccagcagtcgggcctgcctcctgcaaaagaggggaaagagaagaaggagaaacccaagagcaaaacagcccagcagattgccaaagacatggaacgctgggctaagagtttgaataagcagaaagaaaactttaaaaatagctttcagcctgtcaattccttgagggaagaagaaaggagagaatctgctgcagcagacgctggctttgctctctttgagaagaagggagccttagctgaaaggcagcagctcatcccagaattggtgcgaaatggagatgaggagaatcccctcaaaaggggtctggttgctgcttacagtggtgacagtgacaatgaggaggagctggtggagagacttgagagtgaggaagagaagctagctgactggaagaagatggcctgtctgctctgccggcgccagttcccgaacaaagatgccctagtcaggcaccagcaactctcagaccttcacaagcaaaacatggacatctatcgacgatccaggctgagcgagcaggagctggaagccttggagctaagggagagagagatgaaataccgagaccgagctgcagaaagacgggagaagtacggcattccagaacctccagagcccaagcgcaagaagcagtttgatgccggcactgtgaattacgagcaacccaccaaagatggcattgaccacagtaacattggcaacaagatgctgcaggccatgggctggcgggaaggctctggcttgggacgaaagtgtcaaggcattacggctcccattgaggctcaagttcggctaaagggagctggcctaggagccaaaggcagcgcatatggtttgtcgggcgccgattcctacaaagatgctgtccggaaagccatgtttgcccggttcactgagatggagtgagagagagagagagagagagatgacaaggagcacaagaagtggtccatctcccgaattcgctgttaccgcctgtctctttaagggcatgccttgtgctgttaatagatcttagggtgaaccacttcattctgcagggttctccctcccaccttaaagaagttccccttatgtgggttgcctggtgaatggccttccttcccgccagagggcttgtgaacagaccggagaggacagtggattgtttatactccagtgtacatagtgtaatgtagcgtgtttacatgtgtagcctatgttgtggtccatcagcccctcacattcctaggggtttgagatgctgtaggtggtatgtgacaccaaagccacctctgtcatttgttgtgatgtcttttcttggcaaaagccttgtgtatatttgtatattacacatttgtacagaattttggaagattttcagtctagttgccaaatctggctcctttacaaaagaaataccttgagaaatgggtgtcctgtgtctctttattcttgggtgggtaggtgggtcaagcatgtctgagccagt

SEQ ID NO: 159201 - DNA, 2944 bp, Artificial Sequence
  derived and/or modified sequence
ggtacaaaatgcagagtgagtagaacagagcgtagtggaagatacggttccatcatagacagggatgaccgtgatgagcgtgaatcccgaagcaggcggagggactcagattacaaaagatctagtgatgatcggaggggtgatagatatgatgactaccgagactatgacagtccagagagagagcgtgaaagaaggaacagtgaccgatccgaagatggctaccattcagatggtgactatggtgagcacgactataggcatgacatcagtgacgagagggagagcaagaccatcatgctgcgcggccttcccatcaccatcacagagagcgatattcgagaaatgatggagtccttcgaaggccctcagcctgcggatgtgaggctgatgaagaggaaaacaggtgtaagccgtggtttcgccttcgtggagttttatcacttgcaagatgctaccagctggatggaagccaatcagaaaaagttggtgattcaaggaaagcacattgcaatgcattatagcaatcccagacctaagtttgaagattggctttgtaacaagtgctgccttaacaatttcaggaaaagactaaaatgcttccgatgtggagcagacaagtttgactctgaacaggaagtgcctcctggaaccacagagtcggttcagtctgtggattactactgtgatacgatcattcttcggaacatagctccgcacactgtggtggattccatcatgacagcactgtctccttacgcgtctttagctgtcaataacatccgcctcataaaagacaaacagacccagcagaacagaggcttcgcatttgtgcagctgtcctctgcaatggatgcttctcagctgcttcagatattacagagtctccatcctcctttgaaaattgatggcaaaactattggggttgattttgcaaaaagtgccagaaaagacttggtcctctcagatggtaaccgcgtcagcgctttctctgtagctagtacggctattgctgctgctcagtggtcatccacccagtctcaaagtggtgaaggaggcagtgttgactacagttatctgcaaccaggtcaagatggctatgcccaatatgctcagtattcacaggattatcagcagttttatcaacaacaagctggaggattggaatctgatgcatcatctgcatcaggcacagcagtgaccaccacctcagcggctgtagtgtcccagagtcctcagctgtataatcaaacctccaatccacctggctctccgactgaggaagcacagcctagcactagcacaagtacacaggccccagccgcttcccctactggtgtagttcctggtaccaaatatgcagtacctgacacgtccacttaccagtatgatgaatcttcaggatattactatgatccgacaacagggctctattatgaccccaactcgcaatactactataattccttgacccagcagtacctttactgggatggggaaaaagagacctacgtgccagctgcagagtctagctcccaccagcagtcgggcctgcctcctgcaaaagaggggaaagagaagaaggagaaacccaagagcaaaacagcccagcagattgccaaagacatggaacgctgggctaagagtttgaataagcagaaagaaaactttaaaaatagctttcagcctgtcaattccttgagggaagaagaaaggagagaatctgctgcagcagacgctggctttgctctctttgagaagaagggagccttagctgaaaggcagcagctcatcccagaattggtgcgaaatggagatgaggagaatcccctcaaaaggggtctggttgctgcttacagtggtgacagtgacaatgaggaggagctggtggagagacttgagagtgaggaagagaagctagctgactggaagaagatggcctgtctgctctgccggcgccagttcccgaacaaagatgccctagtcaggcaccagcaactctcagaccttcacaagcaaaacatggacatctatcgacgatccaggctgagcgagcaggagctggaagccttggagctaagggagagagagatgaaataccgagaccgagctgcagaaagacgggagaagtacggcattccagaacctccagagcccaagcgcaagaagcagtttgatgccggcactgtgaattacgagcaacccaccaaagatggcattgaccacagtaacattggcaacaagatgctgcaggccatgggctggcgggaaggctctggcttgggacgaaagtgtcaaggcattacggctcccattgaggctcaagttcggctaaagggagctggcctaggagccaaaggcagcgcatatggtttgtcgggcgccgattcctacaaagatgctgtccggaaagccatgtttgcccggttcactgagatggagtgagagagagagagagagagagatgacaaggagcacaagaagtggtccatctcccgaattcgctgttaccgcctgtctctttaagggcatgccttgtgctgttaatagatcttagggtgaaccacttcattctgcagggttctccctcccaccttaaagaagttccccttatgtgggttgcctggtgaatggccttccttcccgccagagggcttgtgaacagaccggagaggacagtggattgtttatactccagtgtacatagtgtaatgtagcgtgtttacatgtgtagcctatgttgtggtccatcagcccctcacattcctaggggtttgagatgctgtaggtggtatgtgacaccaaagccacctctgtcatttgttgtgatgtcttttcttggcaaaagccttgtgtatatttgtatattacacatttgtacagaattttggaagattttcagtctagttgccaaatctggctcctttacaaaagaaataccttg

SEQ ID NO: 159202 - DNA, 2949 bp, Artificial Sequence
  derived and/or modified sequence
ggccgtcggcggaggcgccattttgtgtagccgccgaaccttgttggaggttctggggcgcagaaccgctactgctgcttcggtctctccttgggaaaaaataaaatttgaaccttttggagctgtgtgctaaatcttcagtgggacaatgggttcagacaaaagagtgagtagaacagagcgtagtggaagatacggttccatcatagacagggatgaccgtgatgagcgtgaatcccgaagcaggcggagggactcagattacaaaagatctagtgatgatcggaggggtgatagatatgatgactaccgagactatgacagtccagagaatgataaatattcgagaaatgatggagtccttcgaaggccctcagcctgcggatgtgaggctgatgaagaggaaaacaggtgtaagccgtggtttcgccttcgtggagttttatcacttgcaagatgctaccagctggatggaagccaatcagaaaaagttggtgattcaaggaaagcacattgcaatgcattatagcaatcccagacctaagtttgaagattggctttgtaacaagtgctgccttaacaatttcaggaaaagactaaaatgcttccgatgtggagcagacaagtttgactctgaacaggaagtgcctcctggaaccacagagtcggttcagtctgtggattactactgtgatacgatcattcttcggaacatagctccgcacactgtggtggattccatcatgacagcactgtctccttacgcgtctttagctgtcaataacatccgcctcataaaagacaaacagacccagcagaacagaggcttcgcatttgtgcagctgtcctctgcaatggatgcttctcagctgcttcagatattacagagtctccatcctcctttgaaaattgatggcaaaactattggggttgattttgcaaaaagtgccagaaaagacttggtcctctcagatggtaaccgcgtcagcgctttctctgtagctagtacggctattgctgctgctcagtggtcatccacccagtctcaaagtggtgaaggaggcagtgttgactacagttatctgcaaccaggtcaagatggctatgcccaatatgctcagtattcacaggattatcagcagttttatcaacaacaagctggaggattggaatctgatgcatcatctgcatcaggcacagcagtgaccaccacctcagcggctgtagtgtcccagagtcctcagctgtataatcaaacctccaatccacctggctctccgactgaggaagcacagcctagcactagcacaagtacacaggccccagccgcttcccctactggtgtagttcctggtaccaaatatgcagtacctgacacgtccacttaccagtatgatgaatcttcaggatattactatgatccgacaacagggctctattatgaccccaactcgcaatactactataattccttgacccagcagtacctttactgggatggggaaaaagagacctacgtgccagctgcagagtctagctcccaccagcagtcgggcctgcctcctgcaaaagaggggaaagagaagaaggagaaacccaagagcaaaacagcccagcagattgccaaagacatggaacgctgggctaagagtttgaataagcagaaagaaaactttaaaaatagctttcagcctgtcaattccttgagggaagaagaaaggagagaatctgctgcagcagacgctggctttgctctctttgagaagaagggagccttagctgaaaggcagcagctcatcccagaattggtgcgaaatggagatgaggagaatcccctcaaaaggggtctggttgctgcttacagtggtgacagtgacaatgaggaggagctggtggagagacttgagagtgaggaagagaagctagctgactggaagaagatggcctgtctgctctgccggcgccagttcccgaacaaagatgccctagtcaggcaccagcaactctcagaccttcacaagcaaaacatggacatctatcgacgatccaggctgagcgagcaggagctggaagccttggagctaagggagagagagatgaaataccgagaccgagctgcagaaagacgggagaagtacggcattccagaacctccagagcccaagcgcaagaagcagtttgatgccggcactgtgaattacgagcaacccaccaaagatggcattgaccacagtaacattggcaacaagatgctgcaggccatgggctggcgggaaggctctggcttgggacgaaagtgtcaaggcattacggctcccattgaggctcaagttcggctaaagggagctggcctaggagccaaaggcagcgcatatggtttgtcgggcgccgattcctacaaagatgctgtccggaaagccatgtttgcccggttcactgagatggagtgagagagagagagagagagagatgacaaggagcacaagaagtggtccatctcccgaattcgctgttaccgcctgtctctttaagggcatgccttgtgctgttaatagatcttagggtgaaccacttcattctgcagggttctccctcccaccttaaagaagttccccttatgtgggttgcctggtgaatggccttccttcccgccagagggcttgtgaacagaccggagaggacagtggattgtttatactccagtgtacatagtgtaatgtagcgtgtttacatgtgtagcctatgttgtggtccatcagcccctcacattcctaggggtttgagatgctgtaggtggtatgtgacaccaaagccacctctgtcatttgttgtgatgtcttttcttggcaaaagccttgtgtatatttgtatattacacatttgtacagaattttggaagattttcagtctagttgccaaatctggctcctttacaaaagaaataccttg

SEQ ID NO: 159203 - DNA, 2870 bp, Artificial Sequence
  derived and/or modified sequence
ggtacaaaatgcagagtgagtagaacagagcgtagtggaagatacggttccatcatagacagggatgaccgtgatgagcgtgaatcccgaagcaggcggagggactcagattacaaaagatctagtgatgatcggaggggtgatagatatgatgactaccgagactatgacagtccagagagagagcgtgaaagaaggaacagtgaccgatccgaagatggctaccattcagatggtgactatggtgagcacgactataggcatgacatcagtgacgagagggagagcaagaccatcatgctgcgcggccttcccatcaccatcacagagagcgatattcgagaaatgatggagtccttcgaaggccctcagcctgcggatgtgaggctgatgaagaggaaaacagaaaaagttggtgattcaaggaaagcacattgcaatgcattatagcaatcccagacctaagtttgaagattggctttgtaacaagtgctgccttaacaatttcaggaaaagactaaaatgcttccgatgtggagcagacaagtttgactctgaacaggaagtgcctcctggaaccacagagtcggttcagtctgtggattactactgtgatacgatcattcttcggaacatagctccgcacactgtggtggattccatcatgacagcactgtctccttacgcgtctttagctgtcaataacatccgcctcataaaagacaaacagacccagcagaacagaggcttcgcatttgtgcagctgtcctctgcaatggatgcttctcagctgcttcagatattacagagtctccatcctcctttgaaaattgatggcaaaactattggggttgattttgcaaaaagtgccagaaaagacttggtcctctcagatggtaaccgcgtcagcgctttctctgtagctagtacggctattgctgctgctcagtggtcatccacccagtctcaaagtggtgaaggaggcagtgttgactacagttatctgcaaccaggtcaagatggctatgcccaatatgctcagtattcacaggattatcagcagttttatcaacaacaagctggaggattggaatctgatgcatcatctgcatcaggcacagcagtgaccaccacctcagcggctgtagtgtcccagagtcctcagctgtataatcaaacctccaatccacctggctctccgactgaggaagcacagcctagcactagcacaagtacacaggccccagccgcttcccctactggtgtagttcctggtaccaaatatgcagtacctgacacgtccacttaccagtatgatgaatcttcaggatattactatgatccgacaacagggctctattatgaccccaactcgcaatactactataattccttgacccagcagtacctttactgggatggggaaaaagagacctacgtgccagctgcagagtctagctcccaccagcagtcgggcctgcctcctgcaaaagaggggaaagagaagaaggagaaacccaagagcaaaacagcccagcagattgccaaagacatggaacgctgggctaagagtttgaataagcagaaagaaaactttaaaaatagctttcagcctgtcaattccttgagggaagaagaaaggagagaatctgctgcagcagacgctggctttgctctctttgagaagaagggagccttagctgaaaggcagcagctcatcccagaattggtgcgaaatggagatgaggagaatcccctcaaaaggggtctggttgctgcttacagtggtgacagtgacaatgaggaggagctggtggagagacttgagagtgaggaagagaagctagctgactggaagaagatggcctgtctgctctgccggcgccagttcccgaacaaagatgccctagtcaggcaccagcaactctcagaccttcacaagcaaaacatggacatctatcgacgatccaggctgagcgagcaggagctggaagccttggagctaagggagagagagatgaaataccgagaccgagctgcagaaagacgggagaagtacggcattccagaacctccagagcccaagcgcaagaagcagtttgatgccggcactgtgaattacgagcaacccaccaaagatggcattgaccacagtaacattggcaacaagatgctgcaggccatgggctggcgggaaggctctggcttgggacgaaagtgtcaaggcattacggctcccattgaggctcaagttcggctaaagggagctggcctaggagccaaaggcagcgcatatggtttgtcgggcgccgattcctacaaagatgctgtccggaaagccatgtttgcccggttcactgagatggagtgagagagagagagagagagagatgacaaggagcacaagaagtggtccatctcccgaattcgctgttaccgcctgtctctttaagggcatgccttgtgctgttaatagatcttagggtgaaccacttcattctgcagggttctccctcccaccttaaagaagttccccttatgtgggttgcctggtgaatggccttccttcccgccagagggcttgtgaacagaccggagaggacagtggattgtttatactccagtgtacatagtgtaatgtagcgtgtttacatgtgtagcctatgttgtggtccatcagcccctcacattcctaggggtttgagatgctgtaggtggtatgtgacaccaaagccacctctgtcatttgttgtgatgtcttttcttggcaaaagccttgtgtatatttgtatattacacatttgtacagaattttggaagattttcagtctagttgccaaatctggctcctttacaaaagaaataccttg

SEQ ID NO: 159204 - DNA, 2448 bp, Artificial Sequence
  derived and/or modified sequence
atggggtctgataaacgggtgagccgaactgaacgtagcggtcggtacggtagtatcatcgatcgggacgatagggacgaacgagagtctcgttctcgccgaagggattctgactacaaaagatcaagcgacgaccgtcgaggagatagatacgatgattaccgggactatgattctccggagagagaacgagaacggcgcaattcagaccgctccgaggacgggtaccattccgacggcgactacggcgagcacgattaccggcatgacattagtgatgaaagggaatcaaagacgattatgctacgcggtctgcccatcaccataacagagtcagacatacgagaaatgatggagagtttcgaaggaccacagcccgccgacgtgaggctgatgaaaaggaaaactggcgtgagcaggggctttgctttcgtggaattctatcacctgcaggatgccacatcctggatggaagctaatcaaaaaaagctggtaatacagggcaaacacatcgcaatgcactactccaatccccgacccaaattcgaggattggttatgtaataagtgctgcttaaacaattttagaaaacgactaaaatgcttccgatgtggagcagacaaattcgatagtgagcaggaggtgcctcccggaacaactgaaagcgtgcaaagcgtggattattattgtgacacaatcattcttcgcaacatagctccgcatacagtcgtcgattccataatgactgcactctcgccttacgcttcactcgctgtgaataatataagactgataaaggataagcagacacagcagaacaggggattcgcctttgtccagttgagcagcgctatggacgcatctcagttactccagattctgcagtctctccatcccccgctgaagattgacggtaagaccatcggagtcgacttcgccaagtccgctagaaaagatctggtgctgagtgatgggaacagagtttccgctttctctgtggctagcaccgccattgcagccgcccagtggtcttctacccagtcccaatccggcgagggaggaagtgtggattactcttacctgcagccaggccaagatggctatgcacagtatgcacagtattctcaagattatcagcagttctaccaacagcaggcaggcggccttgaatcagacgcctcaagcgcctcaggtacagccgtcaccacgacttctgctgctgtcgtgtcccagtctcctcaactgtacaaccagacttcaaatcctccaggatcccctacagaggaagcccaaccaagcacctccacatccacccaggcacccgcagcgtcccccacaggggtggttccaggaaccaagtatgcggtccccgacacctctacctaccagtacgacgagagttctggctattattatgatcccactaccgggctttattacgatcctaattcccaatattattataacagtcttacccagcagtatctgtattgggatggtgagaaggagacctatgttccagccgctgaatctagctctcaccaacagagcggattgccccccgctaaggagggtaaagagaaaaaggaaaagcctaagagcaaaactgcacagcagattgccaaagatatggaacggtgggcaaaatcactaaataaacagaaggaaaacttcaagaatagcttccaacccgtcaattctctccgggaagaagagcgccgagagtctgccgctgcagacgctgggttcgctttgttcgaaaagaagggcgctctcgccgagcggcagcaactaatcccggagctcgttcggaacggtgatgaagaaaaccccctgaaaaggggtctcgtcgccgcctattcgggagacagcgataatgaggaggagttggtcgaacgactggaatctgaagaggaaaaactggccgactggaagaagatggcttgcctgctgtgccgaagacagtttccaaacaaggacgccctggttagacatcaacaactttcagatctccataaacagaacatggatatatacagacggagccgcctctccgagcaggagcttgaggccctggagctgagagagcgcgagatgaagtacagagaccgggctgcagaacggagggagaaatatggtatacccgagccccccgagccaaagcggaagaagcagttcgatgccggcaccgtgaattacgagcagcctaccaaagacgggatcgaccattcaaacattggcaataagatgcttcaggccatgggatggagggagggctcaggattgggtaggaaatgtcagggcattaccgctccaatcgaggcccaggtacgattgaagggagcaggcctgggcgccaagggttctgcgtatggtttgtccggcgccgattcttacaaagacgctgtcagaaaagcaatgtttgcgaggtttacagaaatggagtag

SEQ ID NO: 159205 - DNA, 2445 bp, Artificial Sequence
  derived and/or modified sequence
ggcaccaagtgccgtgtatctaggaccgagcggtcgggtcgttatgggtcaataatagacagagacgatcgggatgagagggagagcagatcaaggcgtcgcgattccgattataaacggtcttccgacgatcgccggggggacaggtacgacgactaccgcgactatgactcgcctgaacgagaacgagagcgcagaaattccgatcgctccgaagacggctaccatagtgacggcgattacggtgaacatgattataggcacgacatctcagacgaaagagagagcaaaacaatcatgctccgaggactgccgatcacgatcactgaaagtgacattagagaaatgatggaatccttcgagggacctcaacctgccgatgtgaggctgatgaaaaggaaaacaggtgtcagcagagggttcgctttcgtggagttctatcatctccaggatgccaccagctggatggaggctaaccagaaaaaactggtgatccaaggcaaacatatcgcaatgcactactcaaatcctcggcccaaattcgaagactggctgtgtaataagtgctgcctaaacaatttccgaaaaaggctgaaatgttttcggtgtggagccgataagtttgactcagagcaagaagtaccgccaggaacgaccgagtccgttcagagcgtcgactattactgtgataccattatacttcggaatatcgccccacacacggtggtggactccatcatgaccgccttgtctccttacgcttccctcgctgtcaataatattcgactgatcaaagacaagcagactcagcagaaccggggctttgcctttgttcagttatcgtccgcgatggacgcttcacagctgcttcagattctgcagtcacttcatcctcccctgaagattgatggaaaaaccattggtgtagacttcgctaagtcagcaaggaaagaccttgtccttagcgacgggaatagggtctctgccttttccgtggcaagcactgccatagccgctgctcagtggtcttccacacagtcccagtcaggagagggaggaagtgttgactatagctacctccagcccggccaggacggctacgctcaatatgcgcagtatagccaggactatcaacagttttaccaacagcaggccggcgggctggaatcagacgcgagtagcgccagcggtaccgcagtcactaccacctccgccgcagttgtttcccagtcgccacagctttataaccagaccagcaacccccccgggtcaccgactgaagaggcccagccttccactagtacgagtacacaagcccccgccgcttctcccaccggcgtggtcccagggacgaagtatgctgttccagacacctctacctaccaatacgacgagtctagcggctattattacgatcccaccaccggactttattacgatcccaactcccaatattactacaatagcctcacacagcagtatctgtactgggacggggagaaagagacttacgttccagcggctgagtcaagcagtcaccaacagtcgggcttgccaccagcaaaggaaggtaaggagaaaaaggaaaaacctaaatctaagaccgcccaacagatcgccaaggacatggaacgctgggccaaatcgttgaacaaacaaaaagaaaacttcaagaattcctttcagccggtgaattcactccgggaggaagagcgccgggagtccgcggctgctgacgctggattcgcattgttcgaaaagaagggggccttggccgagcgccagcagctgatccccgagctagtcaggaacggagacgaagaaaaccccttgaagcgagggctggttgctgcctattccggggactccgacaatgaagaagagcttgtcgaaaggctggaaagcgaagaggagaaattggcggactggaaaaagatggcttgtctgctctgccgtcgccagttccccaataaggatgcacttgtgaggcaccaacaacttagtgatctccataaacagaacatggatatctatcgcagatcgagactgtcagagcaggagttggaagcgctggaactgagggagagggagatgaagtaccgggacagggccgcagagcggcgcgagaaatatggcattccagaaccacccgagcccaaaaggaagaaacagtttgatgcgggaaccgtcaattatgaacagcctacgaaggacggtattgaccatagcaacattggtaacaagatgctgcaggctatgggttggcgggaaggttcaggcctagggcgtaagtgccaaggaattacggcccccatcgaggcacaggtacgtctgaaaggggctggcctgggggcgaagggctcagcatacggtctgtcaggtgctgacagctataaggacgccgtgagaaaagctatgtttgcacgcttcactgagatggagtag

SEQ ID NO: 159206 - DNA, 2448 bp, Artificial Sequence
  derived and/or modified sequence
atgggcagtgacaagagggtgtccaggacagagaggagcggccgctatggcagcatcatcgacagagatgacagagatgagcgggagagccgcagcagaagaagagacagcgactacaagaggagcagtgatgaccggcggggggacagatatgatgactacagagattatgacagccctgagcgggagcgggagaggaggaacagcgacagaagtgaagatggctaccacagtgatggagactatggagaacatgactacagacatgacatcagtgatgagcgggagagcaagaccatcatgctgcggggcctgcccatcaccatcacagaaagtgacatccgggagatgatggagagctttgagggcccccagcctgcagatgtgcggctgatgaagaggaagacaggagtgtcccggggctttgcctttgtggagttctaccacctgcaggatgccacctcctggatggaggccaaccagaagaagctggtgatccagggcaagcacatcgccatgcactacagcaacccccggcccaagtttgaggactggctgtgcaacaagtgctgcctgaacaacttcaggaagaggctgaagtgcttccgctgtggggctgacaagtttgattctgagcaggaggtgcccccaggcaccacagagagcgtgcagagcgtggactactactgtgacaccatcatcctgaggaacatcgccccccacacagtggtggacagcatcatgacagccctgagcccctatgccagcctggccgtgaacaacatccgcctcatcaaggacaagcagacccagcagaacagaggatttgcctttgtgcagctgagcagcgccatggatgccagccagctgctgcagatcctgcagagcctgcacccccccctgaagattgatggcaagaccatcggcgtggactttgccaagagcgccaggaaggacctggtgctgagtgatggcaacagagtgtctgccttctctgtggccagcacagccatcgccgccgcccagtggagcagcacccagagccagagcggggagggcggctctgtggactacagctacctgcagcccggccaggacggctacgcccagtatgcccagtacagccaggactaccagcagttctaccagcagcaggccggcggcctggagagtgatgccagcagcgccagcggcacagctgtgaccaccaccagcgctgctgtggtgtcccagagcccccagctgtacaaccagaccagcaaccccccaggcagccccacagaggaggcccagcccagcaccagcaccagcacccaggccccagctgccagccccaccggggtggtgcccggcaccaagtatgctgtgcctgacaccagcacctaccagtatgatgagagcagcggctactactatgaccccaccaccggcctgtactatgaccccaacagccagtactactacaacagcctgacccagcagtacctgtactgggatggagagaaggagacctacgtgcctgctgctgagagcagcagccaccagcagagcggcctgcccccagccaaggagggcaaggagaagaaggagaagcccaagagcaagacagcccagcagatcgccaaggacatggagcgctgggccaagagcctgaacaagcagaaggagaacttcaagaacagcttccagcctgtgaacagcctgcgggaggaggagcggcgggagagcgctgctgctgatgctggctttgccctgtttgagaagaagggggccctggccgagcggcagcagctgatccctgagctggtgagaaatggagatgaggagaaccccctgaagaggggcctggtggccgcctacagcggggacagcgacaatgaggaggagctggtggagcggctggagagcgaggaggagaagctggccgactggaagaagatggcctgcctgctgtgccggcggcagttccccaacaaggatgccctggtgcgccaccagcagctgagtgacctgcacaagcagaacatggacatctaccgccgcagccggctgtctgagcaggagctggaggccctggagctgcgggagcgggagatgaagtacagagacagagctgctgagcggcgggagaagtatggcatccctgagcccccagagcccaagaggaagaagcagtttgatgctggcaccgtgaactatgagcagcccaccaaggatggcatcgaccacagcaacatcggcaacaagatgctgcaggccatgggctggagggagggcagcggcctgggcaggaagtgccagggcatcacagcccccatcgaggcccaggtgcggctgaagggggccggcctgggcgccaagggcagcgcctacggcctgagcggggctgacagctacaaggatgctgtgaggaaggccatgtttgcccgcttcacagagatggagtag

SEQ ID NO: 159207 - DNA, 2445 bp, Artificial Sequence
  derived and/or modified sequence
ggcaccaagtgccgggtgtccaggacagagaggagcggccgctatggcagcatcatcgacagagatgacagagatgagcgggagagccgcagcagaagaagagacagcgactacaagaggagcagtgatgacagaagaggagacagatatgatgactacagagattatgacagccctgagcgggagcgggagaggaggaacagcgacagaagtgaagatggctaccacagtgatggagactatggagaacatgactacagacatgacatcagtgatgagcgggagagcaagaccatcatgctgcggggcctgcccatcaccatcacagaaagtgacatccgggagatgatggagagctttgagggcccccagcctgcagatgtgcggctgatgaagaggaagacaggagtgtcccggggctttgcctttgtggagttctaccacctgcaggatgccacctcctggatggaggccaaccagaagaagctggtgatccagggcaagcacatcgccatgcactacagcaacccccggcccaagtttgaggactggctgtgcaacaagtgctgcctgaacaacttcaggaagaggctgaagtgcttccgctgtggggctgacaagtttgacagcgagcaggaggtgcccccaggcaccacagaatctgtgcagagcgtggactactactgtgacaccatcatcctgagaaatattgccccccacacagtggtggacagcatcatgacagccctgagcccctatgccagcctggccgtgaacaacatccgcctcatcaaggacaagcagacccagcagaacagaggatttgcctttgtgcagctgagcagcgccatggatgccagccagctgctgcagatcctgcagagcctgcacccccccctgaagattgatggcaagaccatcggcgtggactttgccaagagcgccaggaaggacctggtgctgagtgatggcaacagagtgtctgccttctctgtggccagcacagccatcgctgctgcccagtggagcagcacccagagccagagcggggagggcggctctgtggactacagctacctgcagcccggccaggacggctacgcccagtatgcccagtacagccaggactaccagcagttctaccagcagcaggccggcggcctggagagtgatgccagcagcgccagcggcacagctgtgaccaccaccagcgctgctgtggtgtcccagagcccccagctgtacaaccagaccagcaaccccccaggcagccccacagaggaggcccagcccagcaccagcaccagcacccaggccccagctgccagccccactggagtggtgcccggcaccaagtatgctgtgcctgacaccagcacctaccagtatgatgagagcagcggctactactatgaccccaccaccggcctgtactatgaccccaacagccagtactactacaacagcctgacccagcagtacctgtactgggatggagagaaggagacctacgtgcctgctgctgagagcagcagccaccagcagagcggcctgcccccagccaaggagggcaaggagaagaaggagaagcccaagagcaagacagcccagcagatcgccaaggacatggagcgctgggccaagagcctgaacaagcagaaggagaacttcaagaacagcttccagcctgtgaacagcctgcgggaggaggagcggcgggagagcgctgctgctgatgctggctttgccctgtttgagaagaagggggccctggccgagcggcagcagctgatccctgagctggtgagaaatggagatgaggagaaccccctgaagaggggcctggtggccgcctacagcggggacagcgacaatgaggaggagctggtggagcggctggagagcgaggaggagaagctggccgactggaagaagatggcctgcctgctgtgccggcggcagttccccaacaaggatgccctggtgcgccaccagcagctgagtgacctgcacaagcagaacatggacatctacagaagaagccggctgtctgagcaggagctggaggccctggagctgcgggagcgggagatgaagtacagagacagagctgctgagcggcgggagaagtatggcatccctgagcccccagagcccaagaggaagaagcagtttgatgctggcaccgtgaactatgagcagcccaccaaggatggcatcgaccacagcaacatcggcaacaagatgctgcaggccatgggctggagggagggcagcggcctgggcaggaagtgccagggcatcacagcccccatcgaggcccaggtgcggctgaagggagctggcctgggcgccaagggcagcgcctacggcctgtctggagctgacagctacaaggatgctgtgaggaaggccatgtttgcccgcttcacagagatggagtag

SEQ ID NO: 159208 - DNA, 2448 bp, Artificial Sequence
  derived and/or modified sequence
atgggcagcgacaagcgggtgagccggaccgagcggagcggccggtacggaagtattattgatagagacgacagagacgaacgcgaatcgaggtctagacgacgtgatagtgattataagaggtcttctgacgaccgtagaggagatcggtacgacgactaccgcgactacgatagtcccgaacgtgaaagggaaagaagaaattctgacagatctgaggatggatatcactctgacggggactacggagaacacgactacagacatgatatatccgacgagagagaatctaaaactattatgctgcgtggcctacctataacaatcaccgagagtgacattagggagatgatggagagtttcgaaggaccacaaccagccgacgtgcgcttgatgaagcggaagacgggagtttcgcgcgggttcgcgtttgttgaattctaccaccttcaagacgcaacaagctggatggaggctaaccagaaaaaactggtgatccaaggaaagcatattgccatgcactattcaaatccaagacccaagtttgaggactggttatgtaataagtgttgtctgaataacttccggaaaaggctgaagtgttttaggtgcggtgcagacaagtttgatagcgagcaggaggttcccccaggtacaacggagtccgtccagagcgttgactattattgtgacacaattattctgagaaacatcgcacctcacacggtggttgattcaatcatgactgctctttctccctatgcctccctggccgtcaacaacatccgcctgatcaaggataaacaaacacagcaaaaccgcggttttgcatttgtgcagctgagctccgcgatggatgcctctcagctcttgcagatcctccagtctctccatcctcccctcaaaatcgacggcaagaccatcggggtcgatttcgcaaaatcagctcggaaagatctcgtcctgtcagatggtaaccgcgtgtctgccttttctgtcgcatccaccgcaatcgccgctgcacagtggagttccacccagtcccagtcaggcgaaggcggctctgtcgattattcatacttgcaacctggacaagatggatacgctcaatacgcccagtactcacaggattatcaacagttctaccagcagcaggcaggtggcctggagagcgacgccagctccgcttctggaaccgctgttacaacgaccagtgcggctgttgtgtcgcagtcgcctcagctgtacaatcagacctcaaacccccctggcagccccactgaggaagcccagcccagcacaagcacaagtacccaggcacctgctgcctcccctacaggagtcgtgcctggcactaaatatgccgtcccggacaccagtacttatcaatacgacgagtcgtcaggctattactacgaccctaccactggactatattatgatccaaactcccagtattactacaactccctgacacaacagtacctgtactgggatggggaaaaagaaacctacgttcccgcagcagagtcatcctcccaccagcaatcggggttgccccctgccaaggaaggcaaagaaaaaaaggaaaagcccaagtctaagaccgctcaacaaattgccaaggacatggaaaggtgggccaagtcgctcaacaaacaaaaggagaatttcaagaacagtttccagccagtaaattctctccgcgaggaggaaagaagggagagtgcagcggccgacgccggcttcgcactgttcgaaaaaaagggcgcgttggcggagaggcagcaactcatccccgagctcgtgcgtaacggagacgaggaaaatcccctcaaacgcgggctagttgcggcttatagcggcgactcagataacgaagaagagcttgtcgaaaggctcgaaagcgaggaggagaaactcgccgattggaagaaaatggcatgcctgttgtgtaggcgccagtttccgaacaaagacgccctggttaggcatcaacagctgtcagatctgcacaagcagaatatggatatataccgccgaagtcgcctgtcagagcaggagttagaagctctggaactgagggagcgggagatgaaatatagggacagagcggcggagcgccgcgagaagtatggcataccagagccgcctgaaccaaaaagaaagaagcagttcgacgccgggacggtgaattacgagcagcctaccaaagatggcatcgaccattctaatattgggaacaagatgctgcaagcaatggggtggagagaaggatccggattggggaggaagtgccagggaattacggcccctatcgaggcacaggtgcggcttaagggtgccggactgggagccaagggaagtgcatatggcttgtccggcgcagatagctacaaagacgccgttcgaaaagcaatgttcgcgaggttcaccgaaatggagtag

SEQ ID NO: 159209 - DNA, 2445 bp, Artificial Sequence
  derived and/or modified sequence
ggcaccaagtgccgggtgagccggaccgagcggagcggccggtacggcagtattatcgacagagatgaccgggatgaacgggaaagcagaagtcgcagacgcgactctgactacaaaagaagttcagatgatcgccgcggagaccgctatgatgactaccgcgattacgattcccctgagcgggagcgggagcggcgaaactcggatcgaagcgaggatggttatcactccgatggggactacggggagcacgattataggcatgacatttctgacgagcgagaaagcaagaccataatgctgaggggtttgcctattacgattacagaaagtgacattcgcgaaatgatggagtcattcgagggtccacaaccggccgacgtccggcttatgaaaaggaagacaggagtttcccgcggcttcgcctttgtcgaattctaccacctgcaggatgcgacctcgtggatggaggccaaccaaaaaaagctggttattcagggcaaacacatagcaatgcactattcaaaccctagacctaaattcgaggattggctgtgtaataagtgctgtctgaataacttccgcaagaggctaaaatgctttagatgtggagcagacaagttcgatagcgaacaagaagtgcctcctggcaccaccgagtctgtgcagtccgtagactactactgcgataccattatcctgcgaaacatcgcaccccacacagtcgtcgacagcatcatgaccgccctgtctccctacgcatctctggctgtgaacaacatccgccttataaaggacaagcaaactcaacagaatcgaggattcgctttcgtgcagctctcatcagccatggacgcaagccagcttctacagatactgcaatctctccacccccccctcaagatcgatgggaaaactattggcgttgacttcgctaagagtgcacggaaagatcttgtgctcagcgatggtaatcgcgtgagtgcgtttagcgtggcttctaccgctatcgcagccgcccagtggagtagtacccagtcgcaatctggggagggcggctcagtcgactacagttacctgcagcctggacaggatgggtacgctcagtatgctcagtattcccaagactaccagcagttctatcagcagcaggcaggcggcctggagtctgatgcctcttccgcttctggaaccgctgttactacgactagcgctgcagtggtgagccaatccccacagctgtacaaccaaacctctaatcctcctgggtctccaacagaggaagcccagccttctacttctaccagcacccaggcccccgccgcctctccaactggcgtagtgcccggcacaaaatatgccgttcctgatacttccacatatcaatacgacgagagcagcggctattattacgacccaaccacagggctgtattatgacccgaattcacagtattattacaattcgcttacccagcagtacctctactgggacggtgaaaaagaaacctacgtgcctgccgcggagtcttcaagccaccagcagagcggccttcctcccgccaaggaaggaaaagagaaaaaagaaaagcccaagtcgaaaacagcgcagcaaatcgccaaggatatggaacgctgggctaagagccttaacaagcagaaggagaattttaagaattcatttcaaccagtcaattcattgagggaagaggagagaagagaatctgctgcggcagatgccggcttcgcccttttcgagaaaaaaggggcgctggctgagagacagcagctgattccagagttagtcaggaacggggatgaagaaaatcccttaaagaggggtctggtggctgcctactccggggactcagataacgaggaagaacttgttgagagactggagtctgaagaagagaagcttgcagattggaagaaaatggcctgtttgctgtgcaggcggcagtttccaaacaaggatgctctggtacgccaccagcagctgagcgacctgcacaagcagaacatggatatataccgcagatcgcgtctgagcgaacaggaattggaagcactggaactgagggaacgtgagatgaagtatagggatcgtgcagcagaaaggagagagaaatatggcataccagagccccccgaacccaagcggaagaaacaattcgacgccggcactgtgaattatgaacagccaactaaggatggtattgatcatagtaatatcggtaataaaatgctgcaggccatggggtggcgggaggggagtgggctgggcaggaagtgtcagggcatcacagcaccaattgaagcacaggtgaggctgaagggtgccggcttaggcgctaaagggtccgcctatggactttctggggccgatagctacaaagatgccgtgcggaaagcaatgtttgcaaggttcacggaaatggaatag

SEQ ID NO: 159210 - DNA, 2448 bp, Artificial Sequence
  derived and/or modified sequence
atggggtccgacaaacgggtcagccgtactgaaaggtctggtcggtacggttctatcatagatcgggatgatagagatgaacgggagagccggtcacgacggcgagacagcgactacaaacgctcttctgatgacagaaggggcgaccgctacgatgactaccgagattatgactcccctgagagagaaagagagcgcagaaactccgatcggtctgaggacggatatcactccgatggcgattacggagagcacgattacaggcacgacattagtgacgaacgggagtccaagactattatgcttcgcggactccctatcacaatcacagagtccgacatacgggaaatgatggaatcctttgagggtcctcagccagctgacgtgaggctaatgaagcgcaaaaccggcgtctctagaggatttgcttttgtggaattctatcacctccaggatgccactagctggatggaggccaaccagaaaaagctagtcattcaaggcaaacatatagctatgcattactccaatccaagaccaaagtttgaggactggttgtgcaataaatgctgccttaacaactttaggaaacgcctaaagtgctttcgttgcggcgcagataagtttgatagtgagcaagaggtcccgcctggaacaaccgagtccgtgcaatccgtggactattattgcgacaccattatcctcagaaatattgcacctcatactgtcgtcgattcaatcatgactgcgctcagcccgtacgccagcctcgccgtgaacaatatcagactgatcaaagataaacagacgcagcagaaccgcggttttgcattcgtgcagttatcatccgcaatggatgcatcccagttattacagattcttcagagtcttcatcctcccctgaagatcgacgggaaaaccattggcgtggacttcgccaaatctgcccgtaaggatttggttttgagtgacggaaaccgtgttagcgcctttagcgtagcgtccaccgcaattgccgcagcccagtggagcagcacccagagtcagtccggtgagggaggttccgtcgattactcatatctccaacccggacaggatgggtatgcccagtatgctcaatactcccaagattatcagcaattctaccagcagcaggccggtggtctagagagtgatgcctcttcagcctccgggaccgccgtaaccacgacctcagctgcagtcgtgagccagagcccccagctctacaatcaaacctccaatccgcctgggtcccctacggaggaggcacagccttcaacctctacctctacgcaggctccggcagcttccccaaccggggtggtccccggaactaagtacgcagtcccagatacaagcacataccaatatgacgaatcatctggctactactatgacccaactactggtctgtattatgaccccaattcccagtattattacaattcactcacccaacagtacctctattgggacggggagaaggagacttacgtgcccgctgctgaaagttcctcccaccagcagtccggacttcctccagccaaggaggggaaagaaaagaaagagaagccaaaatctaagacagctcagcagatcgccaaggacatggaaaggtgggcgaaaagcctgaataaacagaaagagaacttcaagaatagcttccagccagtgaattctctgcgggaggaagagcggagagaaagtgctgctgcagatgccggtttcgccttgtttgagaaaaagggagcactcgccgaacggcagcagcttattccggagctcgtgaggaatggcgatgaggagaacccactcaaacgagggttggtcgcggcttattctggggatagtgataatgaggaggaactggtcgagcgactggaatcagaagaggagaaactcgccgattggaagaaaatggcttgcttgctctgccgtaggcagttcccaaataaggacgctctggtgaggcaccaacagttgtctgacttacacaaacagaacatggacatctatcggaggtctagactttccgagcaggagcttgaggccctcgagctgagggagcgtgaaatgaagtatagggaccgcgcagctgagagaagagagaagtacgggatccccgaaccgcctgagcccaagagaaagaagcagttcgacgccggaactgtgaactacgaacagcccactaaagatggtatcgaccatagcaacattggtaataagatgctgcaggccatggggtggagagaaggctcaggactgggacggaaatgtcagggcattacagccccaatcgaggcccaggtgcggttgaagggcgcagggcttggtgcaaagggatccgcctatggactctctggagcagacagctataaggacgccgtgagaaaggccatgttcgcacggttcaccgagatggaatag

SEQ ID NO: 159211 - DNA, 2445 bp, Artificial Sequence
  derived and/or modified sequence
ggtactaaatgcagagtcagtagaacggaacgctccggtcgatatgggtcaatcatagaccgtgatgatcgagatgagcgggaatccaggagtagaagaagagactccgattacaagagatcgagcgatgacaggaggggtgatcggtatgatgactaccgggactacgatagccctgagagggagcgggagagacgcaactccgatcggagcgaggatggatatcactccgatggagattatggtgagcacgactaccgtcatgacatctctgatgagagagagagcaagacaatcatgctgcgcggtctgcctatcacaatcactgagtccgatatccgcgagatgatggagagctttgaaggtcctcagcccgctgacgtccgtctcatgaagcggaaaacaggagtgtcacggggattcgcgttcgtagaattttaccatctacaagatgctactagttggatggaggcaaaccagaaaaaattggtgatccaagggaagcatatcgccatgcattactccaatccacgacctaagttcgaggactggctgtgtaacaaatgctgtctgaacaacttccggaagcggctcaaatgtttccggtgcggagccgataaattcgactcggagcaggaagtgcctccaggcactacagagagcgtgcaaagcgttgattattattgtgatacgatcatactgcgtaatatcgcccctcacaccgtcgtcgattctatcatgaccgctctcagtccctatgcttcgcttgctgtcaacaacattcgactcatcaaggacaagcagacacagcagaataggggatttgcctttgtacaactgtcaagcgccatggatgcaagccaattattacaaatccttcagagcctccatccgcctctgaagatcgatggaaagacaatcggggtggatttcgctaagtcagctcgtaaagacttggttttgtcagacggcaatcgggtgtcggccttcagcgttgccagtaccgctattgccgcagctcagtggtcctctactcagtcacaaagtggggagggaggatcggtcgactattcatatttgcagccgggtcaagatggctacgcacaatacgcccaatactcacaggattaccaacagttctaccagcagcaagcaggcggtctcgagtcagacgcctcatctgccagtggaacagccgtcacaactacctcagccgcagtggtgtcacagagtcctcagttatacaaccagaccagtaacccaccagggtctccaacagaagaggcccagccctccacgagtacgtctacacaagccccagccgcatccccaactggcgttgtcccgggaacaaagtatgcggtgcccgataccagcacataccaatacgacgaaagtagcggatactactatgatccgacaaccggactgtactatgatccaaatagtcagtactactacaacagtctcacgcagcaatacctgtattgggatggagagaaggaaacatatgtgccggctgcagagtcaagtagtcaccagcagagcggtctgccccctgccaaggaaggtaaggagaagaaggagaaaccgaagtccaagacagcacagcagatcgctaaagatatggagcggtgggcgaaaagcctgaacaaacagaaggaaaactttaagaacagttttcagccagtcaactctctgagagaggaggaaagacgcgaatctgccgcagccgacgcaggctttgcacttttcgaaaaaaaaggcgctttggcagagcgccaacaactcattcccgaactggtgaggaacggcgacgaggaaaatccactgaagaggggcctggtggccgcatactccggggacagtgataatgaggaagagctcgtggagaggctggagtccgaggaagagaagctcgccgactggaaaaaaatggcctgcttgctatgcagaaggcagtttcccaacaaggacgccttggtcagacatcagcagttgtccgacttgcacaaacagaacatggacatataccggaggagccgcctaagcgagcaggagctcgaggctctagaactcagggagcgggaaatgaaatacagggaccgagccgctgaacgaagagagaaatatggaatccctgaacctccagagcccaaaagaaaaaagcagtttgatgccggaacagtcaattatgagcaacctactaaagatggcattgatcactccaatattggcaataaaatgctacaggctatgggttggagggaaggatccggattggggagaaagtgccagggcatcaccgctccaattgaagcacaggtgcgcttgaaaggagctgggctgggagcgaagggttccgcatacggactctcgggtgcggattcctacaaagatgctgttcgcaaagccatgtttgcccgttttacagaaatggagtag

SEQ ID NO: 159212 - DNA, 2448 bp, Artificial Sequence
  derived and/or modified sequence
atgggcagcgacaagagagtgagcagaaccgagagaagcggcagatacggcagcatcatcgacagagacgacagagacgagagagagagcagaagcagaagaagagacagcgactacaagagaagcagcgacgacagaagaggcgacagatacgacgactacagagactacgacagccccgagagagagagagagagaagaaacagcgacagaagcgaggacggctaccacagcgacggcgactacggcgagcacgactacagacacgacatcagcgacgagagagagagcaagaccatcatgctgagaggcctgcccatcaccatcaccgagagcgacatcagagagatgatggagagcttcgagggcccccagcccgccgacgtgagactgatgaagagaaagaccggcgtgagcagaggcttcgccttcgtggagttctaccacctgcaggacgccaccagctggatggaggccaaccagaagaagctggtgatccagggcaagcacatcgccatgcactacagcaaccccagacccaagttcgaggactggctgtgcaacaagtgctgcctgaacaacttcagaaagagactgaagtgcttcagatgcggcgccgacaagttcgacagcgagcaggaggtgccccccggcaccaccgagagcgtgcagagcgtggactactactgcgacaccatcatcctgagaaacatcgccccccacaccgtggtggacagcatcatgaccgccctgagcccctacgccagcctggccgtgaacaacatcagactgatcaaggacaagcagacccagcagaacagaggcttcgccttcgtgcagctgagcagcgccatggacgccagccagctgctgcagatcctgcagagcctgcacccccccctgaagatcgacggcaagaccatcggcgtggacttcgccaagagcgccagaaaggacctggtgctgagcgacggcaacagagtgagcgccttcagcgtggccagcaccgccatcgccgccgcccagtggagcagcacccagagccagagcggcgagggcggcagcgtggactacagctacctgcagcccggccaggacggctacgcccagtacgcccagtacagccaggactaccagcagttctaccagcagcaggccggcggcctggagagcgacgccagcagcgccagcggcaccgccgtgaccaccaccagcgccgccgtggtgagccagagcccccagctgtacaaccagaccagcaacccccccggcagccccaccgaggaggcccagcccagcaccagcaccagcacccaggcccccgccgccagccccaccggcgtggtgcccggcaccaagtacgccgtgcccgacaccagcacctaccagtacgacgagagcagcggctactactacgaccccaccaccggcctgtactacgaccccaacagccagtactactacaacagcctgacccagcagtacctgtactgggacggcgagaaggagacctacgtgcccgccgccgagagcagcagccaccagcagagcggcctgccccccgccaaggagggcaaggagaagaaggagaagcccaagagcaagaccgcccagcagatcgccaaggacatggagagatgggccaagagcctgaacaagcagaaggagaacttcaagaacagcttccagcccgtgaacagcctgagagaggaggagagaagagagagcgccgccgccgacgccggcttcgccctgttcgagaagaagggcgccctggccgagagacagcagctgatccccgagctggtgagaaacggcgacgaggagaaccccctgaagagaggcctggtggccgcctacagcggcgacagcgacaacgaggaggagctggtggagagactggagagcgaggaggagaagctggccgactggaagaagatggcctgcctgctgtgcagaagacagttccccaacaaggacgccctggtgagacaccagcagctgagcgacctgcacaagcagaacatggacatctacagaagaagcagactgagcgagcaggagctggaggccctggagctgagagagagagagatgaagtacagagacagagccgccgagagaagagagaagtacggcatccccgagccccccgagcccaagagaaagaagcagttcgacgccggcaccgtgaactacgagcagcccaccaaggacggcatcgaccacagcaacatcggcaacaagatgctgcaggccatgggctggagagagggcagcggcctgggcagaaagtgccagggcatcaccgcccccatcgaggcccaggtgagactgaagggcgccggcctgggcgccaagggcagcgcctacggcctgagcggcgccgacagctacaaggacgccgtgagaaaggccatgttcgccagattcaccgagatggagtag

SEQ ID NO: 159213 - DNA, 2445 bp, Artificial Sequence
  derived and/or modified sequence
ggcaccaagtgcagagtgagcagaaccgagagaagcggcagatacggcagcatcatcgacagagacgacagagacgagagagagagcagaagcagaagaagagacagcgactacaagagaagcagcgacgacagaagaggcgacagatacgacgactacagagactacgacagccccgagagagagagagagagaagaaacagcgacagaagcgaggacggctaccacagcgacggcgactacggcgagcacgactacagacacgacatcagcgacgagagagagagcaagaccatcatgctgagaggcctgcccatcaccatcaccgagagcgacatcagagagatgatggagagcttcgagggcccccagcccgccgacgtgagactgatgaagagaaagaccggcgtgagcagaggcttcgccttcgtggagttctaccacctgcaggacgccaccagctggatggaggccaaccagaagaagctggtgatccagggcaagcacatcgccatgcactacagcaaccccagacccaagttcgaggactggctgtgcaacaagtgctgcctgaacaacttcagaaagagactgaagtgcttcagatgcggcgccgacaagttcgacagcgagcaggaggtgccccccggcaccaccgagagcgtgcagagcgtggactactactgcgacaccatcatcctgagaaacatcgccccccacaccgtggtggacagcatcatgaccgccctgagcccctacgccagcctggccgtgaacaacatcagactgatcaaggacaagcagacccagcagaacagaggcttcgccttcgtgcagctgagcagcgccatggacgccagccagctgctgcagatcctgcagagcctgcacccccccctgaagatcgacggcaagaccatcggcgtggacttcgccaagagcgccagaaaggacctggtgctgagcgacggcaacagagtgagcgccttcagcgtggccagcaccgccatcgccgccgcccagtggagcagcacccagagccagagcggcgagggcggcagcgtggactacagctacctgcagcccggccaggacggctacgcccagtacgcccagtacagccaggactaccagcagttctaccagcagcaggccggcggcctggagagcgacgccagcagcgccagcggcaccgccgtgaccaccaccagcgccgccgtggtgagccagagcccccagctgtacaaccagaccagcaacccccccggcagccccaccgaggaggcccagcccagcaccagcaccagcacccaggcccccgccgccagccccaccggcgtggtgcccggcaccaagtacgccgtgcccgacaccagcacctaccagtacgacgagagcagcggctactactacgaccccaccaccggcctgtactacgaccccaacagccagtactactacaacagcctgacccagcagtacctgtactgggacggcgagaaggagacctacgtgcccgccgccgagagcagcagccaccagcagagcggcctgccccccgccaaggagggcaaggagaagaaggagaagcccaagagcaagaccgcccagcagatcgccaaggacatggagagatgggccaagagcctgaacaagcagaaggagaacttcaagaacagcttccagcccgtgaacagcctgagagaggaggagagaagagagagcgccgccgccgacgccggcttcgccctgttcgagaagaagggcgccctggccgagagacagcagctgatccccgagctggtgagaaacggcgacgaggagaaccccctgaagagaggcctggtggccgcctacagcggcgacagcgacaacgaggaggagctggtggagagactggagagcgaggaggagaagctggccgactggaagaagatggcctgcctgctgtgcagaagacagttccccaacaaggacgccctggtgagacaccagcagctgagcgacctgcacaagcagaacatggacatctacagaagaagcagactgagcgagcaggagctggaggccctggagctgagagagagagagatgaagtacagagacagagccgccgagagaagagagaagtacggcatccccgagccccccgagcccaagagaaagaagcagttcgacgccggcaccgtgaactacgagcagcccaccaaggacggcatcgaccacagcaacatcggcaacaagatgctgcaggccatgggctggagagagggcagcggcctgggcagaaagtgccagggcatcaccgcccccatcgaggcccaggtgagactgaagggcgccggcctgggcgccaagggcagcgcctacggcctgagcggcgccgacagctacaaggacgccgtgagaaaggccatgttcgccagattcaccgagatggagtag

SEQ ID NO: 159214 - protein, 228 aa, Artificial Sequence
  derived and/or modified sequence
MCHVIVTCRSMLWTLLSIVVAFAELIAFMSADWLIGKARSRGGVEPAGPGGGSPEPYHPTLGIYARCIRNPGVQHFQRDTLCGPYAESFGEIASGFWQATAIFLAVGIFILCMVALVSVFTMCVQSIMKKSIFNVCGLLQGIAGLFLILGLILYPAGWGCQKAIDYCGHYASAYKPGDCSLGWAFYTAIGGTVLTFICAVFSAQAEIATSSDKVQEEIEEGKNLICLL

SEQ ID NO: 159215 - DNA, 687 bp, Artificial Sequence
  derived and/or modified sequence
atgtgccatgtcattgtaacatgcagatcgatgctttggaccctcttgtcaatcgtggtagcctttgccgaattgattgcttttatgtcagcagactggctaattggcaaagccaggtcccgcggcggcgtggagcccgctgggccgggaggtggctcaccagagccttaccaccccacactgggcatctacgcgaggtgtatccgcaatcctggtgtgcagcattttcaacgtgacaccctgtgcggcccctatgcagagagtttcggagagatagcttctggtttctggcaggcaaccgccatatttctggccgtgggcatcttcattctgtgcatggtcgccttggtgagcgtgttcacaatgtgcgttcagagtatcatgaagaaatccatctttaatgtctgcggtttgttgcaaggaattgccggtttatttctgattcttggccttattttatatccggccggctgggggtgccagaaggccatcgactactgcgggcattacgcaagtgcctataaacctggcgactgctccctcggctgggcattttatactgctattgggggcaccgtgctgacgtttatctgcgctgtgttctctgcccaggccgagatcgcgaccagcagcgacaaggtgcaagaggagattgaagagggtaaaaatctcatctgcctgctgtag

SEQ ID NO: 159216 - DNA, 687 bp, Artificial Sequence
  derived and/or modified sequence
atgtgccacgtgattgtcacatgtagatctatgctttggaccctgctgtccatagtggtcgcttttgcggagcttattgcattcatgtctgccgattggttgattggcaaagccagatcacgagggggggtggaacccgcaggccccggtggtggttctccagagccctaccatcctaccctggggatttatgcccgttgtattcgaaacccaggcgtacaacacttccagagggataccctgtgtggtccttatgcagaatccttcggagagatcgcttccgggttctggcaggccaccgcgatatttttggccgtcgggatatttattctttgcatggtcgccctggtgagtgtcttcaccatgtgtgttcagagcataatgaaaaaaagtatctttaacgtatgcggtttgcttcagggcatagctgggttgtttttaatcctgggactgatcctgtacccagctggctggggctgccagaaggcgatcgattactgtggccactacgcgagcgcatacaagccaggagattgcagtctggggtgggcgttttatacggctataggcggcacggtgctgacgtttatatgtgcagtcttcagcgcccaggccgagatagcaacgagttctgacaaagtccaggaggaaatcgaggagggtaagaatttgatctgcctcttgtag

SEQ ID NO: 159217 - DNA, 687 bp, Artificial Sequence
  derived and/or modified sequence
atgtgccacgtgattgtgacctgccgctccatgctgtggaccctgctgagcatcgtggtggcctttgctgagctgattgccttcatgtctgctgactggctgattggcaaggcccggagccggggcggcgtggagcctgctggccctgggggcggcagccctgagccctaccaccccaccctgggcatctatgcccgctgcatcagaaatcctggggtgcagcacttccagagggacaccctgtgtggcccctatgcagagagctttggagagatcgccagcggcttctggcaggccacagccatcttcctggccgtgggcatcttcatcctgtgcatggtggccctggtgtctgtgttcaccatgtgtgtgcagagcatcatgaagaagagcatcttcaacgtgtgtggcctgctgcagggcattgctggcctcttcctgatcctgggcctcatcctgtacccagctggctggggctgccagaaggccatcgactactgcggccactacgccagcgcctacaagccaggggactgcagcctgggctgggccttctacacagccatcggcggcaccgtgctgaccttcatctgtgctgtgttcagcgcccaggccgagatcgccaccagcagtgacaaggtgcaggaggagattgaggagggcaagaacctgatctgcctgctgtag

SEQ ID NO: 159218 - DNA, 5043 bp, Artificial Sequence
  derived and/or modified sequence
gggcagggcggctcggccgcctctttctctcgctgcccccgcccctcctcctcctccctctccccgagtgctagcccgggcggccgccgagcttggcgctctctcgcctcgctgcctcctcccccgcgccgcggaccctctcccctcccttgcgttgcccccctctcccgccgcctcctcccgctctcctctcgctctcctcccgcctccttcttccaggcgcggccagcgggggcaagagcgaggtggctgcgaggaggcgtcactgaaagccctgacttggggaaggctgcgggctcggagccggagacgccgagctggggccgggtgagttgggaatcagactcttgagttgacagctggcctatggtttctgcattttgttaagaagcacctcatgcaagcgagggacctgggactgctcacagccaggtggcatttttctgaagttgttcattaagacttcccagcattcctacagatataaataggtgaggccgcaggcggtgctctgggtccgggagcgctgtccccagcatgaacgcggccggcggcgggagtgaatgactgcagctgcgacttccttcccgggccgcccgagcctccttccccaccgactttcttgttttgattaactccgtggactcctgactctttcttcgcccggaacatcaatatgtgtcatgtcattgtcacctgtcgctcgatgctctggaccttgctgagtattgtggtggcttttgccgagctcattgccttcatgagtgcagactggctgatcgggaaagcgaggagccgcggcggcgtggagccggcgggcccgggcgggggctccccggagccctaccaccccaccctgggcatctacgcccgctgcatccggaacccaggggtgcagcacttccagcgggacacgctgtgcgggccctacgccgagagcttcggcgagatcgccagcggcttctggcaggccacagctattttcctggctgtgggaatctttattctctgcatggtggccttggtgtccgtcttcaccatgtgtgtacagagcatcatgaagaaaagcatcttcaatgtctgtgggctgttgcaaggaattgcaggtctattccttatcctcggtttgatactctaccctgctggctggggttgccagaaggccatagactactgtggacattatgcatctgcctacaaacctggagactgctccttgggctgggccttttataccgccattgggggcacagtcctcactttcatctgtgctgtcttctctgcacaagcagaaattgcaacctctagtgacaaagtacaggaagaaattgaagaggggaaaaatctgatctgcctcctttagtttggaagagacaatgccattttctcccttgagtaatcttgtgaaacagtccacagtttcatcatttgagtcaagtggagaactaacctttacctaccaaagccacgttccacggcccgaggcttaaacaggaccaatgagaggccacatccagctacgcaaagttactggacatgcggtctgcagtgcacattataaggaatggaacatgaaaatagtatataatcctagacctggagttgccaagttctgtcagactccatctcccccaggttcaatgaaggataataatctaaatcattagggcagcagtttctctggtaacggaagagaccgtccgccagatctgcaggctgtttctgctccaacactgcttgcttgtgagcatctctgcctcagaatggggttttgggttggagttcttgttttcctctgttctttcaagttgtctccaacgaacagaaaactataaacttactggggacaggatgtgtgctaaagggcacagcaagacactgtcttttgcttagctgaccaaaggggtcagcagggatggcgtggagtcatgctgtggaacttattctaggctgaatcctagggtaaggtggatcaactgaactgtcactccagagattttagaaatttgagtaaagaaacaataaggacctatacaatcatatgagaacaaaaatatgaaatcttgctagtgaagacgtattttttcttcttcccagcagccaggctagcaccagttctggcccagtctcctcttcttctggagatcacatgtttttcttctaaggttaggattgtgctttgactgcgaaaggaaacctcactgtttcctccttccagggactgaggtctccaagctagctgtggcttatgcagatgttcactgggaggacctgccagaatctcggcacttggggggagacctttactcccagtttggtgaccatgctgtagtcagctctatttccaatcccgacagtagcagaatggcattctacaacaaaaagaagctagttatgggagttaagtttttgtagttactggtgttgatcctgaaagcagactgagataacattaaattgctgcaactgaagaactgcagccaagaccttaattccaggaaagcacagaggacaaagttaattcaaaaagaggcgctagatcaaggtcacagcactgcctacacctgtttacaaaaagaatcaaataccactatgaataaggattcaggggtttttaatctactttccataaattaccaatatcactgattcaggaagatagtatctcagaatgaccagagcagcacagaaacaagctactctgacattatgggagcttcaaaattgtatcatgatacagaaacactccttagcactttaagaaagtgagatggaactgccagatttctggaaggagaaaaagtgtaggtatttgggttcattaatctgctcacttgaggactttgttttgaaaaagtaccttctgtggacaaggtattgtgctaccagctatacaaccctgacttcagagtttgcaaccttgccctgagtgaatcatgttaaagctgtctgagtctaaagcaccgtatcttggtgcagaacagataattatacagagatggaatgggacaaccgcagttttactacattctggtgtttggcctatatgagaaaccatcttctcacagattaagggctaagggcaaaaggggtgggaggtgtggaactagccttaatgagtttcccattcctgaaccaaaattcaaagtgagtgagatgtaaatcctgtgattttggtgaagaaaaaaacgggtatcttcatagcagcctaggaaaccttaaccatatctctaacaccacacagaaagaggctggaggagccactggacaaagcttctgtctctgtgtgtacatttataatgttctaaccaagtctcaaaccttgatgaaaaacacaaaatttttccataaacttatcagaagactcacttttctttctttcttggatagagaaaccattttctgacactaggtttacaatctcagtgtccttacaagttaagtcctaagctcacaggatcctccgagcatgtccatcacctgctctttggctaaggtggcagtgtacctctagatcaacctgggaacagtcacaagggagtgtgacttcttggccataataaactcactcgatagtgtttatgttattaatctgaatgcaacagaagacaaaagcacaggcatgcacacacacagaaccccaaaccactaaaaactacctaaacactgacttagtaaatagtaaaaaggtaatgttgggacttttaaaccttgaatccattagccaggcttgggatgaaaggaccatctaaaatcatgctagtctaaaccatgctcttccacacagctgtttaaaaaccactgggtatgaggaatatgctagaaagaaatgttaaaaatagattgttggctcacacttatttttctaataaataggaccattattactaccaggaaagtcttatttattttgcctgaaattggcttaaagaaagtctcatgacgggatgggatgggctgcgcttctcaatgaactctgaggcagaaatatttgccttggattctgtggattctttaaacctgtgtgctaataattcaaacaatgttgcattaattgtataagggtttttgtatagttttcaaacatctgtggtgtaatgatctttgttaaacatatattctgtaaagtgccatagtctttttttatgtgtagcatatttaaaaatatatatgtatattatacatacacaagtttgtgtgaaagatgtgcaataacaaaggtgtatgtatgttttgttgttttgttttggaaactggacaggagtcaaaacagggatgtttgtttctgttttggcaaggagagttccacatttttgccttcatggcttattcagtaacccataattttaatgctacacaaatcttatgtgaagaaaagactggtatgaaatcattttttcctgggtctaaaataatcgctagtgttatgtcaaagttaagcccgcacgccaggcccagttaatgctagtctttcatgtgaaatgtgaagctgccatgttgccttttctcttagtaggataactagtagctggtacataatcactgaggagctatttcttaacatgcttttatagaccatgctaatgctagaccagtatttaagggctaatctcacacctccttagctgtaagagtctggcttagaacagacctctctgtgcaataacttgtggccactggaaatccctgggccggcatttgtattggggttgcaatgactcccaagggccaaaagagttaaaggcacgactgggatttcttctgagactgtggtgaaactccttccaaggctgagggggtcagtaggtgctctggagggactcggcaccacttgatattcaacagccacttgagccaaatataaaattgtatttacagctgatggactcaatttgagccttcaaacttgtagttatcctattatattgtaaactaatacattgtctagcattgatttggttcctgtgcatatgtattttcactatgtgctcccctccccagatcttaattaaaccagattttgcaattcattcttattctttc

SEQ ID NO: 159219 - DNA, 4664 bp, Artificial Sequence
  derived and/or modified sequence
acacgtgaaggaagcctttgtgggccttcctgcgcagctgactagctgaaagccatcgtgagccagcccaggagaaaccagcagaggaacagccagccgaaccctgggattgtgagaaataatcaggtgaggccgcaggcggtgctctgggtccgggagcgctgtccccagcatgaacgcggccggcggcgggagtgaatgactgcagctgcgacttccttcccgggccgcccgagcctccttccccaccgactttcttgttttgattaactccgtggactcctgactctttcttcgcccggaacatcaatatgtgtcatgtcattgtcacctgtcgctcgatgctctggaccttgctgagtattgtggtggcttttgccgagctcattgccttcatgagtgcagactggctgatcgggaaagcgaggagccgcggcggcgtggagccggcgggcccgggcgggggctccccggagccctaccaccccaccctgggcatctacgcccgctgcatccggaacccaggggtgcagcacttccagcgggacacgctgtgcgggccctacgccgagagcttcggcgagatcgccagcggcttctggcaggccacagctattttcctggctgtgggaatctttattctctgcatggtggccttggtgtccgtcttcaccatgtgtgtacagagcatcatgaagaaaagcatcttcaatgtctgtgggctgttgcaaggaattgcaggtctattccttatcctcggtttgatactctaccctgctggctggggttgccagaaggccatagactactgtggacattatgcatctgcctacaaacctggagactgctccttgggctgggccttttataccgccattgggggcacagtcctcactttcatctgtgctgtcttctctgcacaagcagaaattgcaacctctagtgacaaagtacaggaagaaattgaagaggggaaaaatctgatctgcctcctttagtttggaagagacaatgccattttctcccttgagtaatcttgtgaaacagtccacagtttcatcatttgagtcaagtggagaactaacctttacctaccaaagccacgttccacggcccgaggcttaaacaggaccaatgagaggccacatccagctacgcaaagttactggacatgcggtctgcagtgcacattataaggaatggaacatgaaaatagtatataatcctagacctggagttgccaagttctgtcagactccatctcccccaggttcaatgaaggataataatctaaatcattagggcagcagtttctctggtaacggaagagaccgtccgccagatctgcaggctgtttctgctccaacactgcttgcttgtgagcatctctgcctcagaatggggttttgggttggagttcttgttttcctctgttctttcaagttgtctccaacgaacagaaaactataaacttactggggacaggatgtgtgctaaagggcacagcaagacactgtcttttgcttagctgaccaaaggggtcagcagggatggcgtggagtcatgctgtggaacttattctaggctgaatcctagggtaaggtggatcaactgaactgtcactccagagattttagaaatttgagtaaagaaacaataaggacctatacaatcatatgagaacaaaaatatgaaatcttgctagtgaagacgtattttttcttcttcccagcagccaggctagcaccagttctggcccagtctcctcttcttctggagatcacatgtttttcttctaaggttaggattgtgctttgactgcgaaaggaaacctcactgtttcctccttccagggactgaggtctccaagctagctgtggcttatgcagatgttcactgggaggacctgccagaatctcggcacttggggggagacctttactcccagtttggtgaccatgctgtagtcagctctatttccaatcccgacagtagcagaatggcattctacaacaaaaagaagctagttatgggagttaagtttttgtagttactggtgttgatcctgaaagcagactgagataacattaaattgctgcaactgaagaactgcagccaagaccttaattccaggaaagcacagaggacaaagttaattcaaaaagaggcgctagatcaaggtcacagcactgcctacacctgtttacaaaaagaatcaaataccactatgaataaggattcaggggtttttaatctactttccataaattaccaatatcactgattcaggaagatagtatctcagaatgaccagagcagcacagaaacaagctactctgacattatgggagcttcaaaattgtatcatgatacagaaacactccttagcactttaagaaagtgagatggaactgccagatttctggaaggagaaaaagtgtaggtatttgggttcattaatctgctcacttgaggactttgttttgaaaaagtaccttctgtggacaaggtattgtgctaccagctatacaaccctgacttcagagtttgcaaccttgccctgagtgaatcatgttaaagctgtctgagtctaaagcaccgtatcttggtgcagaacagataattatacagagatggaatgggacaaccgcagttttactacattctggtgtttggcctatatgagaaaccatcttctcacagattaagggctaagggcaaaaggggtgggaggtgtggaactagccttaatgagtttcccattcctgaaccaaaattcaaagtgagtgagatgtaaatcctgtgattttggtgaagaaaaaaacgggtatcttcatagcagcctaggaaaccttaaccatatctctaacaccacacagaaagaggctggaggagccactggacaaagcttctgtctctgtgtgtacatttataatgttctaaccaagtctcaaaccttgatgaaaaacacaaaatttttccataaacttatcagaagactcacttttctttctttcttggatagagaaaccattttctgacactaggtttacaatctcagtgtccttacaagttaagtcctaagctcacaggatcctccgagcatgtccatcacctgctctttggctaaggtggcagtgtacctctagatcaacctgggaacagtcacaagggagtgtgacttcttggccataataaactcactcgatagtgtttatgttattaatctgaatgcaacagaagacaaaagcacaggcatgcacacacacagaaccccaaaccactaaaaactacctaaacactgacttagtaaatagtaaaaaggtaatgttgggacttttaaaccttgaatccattagccaggcttgggatgaaaggaccatctaaaatcatgctagtctaaaccatgctcttccacacagctgtttaaaaaccactgggtatgaggaatatgctagaaagaaatgttaaaaatagattgttggctcacacttatttttctaataaataggaccattattactaccaggaaagtcttatttattttgcctgaaattggcttaaagaaagtctcatgacgggatgggatgggctgcgcttctcaatgaactctgaggcagaaatatttgccttggattctgtggattctttaaacctgtgtgctaataattcaaacaatgttgcattaattgtataagggtttttgtatagttttcaaacatctgtggtgtaatgatctttgttaaacatatattctgtaaagtgccatagtctttttttatgtgtagcatatttaaaaatatatatgtatattatacatacacaagtttgtgtgaaagatgtgcaataacaaaggtgtatgtatgttttgttgttttgttttggaaactggacaggagtcaaaacagggatgtttgtttctgttttggcaaggagagttccacatttttgccttcatggcttattcagtaacccataattttaatgctacacaaatcttatgtgaagaaaagactggtatgaaatcattttttcctgggtctaaaataatcgctagtgttatgtcaaagttaagcccgcacgccaggcccagttaatgctagtctttcatgtgaaatgtgaagctgccatgttgccttttctcttagtaggataactagtagctggtacataatcactgaggagctatttcttaacatgcttttatagaccatgctaatgctagaccagtatttaagggctaatctcacacctccttagctgtaagagtctggcttagaacagacctctctgtgcaataacttgtggccactggaaatccctgggccggcatttgtattggggttgcaatgactcccaagggccaaaagagttaaaggcacgactgggatttcttctgagactgtggtgaaactccttccaaggctgagggggtcagtaggtgctctggagggactcggcaccacttgatattcaacagccacttgagccaaatataaaattgtatttacagctgatggactcaatttgagccttcaaacttgtagttatcctattatattgtaaactaatacattgtctagcattgatttggttcctgtgcatatgtattttcactatgtgctcccctccccagatcttaattaaaccagattttgcaattc

SEQ ID NO: 159220 - DNA, 687 bp, Artificial Sequence
  derived and/or modified sequence
atgtgccacgtgatcgtgacctgccggagcatgctgtggaccctgctatccatcgtcgtggcgtttgccgagctgatcgcattcatgagcgcagattggctcatcggcaaggcccgttcaagggggggcgtggagcccgcaggcccgggcggcggttcccccgagccttaccatcctacacttggcatttatgctcggtgtataagaaacccaggggtccaacacttccagcgtgacaccctgtgcggtccttacgcggagtcctttggagagattgcgagcggcttttggcaggccaccgcaatattcctggccgtgggtatctttattctatgtatggtggccttggtaagtgtgtttactatgtgcgtccagtctattatgaaaaaatctatcttcaacgtctgcgggcttctccaggggatcgcaggtcttttcctgatcctcggattaattctctaccctgctgggtggggctgtcagaaggccatagactactgtggtcattatgcttcagcgtacaaacccggggattgttctcttgggtgggccttctataccgcaatagggggaacagtgttgacattcatctgtgccgtcttctccgcacaggcggagatcgccacatcctccgacaaagtgcaggaggagattgaggagggcaagaacttaatatgtctcttatag

SEQ ID NO: 159221 - DNA, 687 bp, Artificial Sequence
  derived and/or modified sequence
atgtgccacgtgatcgtgacctgccggagcatgctgtggaccctgctctctatcgtcgtggcttttgccgagctgatagcttttatgtctgcggattggctgattgggaaggcccgatcaaggggaggggtcgagcccgcaggacccggaggtggcagccccgaaccgtatcaccctactctggggatctacgctcgctgcattcgaaatcctggggtccaacactttcaacgggatactctttgtgggccctacgctgaatcttttggggagattgcatcaggattctggcaagctacagcgattttcttggctgtgggcatctttatcttgtgtatggttgctctggtgagtgtgtttacgatgtgcgtgcaaagcattatgaaaaagtccatttttaacgtctgcggtctgctgcagggcattgcgggcctgttcctgatcctgggccttattctctaccctgcgggatgggggtgtcagaaagcgatcgactattgtgggcactatgcgtccgcctacaagcctggcgactgttcgttagggtgggcattttacactgctatcggggggaccgttctcacattcatatgcgccgtcttctctgcccaggcagagatcgcgacctcgagcgacaaagtacaggaggaaatcgaggagggtaagaacctgatttgcttactgtag

SEQ ID NO: 159222 - DNA, 687 bp, Artificial Sequence
  derived and/or modified sequence
atgtgtcacgtcattgtaacttgcagaagtatgctgtggaccctgcttagtatagttgtcgcttttgcagagctcatcgcatttatgagcgctgattggctcatcggaaaggccagatcccgcggtggggtggaaccggctgggcctgggggtgggtctcccgagccgtaccacccaacccttggaatttacgcacggtgtatacgtaaccccggtgttcagcacttccagagggacaccttgtgcggaccatacgccgaaagcttcggcgagatcgccagtggcttttggcaggccacggctatttttctggcggtgggcattttcattctgtgcatggttgccttggtgtctgtgttcacaatgtgcgtgcaatctatcatgaaaaagtccatattcaatgtttgcggcctcctgcagggaatcgccggtctctttctaatcttgggtctgattctgtaccctgccggttggggctgtcaaaaggcgatcgactactgtgggcattatgcctcagcttacaaacctggcgattgttccctaggttgggcgttttacactgcaatcggcggaactgtgctaacatttatctgtgccgtgttctctgctcaggccgaaatcgcaacgtccagtgacaaggtgcaagaggaaattgaagaagggaagaacctgatatgcctactgtag

SEQ ID NO: 159223 - DNA, 687 bp, Artificial Sequence
  derived and/or modified sequence
atgtgccacgttatcgtgacgtgcaggtctatgttgtggaccttgctcagcatagtggtggcctttgccgagcttatcgccttcatgtccgcagattggctcatcggaaaggctagaagccggggtggggtcgagccagcaggaccgggaggtggctctcctgagccttaccatcccacattagggatttacgcgaggtgcatacgaaaccctggagtgcagcacttccagcgggatacgttatgtggcccttacgccgagagttttggagaaattgcttccggattctggcaagccacagccatctttttagcggtgggcatctttatcctgtgcatggttgccctggtgagcgtatttacaatgtgcgttcagagcatcatgaagaagagcatcttcaatgtgtgtggcttacttcaagggattgcaggactgttcctcatacttggtcttatcctttaccctgcaggatggggctgccaaaaagccatcgattattgtgggcactatgcctccgcctacaagcccggagactgcagtctgggttgggccttttacaccgccattgggggaaccgtgctgaccttcatctgcgccgtgttctccgcgcaggctgaaatcgctacgagttctgacaaggtgcaagaggaaatcgaagagggaaaaaatctgatatgtctgctttag

SEQ ID NO: 159224 - DNA, 687 bp, Artificial Sequence
  derived and/or modified sequence
atgtgccacgtgatcgtgacctgcagaagcatgctgtggaccctgctgagcatcgtggtggccttcgccgagctgatcgccttcatgagcgccgactggctgatcggcaaggccagaagcagaggcggcgtggagcccgccggccccggcggcggcagccccgagccctaccaccccaccctgggcatctacgccagatgcatcagaaaccccggcgtgcagcacttccagagagacaccctgtgcggcccctacgccgagagcttcggcgagatcgccagcggcttctggcaggccaccgccatcttcctggccgtgggcatcttcatcctgtgcatggtggccctggtgagcgtgttcaccatgtgcgtgcagagcatcatgaagaagagcatcttcaacgtgtgcggcctgctgcagggcatcgccggcctgttcctgatcctgggcctgatcctgtaccccgccggctggggctgccagaaggccatcgactactgcggccactacgccagcgcctacaagcccggcgactgcagcctgggctgggccttctacaccgccatcggcggcaccgtgctgaccttcatctgcgccgtgttcagcgcccaggccgagatcgccaccagcagcgacaaggtgcaggaggagatcgaggagggcaagaacctgatctgcctgctgtag

SEQ ID NO: 159225 - protein, 1038 aa, Artificial Sequence
  derived and/or modified sequence
MQPEEGTGWLLELLSEVQLQQYFLRLRDDLNVTRLSHFEYVKNEDLEKIGMGRPGQRRLWEAVKRRKALCKRKSWMSKVFSGKRLEAEFPPHHSQSTFRKTSPAPGGPAGEGPLQSLTCLIGEKDLRLLEKLGDGSFGVVRRGEWDAPSGKTVSVAVKCLKPDVLSQPEAMDDFIREVNAMHSLDHRNLIRLYGVVLTPPMKMVTELAPLGSLLDRLRKHQGHFLLGTLSRYAVQVAEGMGYLESKRFIHRDLAARNLLLATRDLVKIGDFGLMRALPQNDDHYVMQEHRKVPFAWCAPESLKTRTFSHASDTWMFGVTLWEMFTYGQEPWIGLNGSQILHKIDKEGERLPRPEDCPQDIYNVMVQCWAHKPEDRPTFVALRDFLLEAQPTDMRALQDFEEPDKLHIQMNDVITVIEGRAENYWWRGQNTRTLCVGPFPRNVVTSVAGLSAQDISQPLQNSFIHTGHGDSDPRHCWGFPDRIDELYLGNPMDPPDLLSVELSTSRPPQHLGGVKKPTYDPVSEDQDPLSSDFKRLGLRKPGLPRGLWLAKPSARVPGTKASRGSGAEVTLIDFGEEPVVPALRPCAPSLAQLAMDACSLLDETPPQSPTRALPRPLHPTPVVDWDARPLPPPPAYDDVAQDEDDFEICSINSTLVGAGVPAGPSQGQTNYAFVPEQARPPPPLEDNLFLPPQGGGKPPSSAQTAEIFQALQQECMRQLQAPAGSPAPSPSPGGDDKPQVPPRVPIPPRPTRPHVQLSPAPPGEEETSQWPGPASPPRVPPREPLSPQGSRTPSPLVPPGSSPLPPRLSSSPGKTMPTTQSFASDPKYATPQVIQAPGPRAGPCILPIVRDGKKVSSTHYYLLPERPSYLERYQRFLREAQSPEEPTPLPVPLLLPPPSTPAPAAPTATVRPMPQAALDPKANFSTNNSNPGARPPPPRATARLPQRGCPGDGPEAGRPADKIQMAMVHGVTTEECQAALQCHGWSVQRAAQYLKVEQLFGLGLRPRGECHKVLEMFDWNLEQAGCHLLGSWGPAHHKR

SEQ ID NO: 159226 - DNA, 3117 bp, Artificial Sequence
  derived and/or modified sequence
atgcagcccgaggagggcaccggctggctgctggagctgctgagcgaggtgcagctgcagcagtacttcctgagactgagagacgacctgaacgtgaccagactgagccacttcgagtacgtgaagaacgaggacctggagaagatcggcatgggcagacccggccagagaagactgtgggaggccgtgaagagaagaaaggccctgtgcaagagaaagagctggatgagcaaggtgttcagcggcaagagactggaggccgagttccccccccaccacagccagagcaccttcagaaagaccagccccgcccccggcggccccgccggcgagggccccctgcagagcctgacctgcctgatcggcgagaaggacctgagactgctggagaagctgggcgacggcagcttcggcgtggtgagaagaggcgagtgggacgcccccagcggcaagaccgtgagcgtggccgtgaagtgcctgaagcccgacgtgctgagccagcccgaggccatggacgacttcatcagagaggtgaacgccatgcacagcctggaccacagaaacctgatcagactgtacggcgtggtgctgaccccccccatgaagatggtgaccgagctggcccccctgggcagcctgctggacagactgagaaagcaccagggccacttcctgctgggcaccctgagcagatacgccgtgcaggtggccgagggcatgggctacctggagagcaagagattcatccacagagacctggccgccagaaacctgctgctggccaccagagacctggtgaagatcggcgacttcggcctgatgagagccctgccccagaacgacgaccactacgtgatgcaggagcacagaaaggtgcccttcgcctggtgcgcccccgagagcctgaagaccagaaccttcagccacgccagcgacacctggatgttcggcgtgaccctgtgggagatgttcacctacggccaggagccctggatcggcctgaacggcagccagatcctgcacaagatcgacaaggagggcgagagactgcccagacccgaggactgcccccaggacatctacaacgtgatggtgcagtgctgggcccacaagcccgaggacagacccaccttcgtggccctgagagacttcctgctggaggcccagcccaccgacatgagagccctgcaggacttcgaggagcccgacaagctgcacatccagatgaacgacgtgatcaccgtgatcgagggcagagccgagaactactggtggagaggccagaacaccagaaccctgtgcgtgggccccttccccagaaacgtggtgaccagcgtggccggcctgagcgcccaggacatcagccagcccctgcagaacagcttcatccacaccggccacggcgacagcgaccccagacactgctggggcttccccgacagaatcgacgagctgtacctgggcaaccccatggacccccccgacctgctgagcgtggagctgagcaccagcagacccccccagcacctgggcggcgtgaagaagcccacctacgaccccgtgagcgaggaccaggaccccctgagcagcgacttcaagagactgggcctgagaaagcccggcctgcccagaggcctgtggctggccaagcccagcgccagagtgcccggcaccaaggccagcagaggcagcggcgccgaggtgaccctgatcgacttcggcgaggagcccgtggtgcccgccctgagaccctgcgcccccagcctggcccagctggccatggacgcctgcagcctgctggacgagacccccccccagagccccaccagagccctgcccagacccctgcaccccacccccgtggtggactgggacgccagacccctgccccccccccccgcctacgacgacgtggcccaggacgaggacgacttcgagatctgcagcatcaacagcaccctggtgggcgccggcgtgcccgccggccccagccagggccagaccaactacgccttcgtgcccgagcaggccagaccccccccccccctggaggacaacctgttcctgcccccccagggcggcggcaagccccccagcagcgcccagaccgccgagatcttccaggccctgcagcaggagtgcatgagacagctgcaggcccccgccggcagccccgcccccagccccagccccggcggcgacgacaagccccaggtgccccccagagtgcccatcccccccagacccaccagaccccacgtgcagctgagccccgccccccccggcgaggaggagaccagccagtggcccggccccgccagcccccccagagtgccccccagagagcccctgagcccccagggcagcagaacccccagccccctggtgccccccggcagcagccccctgccccccagactgagcagcagccccggcaagaccatgcccaccacccagagcttcgccagcgaccccaagtacgccaccccccaggtgatccaggcccccggccccagagccggcccctgcatcctgcccatcgtgagagacggcaagaaggtgagcagcacccactactacctgctgcccgagagacccagctacctggagagataccagagattcctgagagaggcccagagccccgaggagcccacccccctgcccgtgcccctgctgctgcccccccccagcacccccgcccccgccgcccccaccgccaccgtgagacccatgccccaggccgccctggaccccaaggccaacttcagcaccaacaacagcaaccccggcgccagaccccccccccccagagccaccgccagactgccccagagaggctgccccggcgacggccccgaggccggcagacccgccgacaagatccagatggccatggtgcacggcgtgaccaccgaggagtgccaggccgccctgcagtgccacggctggagcgtgcagagagccgcccagtacctgaaggtggagcagctgttcggcctgggcctgagacccagaggcgagtgccacaaggtgctggagatgttcgactggaacctggagcaggccggctgccacctgctgggcagctggggccccgcccaccacaagagatag

SEQ ID NO: 159227 - DNA, 3117 bp, Artificial Sequence
  derived and/or modified sequence
atgcaacccgaggaggggacagggtggctgttagagctcctcagcgaagtgcaattacagcagtatttcctccggctgcgagacgatttaaacgtcactcgcctgtcgcattttgaatatgtgaagaacgaggatctggagaagattgggatgggacggcctggccagcgtcgcctgtgggaggctgtcaagcggcgtaaggccctgtgtaagaggaagagttggatgtcaaaggtgtttagcggcaaacgactggaggcggaattccctccacaccacagccagagcacctttcggaaaacctccccggctccgggcgggcctgcaggggaggggccactgcagagtctgacctgccttatcggagagaaggatcttcgattgttagaaaagctgggagacggcagctttggcgtcgttagacgtggggagtgggatgccccctctggcaagacagtgtccgtggccgtcaaatgtctgaaacccgatgtactctctcagccagaggccatggatgacttcattcgggaggtgaatgcaatgcacagtctggatcatcgcaacctgatccggctctatggagtcgtcctgactcctccaatgaagatggtgactgagctggcacctttgggcagtcttctagacagactccggaagcatcagggccacttcttgctcgggactctatctaggtacgccgtgcaggtcgccgaggggatgggttacctggaatccaagagatttatccaccgcgatctggcagcccggaacctgctgctggctacacgcgatttggtgaagatcggtgatttcggtctgatgagggccctaccacagaatgacgaccactacgtcatgcaggaacatcgaaaggtcccgtttgcctggtgcgcccccgaatcactgaagactcgaacattcagtcacgcatccgatacctggatgttcggcgttacgctgtgggagatgtttacatacggtcaagagccatggatcggcttgaatggctcccagattctgcacaagattgacaaggagggcgagcgtctgccgcgacccgaagactgtcctcaggacatttacaacgtgatggtgcagtgctgggctcataaaccggaggatcgacctaccttcgtcgctcttagagactttctcctggaagcccaacctaccgatatgcgtgcactccaagatttcgaagagccggataagctacacatacagatgaatgatgtgataactgtcatagagggcagagcggagaactactggtggcgaggccaaaacaccagaacactgtgtgtgggcccatttccaagaaacgtggtaaccagtgtagccggcctatcagcccaggatataagtcagccactgcagaactccttcatacacaccggtcatggagacagcgaccctcgtcattgctggggattcccagatcgcattgacgaactgtatctgggaaaccccatggatccacctgatttgttgagcgtggagctttcaacttctcgccccccacaacacctggggggtgtgaagaagccaacatacgatccagtcagtgaagatcaagatcctctgagcagtgactttaaacggctcggcctcaggaagccgggattaccccggggcttatggctggctaagccaagcgctagggtgccaggaacgaaggcatcccgcggatcaggcgccgaagtgacactgattgacttcggagaagagccagtggtaccggcactgcggccctgcgccccatctctcgcacaactggctatggatgcctgttctctgctggatgagactccgccccagagtcccacaagggccctacctcgcccactgcatcccaccccagtggtagattgggatgccagacccctgcctcccccgcctgcttacgatgacgtggcacaagacgaagatgatttcgaaatctgtagcatcaatagcactctcgtaggtgcaggcgttccagccggtccaagccagggacagaccaactatgcttttgtccccgagcaggcacgtcctccgccccctctggaagacaatctgttcctgccaccgcaagggggcgggaaacccccgagttcagctcagacggccgagatattccaggctctgcagcaggagtgtatgcgacagttgcaagctccggccgggtctccagcgccaagcccaagtccaggaggggacgacaaaccccaagttcctcctcgagtccccattccacctagacctactcggccacatgttcagctgagccccgctccgccaggcgaagaagaaacatcccagtggcctgggcctgcaagcccaccaagagtgccacctagggagccactttctcctcaaggatctaggaccccctcgcctctggtccctcccggctcctcaccactgccccccagactgagtagtagtcccggaaagactatgccaacaacacagtctttcgcctcagaccctaaatatgccacgccacaagttattcaggcgcctggccctcgggctggcccctgtatactgccaattgtgagagacggcaagaaggtgtcctcaacccattactacctcctgcctgagaggcctagctatctagagagatatcagagatttttaagagaggctcagagtcctgaggagccaacaccactgcctgtccctctgcttctgcctccgccctctacccccgcccccgcagctccaacggcaaccgtgcgccctatgcctcaggctgcactggatcctaaggccaacttctccaccaacaatagcaaccccggcgcacggccgccccctcccagagcgaccgccaggttaccacagaggggctgtcctggggacggcccagaggcgggaagacccgcagataagattcaaatggcaatggtccacggtgtgaccacggaggagtgccaagctgcactacagtgtcacgggtggtcagtgcagcgggctgctcagtacctaaaagttgagcagctgttcgggctgggactcagaccacggggcgagtgtcataaagtgttggagatgtttgactggaatctggagcaggccggatgtcacttattgggaagctggggtcctgcacaccacaagcgatag

SEQ ID NO: 159228 - DNA, 3117 bp, Artificial Sequence
  derived and/or modified sequence
atgcaacccgaggagggaactggctggctcctagagctcctgagcgaagtgcagctgcagcaatacttcctcaggctaagagacgaccttaatgtgacccggttgagtcactttgagtatgtgaagaatgaggatcttgaaaagatcgggatgggtagacccgggcaaagacggctttgggaggcggtgaaacgccggaaggccctttgtaagcggaaatcttggatgtccaaagtcttttcaggtaaacggttggaagccgagtttcctccccatcatagccaaagtacttttagaaagacctctcctgcgcccggcggccctgcaggggagggtcctttacagtctctgacctgcctaatcggtgagaaggacctgcgcctgctggaaaagctgggcgatgggtctttcggcgttgtcagacgcggcgagtgggatgccccatctggaaagacagtttctgtggccgtcaagtgtttgaagcccgatgttctgtcccagcctgaggccatggatgactttattcgggaggtgaatgccatgcatagcctggatcatcgtaacctcattagactgtacggcgtcgtattgacaccccccatgaaaatggtaactgaattggctccactaggttcactcttagatcgtttgaggaagcatcagggacacttcctgctcgggaccctcagccggtacgctgtccaggtggctgagggaatgggataccttgagagcaagaggttcatccatagagacctcgccgctcgcaatctgctcctggcaactcgtgacctggttaagattggcgacttcgggctcatgcgggctctgcctcagaatgatgatcactatgttatgcaggagcacaggaaggttccatttgcgtggtgcgcccccgaatccctgaaaacgagaacctttagtcatgccagcgacacctggatgtttggcgtcacactgtgggaaatgttcacatatggacaggaaccatggatcggccttaatggatcccagattctgcataagattgataaagagggcgagcggcttcccaggcccgaggactgcccacaggacatctacaatgtcatggtgcagtgttgggctcataaaccagaggaccgccccacattcgttgctctcagagatttcttactggaggctcagccaaccgatatgcgcgccctccaagactttgaagaacccgataagctccacatccaaatgaacgacgtaatcaccgttattgagggacgtgctgagaattattggtggcggggccagaacacccgaacactctgcgtgggcccatttccccgcaacgtcgtgacctccgtggccggactatctgcacaggatattagtcagcccctccagaattcctttatccacacggggcacggtgattcagatccaagacactgctggggctttccagatcggatcgacgagctatacctaggtaacccgatggacccccctgacctactctcggtagagctgtctacatctcgccccccacaacatctgggcggagtgaagaagcctacttatgatcccgtctctgaagaccaagatcccctgagtagcgatttcaaacgattaggcctgagaaagcccggcctaccacgcggcctgtggctcgctaagccatctgccagagtgcctggaacaaaagcgtctcgggggagtggagcagaggtcacactgatcgacttcggcgaggaacccgttgtccctgccctgaggccttgtgccccatccctggctcagctcgctatggacgcttgcagcctcctggacgagacccccccacagtcaccaacccgcgcactgccgcgtccgcttcatccaacacccgtggtggattgggacgcccggcccctcccacctccacctgcctacgacgacgttgcacaggacgaagacgacttcgagatttgttctatcaactcgactctcgttggagcgggcgtcccagctggccccagtcagggccagaccaactatgcatttgtcccggagcaggccagaccccctcccccactggaagacaatctcttcctgccgccccagggggggggaaagcccccatcaagtgcccagacggcggaaatcttccaggccctgcagcaggaatgcatgaggcagttgcaagctccggcagggagccccgccccctccccaagccccggtggagatgataaaccccaagtcccaccacgagttcccatccctcctaggccaacaaggcctcacgtgcaactgtcccctgccccccccggtgaagaagagacaagtcagtggccagggcccgcaagcccccctagagtcccccctcgcgaacccctgtccccccagggaagccgaacaccctcccctttagtccctcctggtagtagccctctgcctcccagattatctagcagtcctggaaagactatgcccacaacccagtcttttgcaagcgaccctaaatatgcaacgccacaggttatccaagctcctggccccagggctgggccctgcattctgcccatcgtgagggacggtaaaaaagtctcgtccacgcactactacctgctgcccgagcgcccaagctacctggaacgctaccagaggtttcttagagaggcgcagtcacctgaagaacctacaccactgccagtcccgctcttgttgcccccgccttccactcctgcccctgccgctcccaccgccactgtacgacctatgcctcaagccgcccttgatcctaaggccaatttctcaacaaacaactctaatcctggggctaggccaccccccccgcgggccactgccaggttaccacagcgggggtgtcctggggatggccccgaagcaggccggccggccgataagattcagatggccatggtgcatggggtaacaacagaggagtgccaagcagccttacagtgtcacgggtggagtgtgcagagagccgcccagtacctaaaggttgagcagttgtttggcctgggcctacgaccaaggggagagtgccacaaggtgctcgagatgttcgactggaatttagaacaggcaggctgccatctgctcggctcttgggggccagcacatcataagcgatag

SEQ ID NO: 159229 - DNA, 3117 bp, Artificial Sequence
  derived and/or modified sequence
atgcagcctgaggagggcaccggctggctgctggagctgctgtctgaggtgcagctgcagcagtacttcctgcggctgagagatgacctgaatgtgacccggctgagccactttgaatatgtgaagaatgaagacctggagaagattggcatgggccggcccggccagaggcggctgtgggaggccgtgaagaggaggaaggccctgtgcaagaggaagtcctggatgagcaaggtgttttctgggaagaggctggaggccgagttccccccccaccacagccagagcaccttcaggaagaccagccctgcccctgggggccctgctggggagggccccctgcagagcctgacctgcctgattggagagaaggacctgcggctgctggagaagctgggagatggcagctttggagtggtgagaagaggagagtgggatgcccccagcggcaagacagtgtctgtggccgtgaagtgcctgaagccagatgtgctgagccagcctgaggccatggatgacttcatccgggaggtgaatgccatgcacagcctggaccacaggaacctgatccggctgtatggagtggtgctgaccccacccatgaagatggtgacagagctggcccccctgggcagcctgctggaccggctgaggaagcaccagggccacttcctgctgggcaccctgagccgctatgctgtgcaggtggccgagggcatgggctacctggagagcaagcgcttcatccaccgggacctggccgccaggaacctgctgctggccacccgggacctggtgaagatcggggactttggcctgatgagggccctgccccagaatgatgaccactacgtgatgcaggagcacaggaaggtgccctttgcctggtgtgcccctgagagcctgaagaccaggaccttcagccacgccagtgacacctggatgtttggagtgaccctgtgggagatgttcacctacggccaggagccctggattggcctgaatggcagccagatcctgcacaagattgacaaggagggggagcggctgcccaggcctgaggactgcccccaggacatctacaacgtgatggtgcagtgctgggcccacaagccagaagatcggcccacctttgtggccctgcgggacttcctgctggaggcccagcccacagacatgagggccctgcaggactttgaggagccagacaagctgcacatccagatgaatgatgtgatcaccgtcatcgagggccgggcagagaactactggtggaggggccagaacaccaggaccctgtgtgtgggccccttccccagaaatgtggtgacctctgtggccggcctgagcgcccaggacatcagccagcccctgcagaacagcttcatccacactggacatggagacagcgaccccaggcactgctggggcttcccagacagaattgatgagctgtacctgggcaaccccatggaccccccagacctgctgtctgtggagctgagcaccagccggcccccccagcacctgggcggcgtgaagaagcccacctatgaccctgtgtctgaggaccaggaccccctgagcagtgacttcaagaggctgggcctgaggaagccaggcctgccccggggcctgtggctggccaagcccagcgcccgggtgcccggcaccaaggccagccggggcagcggggctgaggtgaccctgattgactttggagaggagcctgtggtgcctgccctgcggccctgtgcccccagcctggcccagctggccatggatgcctgcagcctgctggatgagaccccaccccagagccccacccgggccctgccccggcccctgcaccccacccctgtggtggactgggatgcccggcccctgcccccacctccagcctatgatgatgtggcccaggatgaagatgactttgagatctgcagcatcaacagcaccctggtgggcgccggcgtgcctgctggccccagccagggccagaccaactatgcctttgtgcctgagcaggcccggcccccaccacccctggaggacaacctcttcctgcccccccagggcggcggcaagccacccagcagcgcccagacagctgagatcttccaggccctgcagcaggagtgcatgaggcagctgcaggccccagctggcagccctgcccccagccccagccctggaggagatgacaagccccaggtgcccccccgggtgcccatccccccccggcccacccggccccacgtgcagctgagccctgcccctcctggagaggaggagaccagccagtggccaggccctgccagccccccccgggtgcccccccgggagcccctgagcccccagggcagcaggacccccagccccctggtgcccccaggcagcagccccctgcccccccggctgagcagcagccctgggaagaccatgcccaccacccagagctttgccagtgaccccaagtatgccaccccccaggtgatccaggcccctggcccccgggccggcccctgcatcctgcccatcgtgagagatggcaagaaggtgagcagcacccactactacctgctgcctgagcggcccagctacctggagcgctaccagcgcttcctgcgggaggcccagagccctgaggagcccacccccctgcctgtgcccctgctgctgcccccacccagcaccccagccccagctgcccccacagccaccgtgcggcccatgccccaggccgccctggaccccaaggccaacttcagcaccaacaacagcaaccctggggcccggcccccaccaccccgggccacagcccggctgccccagaggggctgccctggagatggccctgaggccggccggcctgctgacaagatccagatggccatggtgcacggcgtgaccacagaggagtgccaggccgccctgcagtgccacggctggagcgtgcagagagctgcccagtacctgaaggtggagcagctgtttggcctgggcctgcggcccagaggagagtgccacaaggtgctggagatgtttgactggaacctggagcaggccggctgccacctgctgggctcctggggccctgcccaccacaagaggtag

SEQ ID NO: 159230 - DNA, 3117 bp, Artificial Sequence
  derived and/or modified sequence
atgcagcccgaggagggcaccggctggctgctggagctgctgagcgaagtgcagcttcagcagtacttcctgcggttaagggacgacttgaacgtaactagactctcccactttgaatatgtgaagaacgaagatcttgagaagatagggatgggccgtcccggacagcgtaggctgtgggaagctgtgaaacggcgcaaggccctctgcaagcggaagtcctggatgtcaaaggtcttctcgggcaaacggctggaagccgagtttccaccccaccacagtcagtccacctttaggaagaccagccctgcacccggtgggcccgccggggagggacctcttcagtccctcacatgcttgatcggggaaaaggatcttagactgctcgagaagcttggcgacgggtcttttggagtggttcggcgcggggagtgggacgcccctagtgggaaaactgtgagcgtggcagtgaagtgcctaaagcccgacgtactgtctcaacccgaagcaatggatgacttcatacgggaagtcaacgcaatgcattccctggaccatcggaatctgatacggttgtacggcgtggttctcacccccccgatgaagatggtgacagaactagcccctctgggatcactattagacagacttcgtaagcaccagggacattttctccttggtaccctatcgcgttacgccgtacaggtggcagaaggcatgggctatctggaaagcaaaaggttcatccacagggacttggccgctaggaatttgctcctagccactcgcgatttagtcaaaatcggcgattttggactgatgagggcactgcctcagaatgacgatcactacgtgatgcaagagcatcgcaaagtaccgttcgcgtggtgtgcccctgagagcttgaaaacaaggacattctcgcacgcgagcgacacctggatgttcggagtgacgctttgggaaatgtttacatacgggcaggagccgtggattggtctcaatggctcccagatcctgcacaaaatagacaaagaaggcgagaggttgccgcgaccggaggattgcccccaggatatctataacgtgatggttcagtgttgggcacataagcctgaggacagacctactttcgtggctctgcgcgacttcttgctcgaggcacagcccaccgacatgagggcgctgcaagacttcgaagagccagacaagctccacatccagatgaatgatgttatcaccgtcattgagggcagggccgaaaattattggtggaggggacagaacaccagaacactttgtgttggtcctttcccgcggaacgtcgttacttcagttgccgggctgagtgcgcaagacatcagccagccgctccagaatagcttcatccacactggtcacggtgattctgatccgaggcactgctggggattccctgaccgcatagatgagctatatctgggaaatccgatggacccgcccgatttactctctgtggaactgtctacctctagacctcctcagcacctgggtggagtcaagaagcccacctacgatccagtctctgaggaccaggaccctctgagctctgacttcaagcgactgggactgcggaagcccgggctcccccgcggcctgtggctggcgaaacccagcgcccgggtccccggcactaaggcttcaagggggtcgggcgctgaggtcaccctgattgattttggggaagaaccggttgtgcccgccttgcgcccatgcgcaccatccttggctcagttagccatggatgcctgctccctgctcgacgagacccctcctcagagccccacccgcgcattgcctcggccactgcaccccacccccgtggtcgactgggacgctcgcccattaccaccacccccggcttacgacgacgtcgctcaggatgaggatgactttgaaatatgttccatcaatagtaccctggtgggcgctggtgtccctgcaggaccttctcaggggcaaactaactacgcatttgtgcctgagcaagcacggcctcccccccctctcgaggacaacttgttcttgccccctcaggggggaggaaaaccgccttcatccgcacaaaccgctgaaatattccaagctctccaacaggagtgcatgaggcagcttcaagcaccggcgggctctccggctccgtcgccaagccctgggggcgatgacaagccccaggtgcctccgcgcgtgccgatcccacctcgccctacacgcccccatgtgcagctctctcccgcaccaccaggagaggaggaaacctctcagtggcccggaccggcaagccccccacgtgttcctcctcgggaaccacttagtccccagggttctcggacaccctctcccttagttccacctggatcaagtcccctgccgccacgcttaagcagcagccccgggaaaaccatgccgaccactcagtccttcgctagcgatcccaagtacgctaccccccaagtgatccaggctccaggaccgcgcgctggcccgtgcatccttcccatcgtgcgtgatggaaaaaaggtcagcagcacccattactatctgcttcccgagcgtccaagctatctagaacgctatcaaaggttcctgcgtgaggctcaaagtccagaggaacccaccccattacccgtccctttgctcctgccacctccatcaacaccagcaccagcagcccccacagccactgtcagacctatgccccaagcagccttggacccaaaagcaaatttcagcaccaacaatagcaacccgggggcacgcccccctccgccaagggccacagctagactgccccagaggggttgtcccggcgacgggcctgaggccggacggccagccgacaagatacaaatggccatggtccacggagtcaccacggaagagtgccaggctgccctccagtgtcatgggtggagtgtgcagagagcagcccagtatctcaaggtggagcagctttttggcttgggcctgcggcctcgcggcgaatgtcataaagtactcgaaatgttcgattggaacctcgaacaggcggggtgccacctgcttggttcctggggtcccgcccaccataagagatag

SEQ ID NO: 159231 - DNA, 3117 bp, Artificial Sequence
  derived and/or modified sequence
atgcagcccgaggagggcaccggctggctgctggagctgctgagcgaggtgcagctgcaacagtacttcctgaggctaagggacgatctcaatgtcactcggctgagccacttcgagtacgtgaaaaacgaggatctcgagaagattgggatgggtcgcccaggtcagcgccggctatgggaggcagtgaaacgtaggaaggcgctttgcaagaggaagtcgtggatgtcaaaagtgttttcaggcaagcgtctcgaagctgaatttcccccacaccatagtcagtcaacttttcggaaaacgagtccagcacccggggggccagccggcgagggcccactgcagtcattaacatgcttaattggggagaaagacctgagactgctggaaaagctaggggatggaagctttggtgtggtccgaagaggcgagtgggatgctcccagtgggaagactgtttctgttgccgtgaagtgtctgaagccagacgtgctcagccaaccagaggcaatggacgattttatccgcgaagtcaatgccatgcacagtctagatcaccgaaacctgatcaggttatatggagtggtcctgactcctcctatgaagatggtgacagaactggctcccctggggtctctgttagacaggctgagaaagcaccaaggtcattttctgctggggactctttccagatatgccgtgcaggtggccgagggaatggggtacctagaaagtaaacggttcattcatagagatctagccgcccggaacctgttactggctacacgggatctggtcaagatcggtgattttggcctaatgagagctttgccccagaacgacgatcattacgtgatgcaagaacaccgcaaggtgccttttgcgtggtgtgctcccgagagccttaaaacaagaaccttctcccatgcctcagatacctggatgttcggagtgactctgtgggagatgttcacctatggacaggagccttggataggattgaatggaagccagattctccacaagatcgacaaggaaggagagcgcctcccacgccccgaagattgccctcaggacatctataacgtgatggtgcagtgctgggcccataaacccgaggaccgccctacgtttgtcgccttgagagatttcctcttggaagcccaacctacagatatgcgggccttacaagacttcgaggagcctgataaattgcatattcaaatgaatgacgtgattacagtgatcgagggacgggcagagaactactggtggcgcggtcagaacacacgtactttatgcgttggccctttcccaaggaacgtggttacctccgtggcgggcctgagcgctcaagatatctctcaacctttacaaaacagtttcatccataccgggcatggtgacagcgatccccggcattgttgggggttccctgacaggatagacgaattatatttggggaatcccatggatcccccagatcttctgtctgtggagttgagcacttcgcgccccccccagcacctgggcggtgtgaagaaacccacctatgaccctgttagtgaggatcaggatcccctttcaagcgacttcaagcggctcggcttgcggaagcctggcctaccccggggtctgtggctcgccaagccctccgccagggtgcctggcacaaaagcatcaagaggcagtggcgcagaggtcacccttattgatttcggagaggaacccgttgtgccagcccttaggccttgcgctccctcactcgcccagctggcaatggatgcttgctcactgctggatgagacgcctccacagtcacccactcgggcactgccccgacccttgcaccctacgcctgtggtggactgggatgcaagacctctaccacccccccctgcctacgatgacgtggcgcaggatgaggatgatttcgaaatttgtagcatcaattccacacttgtgggggccggcgtgcccgctgggccaagccagggccagacaaattacgcttttgtccccgagcaggctcgacctcctcctcccctggaagacaatctgttcttgccaccccagggcggcggcaagcccccttcaagcgctcagacagccgaaatctttcaggccttgcagcaggaatgcatgaggcagctccaggccccggcaggctctccagccccaagccctagccccgggggggatgacaagccccaggtgccaccccgagtacctatcccaccccgccccacacggccccatgttcaactgtccccggccccccctggcgaggaggaaacctcccagtggcccgggccagcgtctcctcccagggtcccgcccagggagccactctctcctcagggctcaaggacccctagtccactggtgccccccgggagctctccactgcccccacggctttctagctctcccgggaaaaccatgccaacaacccagtcgttcgccagtgatcccaaatacgcgactccccaggtgatccaggctcccgggcctcgggccggcccttgtatcctgccaatagtccgggacggcaagaaagtttcatccacacactattatcttctgccagaacggccatcctatcttgagcggtatcagcggttcctgagagaggctcagtcacccgaggaaccaaccccactccctgtgccgctactgctgccgcccccttccaccccagcccctgctgctcccaccgccacggtgcgccctatgcctcaggcagctctggaccccaaggccaacttctccactaataactcgaatcctggcgcccgccctccgcccccacgagctacagcccggcttccccagcggggctgtcctggtgatgggcctgaagccggtaggcctgctgataagatccagatggcaatggtgcatggagtgaccaccgaagagtgccaggcagcgctccagtgccacggttggagtgtccaacgagcggctcagtatctgaaagtcgagcagctgtttggcctcggtctccgcccccggggagaatgccataaggtactcgagatgtttgattggaacctggaacaggccggttgtcatctcctgggttcctggggcccagcacatcataagcgctag

SEQ ID NO: 159232 - DNA, 3117 bp, Artificial Sequence
  derived and/or modified sequence
atgcaacccgaagagggaacaggctggctcctggagctgctgtctgaagtgcagttgcagcagtactttctgaggcttcgtgatgacctgaacgtcacccgtctctcgcatttcgagtacgttaagaatgaggatcttgaaaagataggcatgggtagacccggacaacggaggttgtgggaggcagtcaaaaggcgaaaagcactttgtaaacgcaaatcctggatgagcaaggtgttctcaggcaaacgattggaggccgaattcccccctcatcattcccaaagcacattcagaaagaccagtcccgcacctggaggacccgcaggcgaagggcctttgcagagtctgacatgcctgatcggagaaaaagacctacgcctgcttgaaaaattaggggatggaagcttcggagtggtccgacgcggtgagtgggacgctccctctggcaagacagtcagcgtagcggtcaagtgcctgaagccagacgtgctaagccagcctgaggccatggacgacttcatcagggaggtaaacgctatgcattcactggatcatcggaacctcatacgcctatacggagtcgtacttactccaccaatgaaaatggtgacggagcttgcaccactggggtctctgctcgaccgcttgagaaaacaccaggggcacttcttattgggaactcttagccggtacgccgtgcaggtggcagaagggatgggatacttggagtcaaaacgatttattcaccgagatctggccgcacggaatcttctcctggcgactagagaccttgtaaaaattggcgatttcgggctcatgagggctctcccacagaacgacgaccattacgtcatgcaagaacatcggaaagttccttttgcttggtgtgcacccgagagcctcaagacccgtactttctcccacgccagcgatacctggatgtttggagtcaccctgtgggaaatgttcacctatggtcaggaaccttggataggcttgaatggatcccagattctccacaagatcgataaagagggggagaggctgcctcggcctgaagattgcccacaagatatctacaacgtcatggtccagtgctgggcccataaaccggaagatagaccaacgtttgtggcactccgcgattttttgctggaggctcagccaacagacatgagagctctccaagactttgaggagcccgacaagctacatatacagatgaatgacgttattacagttatcgagggccgagcagaaaattattggtggaggggccagaacactcgaacattgtgtgtgggccctttccctcgtaatgttgtaaccagcgttgccggactgagcgcccaggacattagtcagcccttacagaacagttttatacacaccggccacggagattccgatccacggcattgttggggatttcctgaccgcattgatgagttgtatctgggcaacccaatggacccaccggatctgctgtctgtggaactgagcaccagcagaccccctcagcacctagggggtgttaagaagcccacttacgacccagtgagcgaagaccaagaccctttgtcctccgacttcaaacgactaggtctgcgcaaaccagggctacctcggggtctgtggctggccaaaccctccgcccgtgtccccggaactaaagcatcaaggggcagcggtgcagaagttaccttgatcgactttggggaagaacccgtggtgccagccctgaggccatgcgcaccttcactcgcacagctcgctatggatgcctgtagcctgctggacgaaacaccgccacaaagtcccaccagagctctccccagaccactccatcctaccccagtggttgattgggatgcgcgacctctgcctccccctccggcatatgacgacgtggcccaggacgaagatgactttgagatatgtagtattaattccactttagtcggggcaggcgtgccagcagggccaagtcaaggccaaacaaattacgcctttgttccagagcaggcacggcctccaccgccacttgaggataacctgtttctcccaccccagggtggtggtaaaccacccagttcagcccagaccgctgagatttttcaagcgttacaacaggagtgtatgcgtcagctacaagcgcctgcgggtagccctgcccctagcccttcacccggaggggatgataagccccaggttcctcccagagtgcctattccccctcgcccaactcgccctcacgtgcagcttagtcccgctcctccaggggaagaagagacttcgcagtggccagggcctgcttctcctccgcgagttccaccacgagaaccgctgagcccgcagggcagtagaacaccatctccccttgtgccacccggatcctctccacttcctccccgactgtctagctcacctggtaagacgatgcccactacacaaagcttcgcttcagaccctaaatatgctacgcctcaagtaatccaggcaccaggtcctcgggcaggcccttgcatcctcccgattgtgagggacggcaaaaaagtgtccagcacacattactacttgttgccagaaaggccaagctatctagaacgctatcagaggttccttcgggaggctcagagtccagaagagcccaccccactccccgtcccattacttctgcctccccctagcacacccgcacctgccgctccgactgccaccgtaaggcccatgccacaagctgcgctggatccgaaggctaacttttcaaccaacaactccaatccaggagcaagaccccctccacccagggcaaccgcaaggctgccgcagcgcggatgtcctggggatggcccagaggcaggcaggcccgcagataaaattcagatggccatggtccatggcgtcaccaccgaggagtgccaggctgccctgcagtgtcacggctggagtgttcaaagggccgctcagtatttgaaggtcgaacagcttttcggcctggggttaaggcctaggggagagtgccacaaagtgctggagatgttcgattggaatctggagcaggcgggttgccacctgctgggaagctggggcccagcccatcacaaacgctag

SEQ ID NO: 159233 - DNA, 3117 bp, Artificial Sequence
  derived and/or modified sequence
atgcagcctgaagaaggtactggctggctacttgaactcctgtctgaggttcagctccagcaatacttcctcagactgagggatgacttaaatgtgacgcgattgtctcacttcgagtacgtgaaaaacgaagacctggagaagattgggatggggcgtcccggacagaggcgtctgtgggaggccgttaaaaggcgaaaggccctgtgtaaacgcaagagttggatgtcaaaggtgttcagtggaaagagacttgaagccgagtttcctccccaccatagccagtccacctttcgcaagacctcacctgcaccaggcggtccagccggagaggggccactccagtcactgacgtgcctgatcggtgagaaagaccttcgcctgttagagaagttgggggacgggagtttcggagtcgtaaggcgcggtgaatgggatgccccaagcgggaaaacagtctcagtggctgtcaagtgcctcaagcctgacgtccttagccagccggaggcaatggatgacttcatccgtgaggtgaacgctatgcacagcctggatcatagaaacctaatccggctgtacggggtggtgctgactcctcccatgaagatggtgacggagctggctccattagggagccttctggatagactgcgtaagcaccaggggcactttctcctcggcactctctctagatacgctgtgcaggtggctgaaggcatgggctacctggaatccaaacgatttattcatcgcgacctcgcagccagaaatctgcttcttgccacccgtgacttagtgaagataggggactttgggttgatgcgcgctctcccccagaatgatgaccactacgtgatgcaggaacatcgcaaagtgcccttcgcgtggtgtgcccctgaatctctgaaaacccggacatttagtcacgctagcgacacctggatgtttggagtaacactttgggaaatgtttacctacggtcaagagccatggattgggctgaatggctctcagatcctgcacaagattgataaggaaggggagcgactgccaagacccgaggactgtcctcaggacatatacaacgtgatggttcaatgttgggctcacaagcctgaggatagacctactttcgtcgccctccgggacttcctgctggaagcccagccgaccgatatgagagcattacaggactttgaggagccagacaaactgcatatacagatgaacgacgtgataactgtcattgaaggccgtgcggaaaattactggtggcgcggacagaatacccgcaccctctgtgtaggaccctttccaagaaacgtggtgaccagtgtcgcagggcttagcgcccaggacatctcacagcccctccagaactcttttattcatactggccacggtgatagcgaccccagacattgttggggatttcccgaccgcatcgatgagctgtacctcgggaaccctatggatccccctgacctgctttctgtagaactgtctacatcccgccctccccaacacctaggtggggtaaagaagccgacctacgaccctgtgtcagaagatcaggatcccttatccagcgatttcaagagactgggcctccgtaagcccggactgccacggggactgtggttggccaagccctccgcccgagtacccggtaccaaggctagccgaggaagtggtgcagaggttacactgatcgacttcggggaagaacccgttgtccccgcattacgcccatgtgcgccaagtcttgcccaacttgctatggatgcctgctccttattggacgagacaccaccacagagccctacacgggcacttcccagaccattacaccctaccccggtagtggattgggatgccagaccactcccccctccgccagcatatgacgacgtggcccaggatgaggatgattttgaaatttgctcgatcaattccacgctcgtgggggctggagtgccagccggaccttctcaaggccagaccaactatgcgtttgtgcctgagcaggccagacctccaccaccactggaagataacctgtttctcccacctcaagggggtggtaagccaccttcttcagcacagacagccgagatcttccaagcattgcaacaagagtgtatgcggcagttgcaggctccagccggtagtccagcaccctctccttcccccggaggagatgataaaccccaggtcccgccacgcgtccctattcctccgcgaccaacacggcctcatgttcagctatcccctgcacccccaggcgaggaggagaccagccaatggcccggacccgcaagccccccaagagtgccacctcgcgaaccactcagcccccagggaagcagaactcctagtcctttagtccccccagggagtagccctctgcctcctaggctcagctcttctcccggaaagactatgcctaccacacagtcctttgctagcgaccctaaatacgccacacctcaggttatccaggcgcctgggccacgagcgggaccctgcattctgcctattgtacgcgatggtaaaaaagtctcctctacgcattactacttgcttcctgaaaggcctagttacctcgagcgctaccaaaggttcctcagggaggctcagtctccggaagagccaacacctctgccagtcccgctgcttctgcccccacccagtacgcccgctcctgcggctcctaccgcaacagtccgtccaatgccacaagcagccttggaccctaaagccaacttcagcaccaataactccaatccaggggctcgcccacccccaccaagggccaccgccagattaccgcaaagggggtgtcccggagacgggcctgaggccggaaggccagccgacaagatacaaatggccatggtccacggggtgaccacagaagaatgtcaggcagcccttcagtgccatggctggtcagttcagcgcgcagcccagtacttgaaagtggagcaactctttggattaggacttcggccacgaggggaatgccataaggtcctggaaatgttcgactggaatctggagcaggctgggtgccacttgctggggagttgggggcctgcacaccataagcggtag

SEQ ID NO: 159234 - DNA, 4552 bp, Artificial Sequence
  derived and/or modified sequence
gggagcccgcggaggctgctgcagcagcccgaaccggcgtccgagtccggggaaggcccccgcgagcgcagggaggggccggaaagttccggcgaactgggggagcggcagtgggagagcgtcgggcgggaggcggtggtcctgggagcggccccggcgccccgaagccgccccgagctggtggggagggcccggccggtggggccccgggggcctgcgggggaggggcgcctgggggtgcaagaggcgaattggctgcccggggtgcaggagggacaggtggtgcgggctgtccaggaaacctacctgaacgggaaggagccccaggagggagagggacccggcgaggggctcaggacccggaggcgccggcggaggaggaggtggtgactggcaggcccgggccccacggtacctccggggctgaaggggacgcaggatgtaggggcatggggagtcgggcgcagaagagtgcggggaaccgctgagctctgggagccactgcctgagggcaggccgcggccggcgggaacctcttctgccgtctcagcctgggcgtcgctgaagctgtgtctgcggggaggcagcggaaggcggcagaggctgggaggcggcagaatgcagccagaggagggcacaggctggctgctggagctgctgtccgaggtgcagctgcaacagtacttcctgcggctccgagatgacctcaacgtcacccgcctgtcccactttgagtacgtcaagaatgaggacctggagaagatcggcatgggtcggcctggccagcggcggctgtgggaggctgtgaagaggaggaaggccttgtgcaaacgcaagtcgtggatgagtaaggtgttcagtggaaagcgactggaggctgagttcccacctcatcactctcagagcaccttccggaagacctcgcccgcccctgggggcccagcaggggaggggcccctgcagagcctcacctgcctcattggggagaaggacctgcgcctcctggagaagctgggtgatggttcctttggcgtggtgcgcaggggcgagtgggacgcgccctcagggaagacggtgagtgtggctgtgaagtgcctgaagcccgatgtcctgagccagccagaagccatggacgacttcatccgggaggtcaatgccatgcactcgctcgaccaccgaaacctcatccgcctctacggggtggtgctcacgccgcccatgaagatggtgacagagctggcacctctgggatcgttgttggaccggctacgtaagcaccagggccacttcctcctggggactctgagccgctacgctgtgcaggtggctgagggcatgggctacctggagtccaagcgctttattcaccgtgacctggctgcccgcaatctgctgttggctacccgcgacctggtcaagatcggggactttgggctgatgcgagcactacctcagaatgacgaccattacgtcatgcaggaacatcgcaaggtgcccttcgcctggtgtgcccccgagagcctgaagacacgcaccttctcccatgccagcgacacctggatgttcggggtgacactgtgggaaatgttcacctacggccaggagccctggatcggcctcaacggcagtcagatcctgcataagatcgacaaggagggggagcggctgccccggcccgaggactgtccccaggacatctacaacgtcatggtccagtgctgggctcacaagccagaggacagacccacgtttgtggccctgcgggacttcctgctggaggcccagcccacagacatgcgggcccttcaggactttgaggaaccggacaagctgcacatccagatgaatgatgtcatcaccgtcatcgagggaagggccgagaactactggtggcgtggccagaacacacggacgctgtgtgtggggcccttccctcgcaacgtggtgacctccgtggccggcctgtcggcccaggacatcagccagcccctgcagaacagcttcatccacacagggcatggcgacagtgacccccgccactgctggggcttcccggacaggattgacgaactgtatctgggaaaccccatggacccccccgacctcctgagcgtggaactgagcacctcccggcccccccagcatctaggaggggtgaaaaaaccaacctatgaccctgtgagcgaggaccaagaccccttgtccagcgacttcaagaggctgggcctgcggaagccaggcctgccccgagggctgtggctggcgaagccctcggcgcgggtgccgggcaccaaggccagccgaggcagcggggctgaggtcacgctcatcgacttcggtgaggagcccgtggtcccggccctacggccctgcgcgccctccctggcgcagctggccatggacgcctgctccctgctggacgagaccccgcctcagagccccacgcgggcactgccccggcccctgcaccccacgcctgtggtggactgggacgcacgcccgctgccccccccgcccgcctatgacgacgtggcccaggatgaggatgactttgagatctgctccatcaacagcaccctcgtgggcgcgggggtccctgccgggcccagccagggccagaccaactacgcctttgtgcctgagcaggcgcggccgccccctcccctggaggacaacctgttcctcccgccccagggtgggggcaagccgcccagctccgcacagaccgcagagatcttccaggcgctacagcaggagtgcatgaggcaactgcaggctccggccggctccccggccccctctcccagcccggggggtgacgacaagccccaggtgcctcctcgggtacccatcccccctcggcccacgcgcccacacgtccagctgtctccagcccccccgggcgaggaggagaccagccagtggcctggacctgcttcccctccccgggtgcctccgcgggagcccctgtcccctcaaggctcgaggacacccagccccctggtaccacctggcagctccccgctgccaccccggctctcaagctcacctgggaagaccatgcccaccacccagagctttgcctcagaccccaagtacgccaccccccaggtgatccaggcccctggcccgcgggctggtccctgcatcctgcccatcgtccgggatggcaagaaggtcagcagcacccactattacttgctgcccgagcgaccatcctacctggagcgctaccagcgcttcctgcgtgaggcccagagccccgaggagcctacccccctgcctgtgcctctgctgctgcccccacccagcaccccagcccccgccgcccccacggccaccgtgcggccgatgccccaggctgccttggaccccaaggccaacttctccaccaacaacagcaacccaggggcccggccaccacccccgagggccactgctcggctgccacagaggggctgccctggcgatgggccagaggcgggccggccagcagacaagatccagatggccatggtgcatggggtgaccacagaggagtgccaggcggccctgcagtgccacggctggagcgtgcagagggctgcccagtatctgaaggtggagcagctcttcgggctgggtctgcggcccagaggggagtgccacaaagtgctggagatgttcgactggaacctggagcaggccggctgccaccttctgggctcctggggccctgcccaccacaagcgctgagatgcgtctggagagccagagggcctgcctgaaggaatcacctgagcctgtccgtccaccaggagtggggagatgcccccatccagtcctggaggacccgctgctcctgctgctcccggggatggagcaaggccaaggctgcgggaggctgggagccctgccctgcccatccctcctgcaccagcgctgtccctgcacactttggttcagtcccggtgcccctgccaagatgtggaaggggccgggtgaagacaggcttgagggctgccccagcaggctctgggtatgacctgcctctggccctggtcctgggcggggcctgtgggtggagtagtacccccaggccctgccctgggtgacagactgggaggaaaccaggctggacctgggcaggcgggatgtgttggccacagggagaggcggaccggcacccggtgggacctcctaggactgggccttcttccagggggcccctggcagcagctggggtgtcgggcagaatgtgacttgtggccttaccatggacttgaatgggacttggctggcctcaggatcttgtgcctggaaatagcctgaggtggctcaggaagcggagaaagggtgccagaccattctctggcggggaccagggcccaaggccccagggctggaaggagaccaaggggcagccgccctggagggacatcagtgcttcctcttccacccaattcccccacgcggttccatgttttcccaccagcctgttggcgaagttgctgctccggcattcagtacctgcttcttccagagaaataaagttagtttctattttatgtta

SEQ ID NO: 159235 - protein, 257 aa, Artificial Sequence
  derived and/or modified sequence
MADKMDMSLDDIIKLNRSQRGGRGGGRGRGRAGSQGGRGGGAQAAARVNRGGGPIRNRPAIARGAAGGGGRNRPAPYSRPKQLPDKWQHDLFDSGFGGGAGVETGGKLLVSNLDFGVSDADIQELFAEFGTLKKAAVHYDRSGRSLGTADVHFERKADALKAMKQYNGVPLDGRPMNIQLVTSQIDAQRRPAQSVNRGGMTRNRGAGGFGGGGGTRRGTRGGARGRGRGAGRNSKQQLSAEELDAQLDAYNARMDTS

SEQ ID NO: 159236 - protein, 264 aa, Artificial Sequence
  derived and/or modified sequence
MPDSAPAMADKMDMSLDDIIKLNRSQRGGRGGGRGRGRAGSQGGRGGGAQAAARVNRGGGPIRNRPAIARGAAGGGGRNRPAPYSRPKQLPDKWQHDLFDSGFGGGAGVETGGKLLVSNLDFGVSDADIQELFAEFGTLKKAAVHYDRSGRSLGTADVHFERKADALKAMKQYNGVPLDGRPMNIQLVTSQIDAQRRPAQSVNRGGMTRNRGAGGFGGGGGTRRGTRGGARGRGRGAGRNSKQQLSAEELDAQLDAYNARMDTS

SEQ ID NO: 159237 - DNA, 774 bp, Artificial Sequence
  derived and/or modified sequence
atggccgacaagatggacatgagcctggacgacatcatcaagctgaacagaagccagagaggcggcagaggcggcggcagaggcagaggcagagccggcagccagggcggcagaggcggcggcgcccaggccgccgccagagtgaacagaggcggcggccccatcagaaacagacccgccatcgccagaggcgccgccggcggcggcggcagaaacagacccgccccctacagcagacccaagcagctgcccgacaagtggcagcacgacctgttcgacagcggcttcggcggcggcgccggcgtggagaccggcggcaagctgctggtgagcaacctggacttcggcgtgagcgacgccgacatccaggagctgttcgccgagttcggcaccctgaagaaggccgccgtgcactacgacagaagcggcagaagcctgggcaccgccgacgtgcacttcgagagaaaggccgacgccctgaaggccatgaagcagtacaacggcgtgcccctggacggcagacccatgaacatccagctggtgaccagccagatcgacgcccagagaagacccgcccagagcgtgaacagaggcggcatgaccagaaacagaggcgccggcggcttcggcggcggcggcggcaccagaagaggcaccagaggcggcgccagaggcagaggcagaggcgccggcagaaacagcaagcagcagctgagcgccgaggagctggacgcccagctggacgcctacaacgccagaatggacaccagctag

SEQ ID NO: 159238 - DNA, 1095 bp, Artificial Sequence
  derived and/or modified sequence
gagccgatgcccgattccgcgcccgccatggccgacaaaatggacatgtctctggacgacatcattaaactgaaccggagccagcgaggcggccggggcgggggccggggccgcggccgggccggctcccagggcggccgcggcggtggggcgcaggccgccgcgcgagtgaatcgaggcggcgggcccatccggaaccggccggccatcgcccgcggcgcggccggcggaggcggcaggaaccgaccggcgccctacagcaggccaaaacaacttcccgacaagtggcagcacgatcttttcgacagtggcttcggcggtggtgccggcgtggagacaggtgggaaactgctggtgtccaatctggattttggagtctcagacgccgatattcaggaactctttgctgaatttggaacgctgaagaaggcggctgtgcactatgatcgctctggtcgcagcttaggaacagcagacgtgcactttgagcggaaggcagatgccctgaaggccatgaagcagtacaacggcgtccctctggatggccgccccatgaacattcagcttgtcacgtcacagattgacgcacagcggaggcctgcacagagcgtaaacagaggtggcatgactagaaaccgtggcgctggaggttttggtggtggtggaggcacccggagaggcacccgcggaggcgcccgtggaagaggcagaggtgccggcaggaattcaaagcagcagctttcggcagaggagctggatgcccagctggacgcctataatgcgagaatggacaccagttaaacagaccagcaaatccgcgtgcggaacaggacccaggcgtctcctcttgctccctggttggggggcggtggctggggctgtgcggccaatgatggatttgtttcttttatgttttaaaataggatttaaaaactcatgtaaaggttttttttttttctttttttttttttttaattctgaaacagacctgttttgtaccgagttatttttgggataaattttactggttgctgttgtggagaaggtggcgtttccaccttttccataataaaatagaaatgtgtgtagaactgg

SEQ ID NO: 159239 - DNA, 795 bp, Artificial Sequence
  derived and/or modified sequence
atgcccgacagcgcccccgccatggccgacaagatggacatgagcctggacgacatcatcaagctgaacagaagccagagaggcggcagaggcggcggcagaggcagaggcagagccggcagccagggcggcagaggcggcggcgcccaggccgccgccagagtgaacagaggcggcggccccatcagaaacagacccgccatcgccagaggcgccgccggcggcggcggcagaaacagacccgccccctacagcagacccaagcagctgcccgacaagtggcagcacgacctgttcgacagcggcttcggcggcggcgccggcgtggagaccggcggcaagctgctggtgagcaacctggacttcggcgtgagcgacgccgacatccaggagctgttcgccgagttcggcaccctgaagaaggccgccgtgcactacgacagaagcggcagaagcctgggcaccgccgacgtgcacttcgagagaaaggccgacgccctgaaggccatgaagcagtacaacggcgtgcccctggacggcagacccatgaacatccagctggtgaccagccagatcgacgcccagagaagacccgcccagagcgtgaacagaggcggcatgaccagaaacagaggcgccggcggcttcggcggcggcggcggcaccagaagaggcaccagaggcggcgccagaggcagaggcagaggcgccggcagaaacagcaagcagcagctgagcgccgaggagctggacgcccagctggacgcctacaacgccagaatggacaccagctag

SEQ ID NO: 159240 - DNA, 774 bp, Artificial Sequence
  derived and/or modified sequence
atggccgataagatggacatgagcctcgatgacattatcaagcttaataggtcgcaaaggggaggcagaggaggtggccggggtagaggtagagcaggcagccagggtggccggggcggtggagcacaggccgccgctagggtgaataggggaggaggaccaatacggaacaggccagctattgccaggggagccgcaggtggggggggaaggaacaggcccgccccctacagtaggccaaaacaactgcccgacaagtggcagcatgacctgttcgacagtggcttcggggggggagcaggcgttgagacgggcggaaagcttttggtgagcaatctggattttggagtgtctgacgccgacatccaggaactcttcgccgagtttggcactttgaagaaggctgccgtgcactatgaccggtctggccggagcctgggaactgcggacgtacacttcgaaagaaaggctgacgctttgaaagcaatgaagcagtacaacggtgtgcccctggacgggcggccaatgaacattcagctggtgaccagtcagattgacgcccagagaagacctgcacaatcagtaaatcgaggagggatgactagaaacagaggtgcaggaggctttggcggaggaggcgggaccaggcggggcacacgcggaggcgctcgcggtcggggacggggcgctgggcgcaactcaaagcagcagcttagcgcggaggagctggatgctcaactcgacgcatacaacgcccgaatggacacaagctag

SEQ ID NO: 159241 - DNA, 795 bp, Artificial Sequence
  derived and/or modified sequence
atgccagatagcgcacctgcgatggctgacaagatggatatgagtctcgacgatataattaagctcaaccggagccaaaggggcgggcgcggcggaggccgcggtcgcgggagagcgggaagtcaaggcggcagaggtggtggtgcacaggctgcagcacgggttaaccgcggcggtggtcctattcggaatagacctgcaattgcccgcggagccgccggcggtggcggcaggaatagacctgccccctactcgcggccaaagcaactgcccgataagtggcagcatgacctgtttgattctgggtttggcgggggggccggcgtagagacgggaggaaagttgttggtgtcaaatctcgacttcggtgtgtccgacgccgatattcaagagctctttgcggaatttggaactctaaagaaggccgccgtgcattatgacagatcaggccgctccctgggtaccgctgatgttcatttcgaacggaaagctgacgccctgaaagctatgaagcagtataatggggtgccgttagatggccgccctatgaacatccagctcgtgacctcacagatcgacgcccagagaaggcccgcccagagtgtgaaccgtggtgggatgaccaggaatagaggggctggggggtttggcggggggggcggcacacggaggggcacacgaggaggagcaagaggaagggggagaggggccggccgcaatagtaagcaacagctgtcggcggaggaattagatgcccagctcgatgcctacaatgcccgaatggacacaagctag

SEQ ID NO: 159242 - DNA, 774 bp, Artificial Sequence
  derived and/or modified sequence
atggctgacaagatggacatgagcctggatgacatcatcaagctgaacagaagccagagaggaggccggggcggcggccggggccggggccgggccggcagccagggcggccggggcggcggggcccaggccgccgcccgggtgaacagaggaggcggccccatccggaacagacctgccatcgcccggggagctgctgggggcggcggcaggaacagacctgccccctacagccggcccaagcagctgcctgacaagtggcagcacgacctgtttgacagcggctttggaggaggagctggggtggagaccggcggcaagctgctggtgagcaacctggactttggagtgtctgatgctgacatccaggagctgtttgctgagtttggcaccctgaagaaggctgctgtgcactatgacaggagcggccgcagcctgggcacagcagatgtgcactttgagaggaaggcagatgccctgaaggccatgaagcagtacaatggagtgcccctggatggccggcccatgaacatccagctggtgaccagccagattgatgcccagaggaggcctgcccagagcgtgaacagaggaggcatgaccaggaacagaggagctgggggctttggaggcggcggcggcacccggcggggcacccggggcggggcccggggccggggccgcggggccggcaggaacagcaagcagcagctgtctgctgaggagctggatgcccagctggatgcctacaatgccaggatggacaccagctag

SEQ ID NO: 159243 - DNA, 795 bp, Artificial Sequence
  derived and/or modified sequence
atgccagacagcgccccagccatggctgacaagatggacatgagcctggatgacatcatcaagctgaacagaagccagaggggcggccggggcggcggccggggccggggccgggccggcagccagggcggccggggcggcggggcccaggccgccgcccgggtgaacagaggaggcggccccatccggaacagacctgccatcgcccggggagctgctgggggcggcggcaggaacagacctgccccctacagccggcccaagcagctgcctgacaagtggcagcacgacctgtttgattctggctttggaggaggagctggggtggagactggaggcaagctgctggtgagcaacctggactttggagtgtctgatgctgacatccaggagctgtttgctgagtttggcaccctgaagaaggctgctgtgcactatgacagaagtggccgcagcctgggcacagcagatgtgcactttgagaggaaggcagatgccctgaaggccatgaagcagtacaacggggtgcccctggatggccggcccatgaacatccagctggtgaccagccagattgatgcccagaggaggcctgcccagagcgtgaacagaggaggcatgaccaggaacagaggagctgggggctttggaggcggcggcggcacccggcggggcacccggggcggggcccggggccggggcagaggagctggaagaaacagcaagcagcagctgtctgctgaggagctggatgcccagctggatgcctacaatgccaggatggacaccagctag

SEQ ID NO: 159244 - DNA, 774 bp, Artificial Sequence
  derived and/or modified sequence
atggccgacaagatggacatgagcctggacgacatcatcaagctgaatcgaagccagaggggaggcagaggaggcggtcgtgggcgcggacgggccggcagccagggtggacggggaggcggggctcaagctgccgcccgtgtgaatcgcgggggtggtcccatccggaacaggccagctatcgccaggggagctgctggcggcggcgggaggaatcggccggccccatattcccggccaaaacagctgcccgacaagtggcagcacgatctgtttgatagcggatttggcggaggagctggggtggagactgggggcaaactgctcgtttcgaacctcgatttcggtgtgtctgacgcagatattcaggaactgttcgccgaattcggaaccctaaagaaggcagcggtgcattacgatcggagcggcagaagtttgggcaccgctgacgttcactttgagaggaaggcagacgccctgaaagccatgaaacagtacaacggggttcctctggacgggaggcctatgaatattcagctggttacgtctcagattgacgctcagagaaggccagctcagagtgtcaataggggggggatgactcgcaacagaggggccggtggtttcggagggggtggaggcactcggagaggcacaagggggggtgcacggggccggggacgcggtgcgggtcgcaattccaaacagcagcttagcgcggaggaactggacgcccaactcgatgcttacaacgcacggatggatacgtcctag

SEQ ID NO: 159245 - DNA, 795 bp, Artificial Sequence
  derived and/or modified sequence
atgcccgacagcgcccccgccatggccgacaagatggacatgagcctggacgacatcattaaattgaaccgctctcagcgaggaggtaggggggggggaagaggccgcggtcgggctgggtcacaggggggccgagggggaggagctcaggccgccgctagagttaacaggggggggggccctatccgcaatcgtcccgcaatagccaggggggccgccgggggaggtggacgcaacaggccagccccttattctcggcctaaacagcttcctgataaatggcaacatgatctgttcgactctggatttggcggcggggccggcgtggaaacaggaggcaaactgctggtctccaacttagattttggcgtctcagatgctgatatccaagagcttttcgcggagttcggcacactgaagaaagcggccgtgcactacgacagatcagggaggtctttggggactgcagatgtgcatttcgaaaggaaagcagacgccctgaaggctatgaaacaatacaacggagttccactagacggaagaccaatgaatatccagttggtgacctcacaaatagacgcacagcgtagacccgcccagtctgttaatcgcggaggcatgacccggaacaggggggccgggggattcggcggtggtggcggcacacgtcggggtacccgtggtggagcgcgagggagaggacgaggggcaggccgtaattcaaaacagcagttatccgctgaggagctggacgcacagctcgacgcgtataatgctcgtatggacacctcatag

SEQ ID NO: 159246 - DNA, 774 bp, Artificial Sequence
  derived and/or modified sequence
atggcggacaaaatggacatgtcgctggatgatatcattaaacttaacaggtcacagcggggtgggagaggcggtggacggggtagaggcagggctgggagtcagggcggtagggggggaggcgcacaggctgctgcccgtgtgaacagaggagggggtccaattcggaacagaccagcgatcgctcgaggggcagcaggcggtggcggaaggaataggccggctccttacagcagacctaaacagctgcccgataagtggcagcatgacctgtttgattcgggattcggtgggggagccggtgtcgaaacaggcggaaagctgttggtgtctaacctagactttggtgtgtcagacgccgatatccaggagctttttgctgagttcggtactctaaaaaaggctgcggtgcactacgacagatctgggagaagcctgggtacggccgacgtgcacttcgaacgaaaagccgacgcgctgaaagccatgaaacaatataacggcgtgccacttgatggtagacctatgaatatacagctggtcacaagccagatcgatgcacaaagacggccagcacagagtgttaaccgagggggaatgactcgcaatcgcggagccggaggatttggcggaggaggtggaaccaggcggggaacccgcggaggagccagaggacggggtagaggggcaggtcgcaattctaaacaacagctgtcagccgaggaacttgatgcacagctcgatgcttacaatgcccgaatggataccagctag

SEQ ID NO: 159247 - DNA, 795 bp, Artificial Sequence
  derived and/or modified sequence
atgcccgactccgcacctgccatggctgacaaaatggacatgtcattggacgacatcattaagcttaacaggtcccagcggggaggaaggggaggcggacgcggaaggggcagggcaggtagtcagggtggcaggggcggaggcgctcaggccgcagcaagggttaacaggggcggtggccctatccgcaatcggcctgctatagcccgaggcgcagctgggggaggcggaaggaacaggccagccccttattcccggccaaaacagcttcccgacaaatggcaacacgacctctttgacagcggctttggcggtggagcaggcgtcgagaccgggggaaagctcttggtttcgaatcttgattttggggtgtcagacgccgacatccaggaactgttcgctgagtttggcacactgaagaaggccgctgttcattatgatcggtctggacggagcctgggcacagccgacgtgcacttcgagaggaaggctgatgcactcaaggccatgaagcagtataacggggtgccgctcgatggcagacccatgaatattcagctcgttaccagccagatcgacgcgcaaagaagacctgctcagagcgttaatcggggaggcatgacccgcaatcgcggtgccggaggcttcggtggaggcggaggaactcgtcgtggcacccgagggggagccagaggaagaggcagaggagctggtcgcaactccaaacagcaattgtctgcggaggagctcgacgcccaacttgacgcgtataatgcacggatggacacctcttag

SEQ ID NO: 159248 - DNA, 1091 bp, Artificial Sequence
  derived and/or modified sequence
gagccgatgcccgattccgcgcccgccatggccgacaaaatggacatgtctctggacgacatcattaaactgaaccggagccagcgaggcggccggggcgggggccggggccgcggccgggccggctcccagggcggccgcggcggtggggcgcaggccgccgcgcgagtgaatcgaggcggcgggcccatccggaaccggccggccatcgcccgcggcgcggccggcggaggcggcaggaaccgaccggcgccctacagcaggccaaaacaacttcccgacaagtggcagcacgatcttttcgacagtggcttcggcggtggtgccggcgtggagacaggtgggaaactgctggtgtccaatctggattttggagtctcagacgccgatattcaggaactctttgctgaatttggaacgctgaagaaggcggctgtgcactatgatcgctctggtcgcagcttaggaacagcagacgtgcactttgagcggaaggcagatgccctgaaggccatgaagcagtacaacggcgtccctctggatggccgccccatgaacattcagcttgtcacgtcacagattgacgcacagcggaggcctgcacagagcgtaaacagaggtggcatgactagaaaccgtggcgctggaggttttggtggtggtggaggcacccggagaggcacccgcggaggcgcccgtggaagaggcagaggtgccggcaggaattcaaagcagcagctttcggcagaggagctggatgcccagctggacgcctataatgcgagaatggacaccagttaaacagaccagcaaatccgcgtgcggaacaggacccaggcgtctcctcttgctccctggttggggggcggtggctggggctgtgcggccaatgatggatttgtttcttttatgttttaaaataggatttaaaaactcatgtaaaggttttttttttttctttttttttttttttaattctgaaacagacctgttttgtaccgagttatttttgggataaattttactggttgctgttgtggagaaggtggcgtttccaccttttccataataaaatagaaatgtgtgtagaa

SEQ ID NO: 159249 - protein, 78 aa, Artificial Sequence
  derived and/or modified sequence
MCNEETEIKEAQSYQNSPVSSATNQDAGYGSPFSESSDQLAHFKGSSSREEKEDPQCPDSVSYPQDSLAQIKAVYANL

SEQ ID NO: 159250 - DNA, 237 bp, Artificial Sequence
  derived and/or modified sequence
atgtgcaacgaggagaccgagatcaaggaggcccagagctaccagaacagccccgtgagcagcgccaccaaccaggacgccggctacggcagccccttcagcgagagcagcgaccagctggcccacttcaagggcagcagcagcagagaggagaaggaggacccccagtgccccgacagcgtgagctacccccaggacagcctggcccagatcaaggccgtgtacgccaacctgtag

SEQ ID NO: 159251 - DNA, 321 bp, Artificial Sequence
  derived and/or modified sequence
atgtgcaacgaggagaccgagatcaaggaggcccagagctaccagaacagccccgtgagcagcgccaccaaccaggacgccggctacggcagccccttcagcgagagcagcgaccagctggcccacttcaagggcagcagcagcagagaggagaaggaggacccccagtgccccgacagcgtgagctacccccaggacagcctggcccagatcaaggccgtgtacgccaacctgttcagcgagagctgctggagcagcctggccctggacctgaagaagagcggcagcaccaccagcaccaacgacgccagccagaagtag

SEQ ID NO: 159252 - DNA, 237 bp, Artificial Sequence
  derived and/or modified sequence
atgtgcaacgaagagaccgaaatcaaggaggctcaatcgtaccagaattccccagtttcctctgcaacaaaccaagatgcaggatacggttctccattttcagaaagctctgatcaactagcacactttaagggatcctccagtagggaagaaaaagaagaccctcagtgtcctgactccgtgtcctacccccaagatagtttagcccagataaaagctgtgtatgccaacctgtag

SEQ ID NO: 159253 - DNA, 321 bp, Artificial Sequence
  derived and/or modified sequence
atgtgtaacgaagagaccgagattaaggaggcccagtcttaccagaatagccctgtatcttcagctaccaaccaggatgcaggatatggttctccattctcagagagttctgatcagctggcgcacttcaaagggagcagctcgagggaggaaaaagaggatccacagtgtccagacagtgtatcttacccccaggattctctcgctcagattaaagcagtgtacgcgaatttattctccgagtcatgttggagtagcctggccctggacctgaaaaagtccgggagtacaaccagcaccaatgacgcctcgcagaagtag

SEQ ID NO: 159254 - DNA, 237 bp, Artificial Sequence
  derived and/or modified sequence
atgtgcaatgaggagacagagatcaaggaggcccagagctaccagaacagccctgtgtcctctgccaccaaccaggatgctggctacggcagccccttcagcgagagcagtgaccagctggcccacttcaagggcagcagcagccgggaggagaaggaggacccccagtgcccagacagcgtgtcctacccccaggacagcctggcccagatcaaggctgtgtatgccaacctgtag

SEQ ID NO: 159255 - DNA, 321 bp, Artificial Sequence
  derived and/or modified sequence
atgtgcaatgaggagacagagatcaaggaggcccagagctaccagaacagccctgtgtcctctgccaccaaccaggatgctggctacggcagccccttcagcgagagcagtgaccagctggcccacttcaagggcagcagcagccgggaggagaaggaggacccccagtgcccagacagcgtgtcctacccccaggacagcctggcccagatcaaggctgtgtatgccaacctcttcagcgagagctgctggagcagcctggccctggacctgaagaagagcggcagcaccaccagcaccaatgatgccagccagaagtag

SEQ ID NO: 159256 - DNA, 237 bp, Artificial Sequence
  derived and/or modified sequence
atgtgcaacgaggagaccgagatcaaggaggcccagagctaccagaactctcccgttagctcagctacaaatcaagatgccggctacgggagcccattctctgagtcgtccgatcaactggcacatttcaagggatcttcttccagggaggagaaggaagacccacagtgtccggattccgttagttatccacaggacagcttggctcagatcaaggccgtatacgcgaatctatag

SEQ ID NO: 159257 - DNA, 321 bp, Artificial Sequence
  derived and/or modified sequence
atgtgcaacgaggagaccgagatcaaggaggcccagagctaccagaacagccccgtgtcgtctgccacaaaccaggatgccggttatgggtcccctttcagcgaatcttctgatcagttggcccactttaagggcagttcatcacgggaggaaaaagaagatccacagtgccctgacagtgtctcttatccacaagattccctcgcacagataaaagctgtgtacgctaacttgttctctgagtcttgctggagctctctggcacttgatcttaagaaatcaggctctaccacaagtactaatgatgccagccagaaatag

SEQ ID NO: 159258 - DNA, 237 bp, Artificial Sequence
  derived and/or modified sequence
atgtgcaatgaagaaacagagatcaaggaggctcagtcataccagaattcacctgttagtagcgctacaaaccaggacgccggatacggcagccctttcagcgaaagttctgatcaactcgcacactttaaaggcagttcttcaagagaagaaaaagaagacccccagtgtcccgacagtgtcagttatcctcaggattctctcgcgcagataaaggccgtgtacgccaacctgtag

SEQ ID NO: 159259 - DNA, 321 bp, Artificial Sequence
  derived and/or modified sequence
atgtgcaatgaagagaccgagatcaaggaggcacagtcttatcaaaacagccccgtctcctccgccaccaatcaggatgccggatacgggtccccattctccgagtcttccgaccagctggctcactttaaagggtctagctcccgagaagaaaaggaagatccccagtgtcccgactccgtctcttatccacaggattcactagctcagataaaggccgtgtacgccaacctgttcagcgagtcttgctggagctccctcgccctggacctcaaaaagtcaggttcaaccacttctacaaacgatgcgagccaaaagtag

SEQ ID NO: 159260 - protein, 438 aa, Artificial Sequence
  derived and/or modified sequence
MAAGLRKRGRSGSAAQAEGLCKQWLQRAWQERRLLLREPRYTLLVAACLCLAEVGITFWVIHRVAYTEIDWKAYMAEVEGVINGTYDYTQLQGDTGPLVYPAGFVYIFMGLYYATSRGTDIRMAQNIFAVLYLATLLLVFLIYHQTCKVPPFVFFFMCCASYRVHSIFVLRLFNDPVAMVLLFLSINLLLAQRWGWGCCFFSLAVSVKMNVLLFAPGLLFLLLTQFGFRGALPKLGICAGLQVVLGLPFLLENPSGYLSRSFDLGRQFLFHWTVNWRFLPEALFLHRAFHLALLTAHLTLLLLFALCRWHRTGESILSLLRDPSKRKVPPQPLTPNQIVSTLFTSNFIGICFSRSLHYQFYVWYFHTLPYLLWAMPARWLTHLLRLLVLGLIELSWNTYPSTSCSSAALHICHAVILLQLWLGPQPFPKSTQHSKKAH

SEQ ID NO: 159261 - DNA, 1317 bp, Artificial Sequence
  derived and/or modified sequence
atggcagctggcctcagaaaacgcggtcgatcgggctccgcagctcaggccgagggactgtgcaagcagtggctgcagcgtgcgtggcaagagaggcgcctgctattgcgggagccaagatatacactgttagtggctgcctgcctgtgtctggcagaggtgggaattacattctgggtgatacacagggtcgcctatacggagattgactggaaggcatatatggccgaagtggaaggggttattaacggcacttacgactacactcagctgcaaggagacacgggaccgctggtgtaccccgctggcttcgtgtacatcttcatgggtctgtactacgctacgtcccgcgggactgacatacggatggcacagaacatttttgcagtgttatatctggcaacgctgctactcgtgttcctaatttaccatcagacgtgcaaagttccaccgttcgtgttctttttcatgtgctgtgccagttacagggtccattctatcttcgtcctccgtctgtttaacgacccagtcgctatggtgttgctgttcctgagcattaatctccttcttgcacaaaggtggggctggggctgctgttttttctctctggctgtcagtgtgaagatgaacgtacttctcttcgcaccagggctcctcttcttgcttctgactcagttcggtttccgaggcgcactgcccaagttgggcatatgcgcggggctgcaggtggtactcggcctccctttcctcttggaaaatccttctgggtacttgagcaggtcatttgatttgggcaggcagttcctatttcattggactgtgaactggcgcttcctacctgaagctctattcctacacagggccttccaccttgcgctcctgactgcgcacttgaccctgctcctgctgtttgccttatgcagatggcatagaactggagagtcaatactgtcactcctgcgggacccctccaaacgcaaggttcctccccaaccccttacacccaaccagatcgtctccacattgtttaccagtaatttcatagggatttgcttctcccgctcactccactaccagttttacgtttggtattttcacacactgccctaccttttgtgggctatgcctgcaaggtggctgacacacctgctaaggctgctggtgctcggcttaattgagctgagctggaacacttatcctagcacttcttgctcaagtgcagctcttcacatctgtcatgcagtgatcctgttacaattgtggctcggcccccagcccttcccgaaatctactcagcattctaagaaggcccactag

SEQ ID NO: 159262 - DNA, 1317 bp, Artificial Sequence
  derived and/or modified sequence
atggctgctggcctgaggaagaggggccgcagcggcagcgctgcccaggccgagggcctgtgcaagcagtggctgcagagggcctggcaggagcggcggctgctgctgcgggagccccgctacaccctgctggtggccgcctgcctgtgcctggccgaggtgggcatcaccttctgggtgatccaccgggtggcctacacagaaattgactggaaggcctacatggccgaggtggagggcgtcatcaatggcacctatgactacacccagctgcagggcgacaccggccccctggtgtacccagctggctttgtgtacatcttcatgggcctgtactatgccaccagccggggcacagacatccgcatggcccagaacatctttgctgtgctgtacctggccaccctgctgctggtgttcctgatctaccaccagacctgcaaggtgcccccatttgtgttcttcttcatgtgctgtgccagctacagagtgcacagcatctttgtgctgcggctcttcaatgaccctgtggccatggtgctgctcttcctgagcatcaacctgctgctggcccagcgctggggctggggctgctgcttcttcagcctggccgtgtctgtgaagatgaatgtgctgctgtttgcccctggcctgctcttcctgctgctgacccagtttggcttccggggggccctgcccaagctgggcatctgtgccggcctgcaggtggtgctgggcctgcccttcctgctggagaaccccagcggctacctgagccgcagctttgacctgggccggcagttcctgttccactggacagtgaactggaggttcctgcctgaggccctcttcctgcaccgggccttccacctggccctgctgacagcccacctgaccctgctgctgctgtttgccctgtgccgctggcacaggactggagagagcatcctgagcctgctgcgggaccccagcaagaggaaggtgcccccccagcccctgacccccaaccagatcgtgtccaccctcttcaccagcaacttcatcggcatctgcttcagccgcagcctgcactaccagttctacgtgtggtacttccacaccctgccctacctgctgtgggccatgcctgcccgctggctgacccacctgctgcggctgctggtgctgggcctcatcgagctgtcctggaacacctaccccagcaccagctgcagcagcgctgccctgcacatctgccacgccgtcatcctgctgcagctgtggctgggcccccagcccttccccaagagcacccagcacagcaagaaggcccactag

SEQ ID NO: 159263 - DNA, 1317 bp, Artificial Sequence
  derived and/or modified sequence
atggccgccggcctgcggaagcggggccggagcggcagcgccgcccaagcagagggattgtgtaagcagtggctgcagcgcgcttggcaagagcggcgcttattgcttagagagcccagatataccttgctcgtggcagcttgtctgtgtctggcggaggtcggcattacgttctgggtcattcatagagtagcatacaccgagatcgactggaaagcttacatggccgaagtggaaggagtaattaacggcacttatgactacactcaacttcagggcgatactggccctttggtttatcctgccggatttgtatacatatttatggggctgtactacgccacgtcgaggggcactgatatcaggatggctcagaacattttcgccgtcctttacctcgccaccctcctgctcgtgttccttatataccaccagacctgcaaagtccccccgtttgtgttttttttcatgtgttgcgccagctatcgggtgcacagtatcttcgtgctgaggcttttcaatgatcccgtggctatggttttgctcttcttatcaattaacctgttgctggcccagagatggggttggggatgttgttttttctctctcgccgtgtcggtaaagatgaatgtcttgttgttcgcccccggcctcctgttcctgttgctgacccagttcgggttccggggggctctccccaagctaggcatctgcgctggtcttcaagtggtcctcgggcttccattcctcctagagaatccatccgggtacttgtcgcggtccttcgatcttgggagacaattcctctttcactggactgttaactggaggttcctgccggaggccctcttcctgcacagggcattccacctggcgctgttgacagcacacctgaccctgcttctcctgtttgccctttgtcgatggcatagaacaggagagtccattctgtccctcttgcgggatccatccaagaggaaggtccccccccagcctctgactcccaatcagattgtatccactctcttcacgagtaatttcatcggtatctgcttttcacgttcactgcattatcagttttacgtgtggtatttccataccttaccctacctgctgtgggccatgccagcccggtggctgacacacctgttgaggctgctggttctgggccttatcgagctgtcatggaacacatacccttccacatcttgctctagcgcggcacttcacatctgtcatgccgtcattctcctccagctttggctgggtccacagccattccctaaatctacccagcactcaaagaaggcgcactag

SEQ ID NO: 159264 - DNA, 1317 bp, Artificial Sequence
  derived and/or modified sequence
atggcagctggactgcgcaagcgcggtcgatccgggtccgcagctcaggccgaaggactgtgtaagcagtggctacagagagcgtggcaggaacgacgccttctgcttcgggaaccgcgatatacactcctcgttgccgcttgcctgtgtttagccgaggtgggcattaccttttgggttatacatcgagtggcttacaccgaaatcgattggaaagcttatatggctgaggtggagggcgtcattaacggaacatacgattacactcaattacagggagacaccggacccctggtttatccagctggcttcgtctacatcttcatgggcttgtactatgccacttctcggggaaccgatattagaatggctcagaatattttcgcagtcctgtatctcgctactctcttattggtatttctgatctaccatcagacctgtaaagtcccaccctttgttttcttcttcatgtgctgcgcctcataccgggttcacagcatctttgtgctaagactgtttaacgaccccgttgcgatggtgctgctgttcctctctataaatctgctcctggcgcagcgatgggggtgggggtgttgcttcttcagtttggctgtatcagtgaagatgaacgtactcctcttcgcgccaggccttctcttcttgctgcttacacagtttgggttcaggggagctttgccaaagctgggtatctgcgctgggttacaggtggttctggggctccctttcctgttagaaaatccgtctggatacctgagcagatcttttgacctgggtcgtcagttcctctttcattggacagtaaactggcgttttctgcccgaagcactctttctgcatcgagcttttcacctcgcccttctgactgcacacctgaccctgttgttactgttcgcactgtgccggtggcaccggaccggcgaatccatactgtctctcctcagggaccctagcaagagaaaggtaccaccacagcctcttacccctaaccaaatcgtctccaccctgtttacttctaattttatcggaatatgttttagtcgtagccttcattatcagttctatgtgtggtatttccataccctcccatacctcctctgggccatgccagccagatggcttacacatcttctgcgcttactggtgctggggctgattgagctctcatggaatacatacccctccacctcatgttcttcagctgccctccacatttgtcatgcggttatactgctccagttatggcttggaccacagccgttccccaagagcactcagcattccaagaaagcccactag

SEQ ID NO: 159265 - DNA, 1528 bp, Artificial Sequence
  derived and/or modified sequence
ggtgggcccacacaagcggcgcaccgttaagatggcggctgggctgcggaaacgcggccggtccggttccgcggcccaggcagagggactctgcaagcaatggctgcagcgcgcctggcaagagcggcgcctgctgctgcgggagccgcgctacacgctgctggtggccgcctgcctctgcctggcggaggtgggcatcaccttctgggtcattcacagggtggcatacacagagattgactggaaggcctacatggccgaggtagaaggcgtcatcaatggtacctatgactatacccaactgcagggtgacaccggaccacttgtgtacccagctggtttcgtgtacatctttatggggttgtactatgccaccagccgaggcactgacatccgcatggcccagaacatctttgctgtgctctacctggctaccttgctgcttgtcttcttgatctatcaccagacctgcaaggtacctcccttcgtctttttcttcatgtgctgcgcctcttaccgtgtccactccatctttgtgctgcggctcttcaatgacccagtggccatggtgctgctcttcctcagtatcaacctcctgctggcccagcgctggggctggggttgctgctttttcagcctggcagtctctgtgaagatgaatgtgctgctcttcgcccctgggttactgtttcttctcctcacacagtttggcttccgtggggccctccccaagctgggaatctgtgctggccttcaggtggtgctggggctgcccttcctgctggagaaccccagcggctacctgtcccgctcctttgaccttggccgccagtttctgttccactggacagtgaactggcgcttcctcccagaggcgctcttcctgcatcgagccttccacctggccctgttgactgcccacctcaccctgctcctgctgtttgccctctgcaggtggcacaggacaggggaaagtatcttgtcgctgctgagggatccctccaaaaggaaggttccaccccagccccttacacccaaccagatcgtttctaccctcttcacctccaacttcattggcatctgcttcagccgctccctccactaccagttctacgtctggtatttccacacactgccctacctcctgtgggccatgcctgcacgctggctcacacacctgctcaggttgttggtgctggggctcatcgagctctcctggaacacatacccttccacatcctgcagctctgctgccctgcacatatgccatgccgtcatcctgctgcagctctggctgggcccgcagcctttccccaagagcacccaacacagcaagaaagcccactgaagtccacccctttccctcaggacctgagtctaccctcaggacctggggttggttggactctgcccttccaaataaaccttgctaagtccaactctgtgcaacctacatggaggtgggggcagccgatgcctggtccaggctgtgagggacacgtatggagcagataaagaattcactcaa

SEQ ID NO: 159266 - DNA, 1317 bp, Artificial Sequence
  derived and/or modified sequence
atggccgccggcctgagaaagagaggcagaagcggcagcgccgcccaggccgagggcctgtgcaagcagtggctgcagagagcctggcaggagagaagactgctgctgagagagcccagatacaccctgctggtggccgcctgcctgtgcctggccgaggtgggcatcaccttctgggtgatccacagagtggcctacaccgagatcgactggaaggcctacatggccgaggtggagggcgtgatcaacggcacctacgactacacccagctgcagggcgacaccggccccctggtgtaccccgccggcttcgtgtacatcttcatgggcctgtactacgccaccagcagaggcaccgacatcagaatggcccagaacatcttcgccgtgctgtacctggccaccctgctgctggtgttcctgatctaccaccagacctgcaaggtgccccccttcgtgttcttcttcatgtgctgcgccagctacagagtgcacagcatcttcgtgctgagactgttcaacgaccccgtggccatggtgctgctgttcctgagcatcaacctgctgctggcccagagatggggctggggctgctgcttcttcagcctggccgtgagcgtgaagatgaacgtgctgctgttcgcccccggcctgctgttcctgctgctgacccagttcggcttcagaggcgccctgcccaagctgggcatctgcgccggcctgcaggtggtgctgggcctgcccttcctgctggagaaccccagcggctacctgagcagaagcttcgacctgggcagacagttcctgttccactggaccgtgaactggagattcctgcccgaggccctgttcctgcacagagccttccacctggccctgctgaccgcccacctgaccctgctgctgctgttcgccctgtgcagatggcacagaaccggcgagagcatcctgagcctgctgagagaccccagcaagagaaaggtgcccccccagcccctgacccccaaccagatcgtgagcaccctgttcaccagcaacttcatcggcatctgcttcagcagaagcctgcactaccagttctacgtgtggtacttccacaccctgccctacctgctgtgggccatgcccgccagatggctgacccacctgctgagactgctggtgctgggcctgatcgagctgagctggaacacctaccccagcaccagctgcagcagcgccgccctgcacatctgccacgccgtgatcctgctgcagctgtggctgggcccccagcccttccccaagagcacccagcacagcaagaaggcccactag

SEQ ID NO: 159267 - protein, 531 aa, Artificial Sequence
  derived and/or modified sequence
MCSLASGATGGRGAVENEEDLPELSDSGDEAAWEDEDDADLPHGKQQTPCLFCNRLFTSAEETFSHCKSEHQFNIDSMVHKHGLEFYGYIKLINFIRLKNPTVEYMNSIYNPVPWEKEEYLKPVLEDDLLLQFDVEDLYEPVSVPFSYPNGLSENTSVVEKLKHMEARALSAEAALARAREDLQKMKQFAQDFVMHTDVRTCSSSTSVIADLQEDEDGVYFSSYGHYGIHEEMLKDKIRTESYRDFIYQNPHIFKDKVVLDVGCGTGILSMFAAKAGAKKVLGVDQSEILYQAMDIIRLNKLEDTITLIKGKIEEVHLPVEKVDVIISEWMGYFLLFESMLDSVLYAKNKYLAKGGSVYPDICTISLVAVSDVNKHADRIAFWDDVYGFKMSCMKKAVIPEAVVEVLDPKTLISEPCGIKHIDCHTTSISDLEFSSDFTLKITRTSMCTAIAGYFDIYFEKNCHNRVVFSTGPQSTKTHWKQTVFLLEKPFSVKAGEALKGKVTVHKSKKDPRSLTVTLTLNNSTQTYGLQ

SEQ ID NO: 159268 - protein, 517 aa, Artificial Sequence
  derived and/or modified sequence
MCSLASGATGGRGAVENEEDLPELSDSGDEAAWEDEDDADLPHGKQQTPCLFCNRLFTSAEETFSHCKSEHQFNIDSMVHKHGLEFYGYIKLINFIRLKNPTVEYMNSIYNPVPWEKEEYLKPVLEDDLLLQFDVEDLYEPVSVPFSYPNGLSENTSVVEKLKHMEARALSAEAALARAREDLQKMKQFAQDFVMHTDVRTCSSSTSVIADLQEDEDGVYFSSYGHYGIHEEMLKDKIRTESYRDFIYQNPHIFKDKVVLDVGCGTGILSMFAAKAGAKKVLGVDQSEILYQAMDIIRLNKLEDTITLIKGKIEEVHLPVEKVDVIISEWMGYFLLFESMLDSVLYAKNKYLAKGGSVYPDICTISLVAVSDVNKHADRIAFWDDVYGFKMSCMKKAVIPEAVVEVLDPKTLISEPCGIKHIDCHTTSISDLEFSSDFTLKITRTSMCTAIAGYFDIYFEKNCHNRVVFSTGPQSTKTHWKQTVFLLEKPFSVKAGEALKGKVTVHKNKREVLIVGI

SEQ ID NO: 159269 - DNA, 1596 bp, Artificial Sequence
  derived and/or modified sequence
atgtgcagcctggccagcggcgccaccggcggcagaggcgccgtggagaacgaggaggacctgcccgagctgagcgacagcggcgacgaggccgcctgggaggacgaggacgacgccgacctgccccacggcaagcagcagaccccctgcctgttctgcaacagactgttcaccagcgccgaggagaccttcagccactgcaagagcgagcaccagttcaacatcgacagcatggtgcacaagcacggcctggagttctacggctacatcaagctgatcaacttcatcagactgaagaaccccaccgtggagtacatgaacagcatctacaaccccgtgccctgggagaaggaggagtacctgaagcccgtgctggaggacgacctgctgctgcagttcgacgtggaggacctgtacgagcccgtgagcgtgcccttcagctaccccaacggcctgagcgagaacaccagcgtggtggagaagctgaagcacatggaggccagagccctgagcgccgaggccgccctggccagagccagagaggacctgcagaagatgaagcagttcgcccaggacttcgtgatgcacaccgacgtgagaacctgcagcagcagcaccagcgtgatcgccgacctgcaggaggacgaggacggcgtgtacttcagcagctacggccactacggcatccacgaggagatgctgaaggacaagatcagaaccgagagctacagagacttcatctaccagaacccccacatcttcaaggacaaggtggtgctggacgtgggctgcggcaccggcatcctgagcatgttcgccgccaaggccggcgccaagaaggtgctgggcgtggaccagagcgagatcctgtaccaggccatggacatcatcagactgaacaagctggaggacaccatcaccctgatcaagggcaagatcgaggaggtgcacctgcccgtggagaaggtggacgtgatcatcagcgagtggatgggctacttcctgctgttcgagagcatgctggacagcgtgctgtacgccaagaacaagtacctggccaagggcggcagcgtgtaccccgacatctgcaccatcagcctggtggccgtgagcgacgtgaacaagcacgccgacagaatcgccttctgggacgacgtgtacggcttcaagatgagctgcatgaagaaggccgtgatccccgaggccgtggtggaggtgctggaccccaagaccctgatcagcgagccctgcggcatcaagcacatcgactgccacaccaccagcatcagcgacctggagttcagcagcgacttcaccctgaagatcaccagaaccagcatgtgcaccgccatcgccggctacttcgacatctacttcgagaagaactgccacaacagagtggtgttcagcaccggcccccagagcaccaagacccactggaagcagaccgtgttcctgctggagaagcccttcagcgtgaaggccggcgaggccctgaagggcaaggtgaccgtgcacaagagcaagaaggaccccagaagcctgaccgtgaccctgaccctgaacaacagcacccagacctacggcctgcagtag

SEQ ID NO: 159270 - DNA, 2530 bp, Artificial Sequence
  derived and/or modified sequence
gaagcgattgcgagccagcgcgcgcgcttcggcgttcccggcggtctgcgaagtttccggagcccgggtcccgccgcgggttcgcgcttgtgctcgcgctcgttcctggagtcggcggccgctgcgcgcgctcgttgcccaacccggtccccgcccccagacacgccgggctctcggggcaccacagccatgtgctcgttagcgtcaggcgctaccggttattcacatctgctgaagaaacattttcacactgtaagtctgagcatcagtttaatattgacagcatggttcataaacatggacttgaattttatggatacattaagctaataaattttattagacttaagaatcctacagttgagtacatgaattccatatacaacccagtgccttgggagaaagaagagtatttgaagccagtattagaagatgaccttttacttcaatttgatgtagaagatctttatgaaccggtgtcagtacccttctcataccccaatggactcagtgaaaatacatctgttgttgaaaaattgaaacatatggaagccagggcactgtctgctgaagccgcattggccagagcacgtgaggatctgcaaaaaatgaaacaatttgctcaggattttgtgatgcacacagatgtcagaacctgctcgtcatctactagtgtcattgcggacctccaggaggatgaggatggtgtttatttcagctcatacgggcattatgggatacatgaagaaatgctaaaggacaaaatacgaacagaaagctaccgagatttcatataccaaaatccacatatcttcaaagacaaggtagttttggatgttgggtgtggaactggaattctctctatgtttgctgctaaagctggggcgaagaaggttcttggagttgatcaatctgaaatactttaccaggcaatggatattataagactaaataaacttgaagatactattacactaattaaaggaaagattgaagaagttcatcttcctgtagaaaaagtagatgttatcatatctgagtggatgggctattttcttctgtttgagtctatgttagattctgtcctttatgcaaagaacaaatacttggcaaaaggaggctcggtctaccctgacatttgcactatcagccttgtagcagtgagtgatgtgaataaacatgctgatagaattgctttttgggatgatgtctatggcttcaagatgtcctgcatgaagaaagcagttattccagaagctgttgtggaagttttagatccgaagactcttatttcagaaccttgtggtattaagcatatagattgccatacgacgtctatctcagatttggaattttcatcagattttaccctgaaaatcacaaggacatccatgtgcacggcaattgctggctactttgatatatattttgagaagaattgccacaacagggtcgtgttctctacgggccctcagagcaccaaaacacactggaaacaaacagtatttctactggaaaaaccattttcagttaaagcaggtgaagccttgaaaggaaaggtcacagttcacaagagtaagaaagatccacgttctctcaccgtgaccctcacgttgaataattcaactcaaacttatggtctccagtgaaacagccataaaagcacactaccttgtagtttttaatgtgggggtagagtgggtcagcaggagggagctggttttatgtgagcagatggatggatgatggaccctttcctaatgagcctcctcaataagagagaagttctcattgtgggaatctgacatagttcagctgaggaagagaatcagctgatcctcatggtctgccacgtaatcattttcttagacgtttgctccaccagatttaaccaaatgtaactcccacattgagtttatctatattgaaaatcatttacattggcctatatttggaagagagatagtcttttgtttttaataagtttcttactataaattttaaacaaattggttagttatttggatattttattaaactagtaacacaggtactacacattttattatggactcctctgaggaggagtttttaattgtatttgctagaaaatcaggatgtaataaagatttgtataaaaaaactaaaatatggaaaagagcttcagccttcatatacaaatcatatatgcagacagcctagttgattatctagcatacttagggttctcattttgtagtttcttccctctttgtgactattccttagccttatagatttctagtactgcccaggaaatctaatttcaatacatttatcctaggtttcatgaaagtttttaaagattgggataaatatgtacttatttactaacgtattatctttttcaaaccagatttatgtgcaaaggttaaacatgtaactgttactaagcagtctataaagttgtcatttacaattactgattcaatttgaaatgtagaataaaattttaataaaatgtatcaacttataaaatattttaaaaata

SEQ ID NO: 159271 - DNA, 2653 bp, Artificial Sequence
  derived and/or modified sequence
acgtgacccgcacggcgcctcgaggccggaagcgattgcgagccagcgcgcgcgcttcggcgttcccggcggtctgcgaagtttccggagcccgggtcccgccgcgggttcgcgcttgtgctcgcgctcgttcctggagtcggcggccgctgcgcgcgctcgttgcccaacccggtccccgcccccagacacgccgggctctcggggcaccacagccatgtgctcgttagcgtcaggcgctaccggcggccggggcgctgtggagaatgaggaggacctgccagaactgtcggacagcggggacgaggccgcctgggaggatgaggacgatgcagatctcccccacggcaagcagcagaccccctgcctgttctgtaacaggttattcacatctgctgaagaaacattttcacactgtaagtctgagcatcagtttaatattgacagcatggttcataaacatggacttgaattttatggatacattaagctaataaattttattagacttaagaatcctacagttgagtacatgaattccatatacaacccagtgccttgggagaaagaagagtatttgaagccagtattagaagatgaccttttacttcaatttgatgtagaagatctttatgaaccggtgtcagtacccttctcataccccaatggactcagtgaaaatacatctgttgttgaaaaattgaaacatatggaagccagggcactgtctgctgaagccgcattggccagagcacgtgaggatctgcaaaaaatgaaacaatttgctcaggattttgtgatgcacacagatgtcagaacctgctcgtcatctactagtgtcattgcggacctccaggaggatgaggatggtgtttatttcagctcatacgggcattatgggatacatgaagaaatgctaaaggacaaaatacgaacagaaagctaccgagatttcatataccaaaatccacatatcttcaaagacaaggtagttttggatgttgggtgtggaactggaattctctctatgtttgctgctaaagctggggcgaagaaggttcttggagttgatcaatctgaaatactttaccaggcaatggatattataagactaaataaacttgaagatactattacactaattaaaggaaagattgaagaagttcatcttcctgtagaaaaagtagatgttatcatatctgagtggatgggctattttcttctgtttgagtctatgttagattctgtcctttatgcaaagaacaaatacttggcaaaaggaggctcggtctaccctgacatttgcactatcagccttgtagcagtgagtgatgtgaataaacatgctgatagaattgctttttgggatgatgtctatggcttcaagatgtcctgcatgaagaaagcagttattccagaagctgttgtggaagttttagatccgaagactcttatttcagaaccttgtggtattaagcatatagattgccatacgacgtctatctcagatttggaattttcatcagattttaccctgaaaatcacaaggacatccatgtgcacggcaattgctggctactttgatatatattttgagaagaattgccacaacagggtcgtgttctctacgggccctcagagcaccaaaacacactggaaacaaacagtatttctactggaaaaaccattttcagttaaagcaggtgaagccttgaaaggaaaggtcacagttcacaagagtaagaaagatccacgttctctcaccgtgaccctcacgttgaataattcaactcaaacttatggtctccagtgaaacagccataaaagcacactaccttgtagtttttaatgtgggggtagagtgggtcagcaggagggagctggttttatgtgagcagatggatggatgatggaccctttcctaatgagcctcctcaataagagagaagttctcattgtgggaatctgacatagttcagctgaggaagagaatcagctgatcctcatggtctgccacgtaatcattttcttagacgtttgctccaccagatttaaccaaatgtaactcccacattgagtttatctatattgaaaatcatttacattggcctatatttggaagagagatagtcttttgtttttaataagtttcttactataaattttaaacaaattggttagttatttggatattttattaaactagtaacacaggtactacacattttattatggactcctctgaggaggagtttttaattgtatttgctagaaaatcaggatgtaataaagatttgtataaaaaaactaaaatatggaaaagagcttcagccttcatatacaaatcatatatgcagacagcctagttgattatctagcatacttagggttctcattttgtagtttcttccctctttgtgactattccttagccttatagatttctagtactgcccaggaaatctaatttcaatacatttatcctaggtttcatgaaagtttttaaagattgggataaatatgtacttatttactaacgtattatctttttcaaaccagatttatgtgcaaaggttaaacatgtaactgttactaagcagtctataaagttgtcatttacaattactgattcaatttgaaatgtagaataaaa

SEQ ID NO: 159272 - DNA, 1554 bp, Artificial Sequence
  derived and/or modified sequence
atgtgcagcctggccagcggcgccaccggcggcagaggcgccgtggagaacgaggaggacctgcccgagctgagcgacagcggcgacgaggccgcctgggaggacgaggacgacgccgacctgccccacggcaagcagcagaccccctgcctgttctgcaacagactgttcaccagcgccgaggagaccttcagccactgcaagagcgagcaccagttcaacatcgacagcatggtgcacaagcacggcctggagttctacggctacatcaagctgatcaacttcatcagactgaagaaccccaccgtggagtacatgaacagcatctacaaccccgtgccctgggagaaggaggagtacctgaagcccgtgctggaggacgacctgctgctgcagttcgacgtggaggacctgtacgagcccgtgagcgtgcccttcagctaccccaacggcctgagcgagaacaccagcgtggtggagaagctgaagcacatggaggccagagccctgagcgccgaggccgccctggccagagccagagaggacctgcagaagatgaagcagttcgcccaggacttcgtgatgcacaccgacgtgagaacctgcagcagcagcaccagcgtgatcgccgacctgcaggaggacgaggacggcgtgtacttcagcagctacggccactacggcatccacgaggagatgctgaaggacaagatcagaaccgagagctacagagacttcatctaccagaacccccacatcttcaaggacaaggtggtgctggacgtgggctgcggcaccggcatcctgagcatgttcgccgccaaggccggcgccaagaaggtgctgggcgtggaccagagcgagatcctgtaccaggccatggacatcatcagactgaacaagctggaggacaccatcaccctgatcaagggcaagatcgaggaggtgcacctgcccgtggagaaggtggacgtgatcatcagcgagtggatgggctacttcctgctgttcgagagcatgctggacagcgtgctgtacgccaagaacaagtacctggccaagggcggcagcgtgtaccccgacatctgcaccatcagcctggtggccgtgagcgacgtgaacaagcacgccgacagaatcgccttctgggacgacgtgtacggcttcaagatgagctgcatgaagaaggccgtgatccccgaggccgtggtggaggtgctggaccccaagaccctgatcagcgagccctgcggcatcaagcacatcgactgccacaccaccagcatcagcgacctggagttcagcagcgacttcaccctgaagatcaccagaaccagcatgtgcaccgccatcgccggctacttcgacatctacttcgagaagaactgccacaacagagtggtgttcagcaccggcccccagagcaccaagacccactggaagcagaccgtgttcctgctggagaagcccttcagcgtgaaggccggcgaggccctgaagggcaaggtgaccgtgcacaagaacaagagagaggtgctgatcgtgggcatctag

SEQ ID NO: 159273 - DNA, 1596 bp, Artificial Sequence
  derived and/or modified sequence
atgtgctccctggcctcgggagcaacgggcggtcggggggccgtggaaaacgaggaggaccttccggaattaagcgacagcggtgacgaggcggcctgggaggatgaagatgacgcagatctgcctcacggaaagcaacagacgccttgtcttttctgtaataggttgtttactagtgcggaagagaccttcagccattgtaagagcgagcaccaattcaatatcgacagtatggtgcacaagcatgggttagagttttacggttatataaaactcattaactttattaggctcaaaaacccaactgttgagtatatgaatagtatatacaatccagtgccatgggagaaggaggaatacttaaaacccgtcttagaggatgatctgctgctgcagttcgacgtggaagatctttatgagcccgtcagcgtgcccttctcttacccaaacggcttgtcagaaaatacctctgtggttgaaaagttgaagcacatggaggcaagggcattgagtgctgaggcagccctggcccgcgctagggaagacctgcagaagatgaagcagttcgcccaggatttcgtgatgcacaccgatgttcgcacttgctcaagtagcacctcagttatcgcagacctgcaggaggatgaagatggtgtgtacttttcctcctatgggcactacgggatccacgaggagatgctcaaagacaagattagaacagaaagttaccgagactttatctatcaaaacccacacatctttaaagacaaggtggtgcttgacgtggggtgcggaaccggaatcctctcgatgttcgcagcaaaggccggcgccaagaaggtgttgggagttgatcaatccgaaatcctgtaccaggccatggatatcattagactgaataaactggaagatacgatcacgctgataaagggaaagatcgaagaggtccacctgccagttgagaaggtagacgtgatcatttccgaatggatggggtacttcctgcttttcgagtcaatgctggacagtgttctgtacgcaaaaaacaagtaccttgcgaaggggggaagcgtctatcccgacatttgtactatttccttagtagctgtgagcgatgtgaataaacacgccgacagaattgcattctgggacgacgtttatggcttcaaaatgtcctgcatgaaaaaggccgtgatccctgaggctgttgtcgaagtgctagacccaaaaaccttgatcagcgagccatgcggaatcaagcacatcgactgtcacactacctccattagcgatctggagttctcatccgacttcactctgaaaatcacacgtacttccatgtgcaccgccatagcagggtacttcgacatctattttgaaaaaaactgccacaaccgggttgttttttctactgggcctcaatcaaccaaaacacactggaagcaaactgtatttctcctggagaagcccttctccgtcaaggccggagaagccctcaaaggaaaggtaaccgtgcacaagtcaaaaaaggatccgcgttctcttaccgtgacactgaccctgaataacagtactcagacgtacggactccagtag

SEQ ID NO: 159274 - DNA, 1554 bp, Artificial Sequence
  derived and/or modified sequence
atgtgctccttggcctcaggggctactggcgggaggggggccgtggaaaacgaggaggatctcccagaactgtcggatagcggggacgaagcagcttgggaagacgaagacgacgccgacctgcctcatggaaagcaacagacaccctgcctgttttgcaaccggttattcacctcagccgaggagacattttcccactgcaagtccgagcaccagtttaacatcgattctatggtccataagcatggcctagaattctatggctacatcaagcttattaatttcatccgcctgaagaacccaaccgtggagtatatgaactctatctacaatcctgtgccctgggaaaaggaggagtatctgaaaccagtgctggaggacgacctgttgcttcagtttgatgttgaagatttatacgagcccgtgagtgtgccttttagctatccaaacggcttatctgagaacacgagcgtcgtggagaagcttaagcatatggaggcaagagcgctttcagcggaggctgctctggccagagcccgggaagacctgcagaaaatgaagcagttcgcgcaggactttgttatgcataccgacgtacgtacgtgctcctcttctacatcagtgatcgctgacctgcaggaggatgaggacggagtctacttctcctcctatggccattatggcatccacgaggaaatgctgaaggacaagataaggaccgaaagctatcgagattttatctatcagaatcctcatattttcaaggataaagtggttctggacgtgggttgcggaaccgggattctcagtatgttcgccgccaaggcaggggcaaagaaagtcctgggcgtggatcagtcagagatcctctatcaggccatggatattattagactcaacaaactggaggacacgattacactgatcaagggtaagatcgaagaagttcatctgcccgtggagaaggttgacgtgattattagcgaatggatggggtactttctacttttcgaatcgatgctggatagcgtgctctacgcgaagaacaagtacctcgcgaaaggcggatctgtatatccagacatatgtactatcagcttggtcgccgtttccgacgtgaataagcacgcagatcgtatcgcattctgggacgacgtctacgggttcaagatgtcctgtatgaagaaagccgttatccctgaggccgtagtggaggtccttgatcccaagacactgatctctgagccctgtgggataaaacatattgactgccataccacaagtatatcagacctggagttctcctctgacttcacattaaagatcactcgcacatcaatgtgtaccgcaatcgccggttacttcgatatttatttcgaaaaaaattgccataatcgggtagtattctctaccgggccgcagagtactaagacccactggaagcagacagtcttcctgttggagaaacccttcagtgttaaggctggggaagcactgaaggggaaggtgaccgtgcacaaaaataaaagagaggtgctgatcgtgggtatttag

SEQ ID NO: 159275 - DNA, 1596 bp, Artificial Sequence
  derived and/or modified sequence
atgtgcagcctggccagcggggccactggaggccgcggggctgtggagaatgaggaggacctgcctgagctgagtgacagcggagatgaagctgcctgggaggatgaagatgatgctgacctgccccacggcaagcagcagaccccctgcctcttctgcaacagactcttcaccagcgctgaggagaccttcagccactgcaagtctgagcaccagttcaacatcgacagcatggtgcacaagcacggcctggagttctacggctacatcaagctgatcaacttcatccggctgaagaaccccaccgtggagtacatgaacagcatctacaaccctgtgccctgggagaaggaggagtacctgaagcctgtgctggaggatgacctgctgctgcagtttgatgtggaggacctgtatgagcctgtgtctgtgcccttctcctaccccaacggcctgtctgagaacacctctgtggtggagaagctgaagcacatggaggcccgggccctgtctgctgaggccgccctggcccgggcccgggaggacctgcagaagatgaagcagtttgcccaggactttgtgatgcacacagatgtgaggacctgcagcagcagcacctctgtgattgctgacctgcaggaggatgaagatggagtgtacttcagcagctatggccactacggcatccacgaggagatgctgaaggacaagatcagaacagagagctacagagacttcatctaccagaacccccacatcttcaaggacaaggtggtgctggatgtgggctgcggcaccggcatcctgtccatgtttgctgccaaggccggggccaagaaggtgctgggcgtggaccagagcgagatcctgtaccaggccatggacatcatccggctgaacaagctggaggacaccatcaccctcatcaagggcaagattgaggaggtgcacctgcctgtggagaaggtggatgtgatcatcagcgagtggatgggctacttcctgctgtttgagagcatgctggacagcgtgctgtatgccaagaacaagtacctggccaagggcggctctgtgtacccagacatctgcaccatcagcctggtggccgtgtctgatgtgaacaagcatgctgaccgcatcgccttctgggatgatgtgtatggcttcaagatgagctgcatgaagaaggctgtgattcctgaggccgtggtggaggtgctggaccccaagaccctcatcagcgagccctgtggcatcaagcacatcgactgccacaccaccagcatcagtgacctggagttcagcagtgacttcaccctgaagatcaccaggacctccatgtgcacagccatcgccggctactttgacatctactttgagaagaactgccacaacagagtggtgttcagcacaggcccccagagcaccaagacccactggaagcagacagtgttcctgctggagaagcccttctctgtgaaggccggggaggccctgaagggcaaggtgacagtgcacaagagcaagaaggaccccaggagcctgactgtgaccctgaccctgaacaacagcacccagacctacggcctgcagtag

SEQ ID NO: 159276 - DNA, 1554 bp, Artificial Sequence
  derived and/or modified sequence
atgtgcagcctggccagcggggccactggaggccgcggggctgtggagaatgaggaggacctgcctgagctgagtgacagcggagatgaagctgcctgggaggatgaagatgatgctgacctgccccacggcaagcagcagaccccctgcctcttctgcaacagactcttcaccagcgctgaggagaccttcagccactgcaagtctgagcaccagttcaacatcgacagcatggtgcacaagcacggcctggagttctacggctacatcaagctgatcaacttcatccggctgaagaaccccaccgtggagtacatgaacagcatctacaaccctgtgccctgggagaaggaggagtacctgaagcctgtgctggaggatgacctgctgctgcagtttgatgtggaggacctgtatgagcctgtgtctgtgcccttctcctaccccaacggcctgtctgagaacacctctgtggtggagaagctgaagcacatggaggcccgggccctgtctgctgaggccgccctggcccgggcccgggaggacctgcagaagatgaagcagtttgcccaggactttgtgatgcacacagatgtgaggacctgcagcagcagcacctctgtgattgctgacctgcaggaggatgaagatggagtgtacttcagcagctatggccactacggcatccacgaggagatgctgaaggacaagatcagaacagagagctacagagacttcatctaccagaacccccacatcttcaaggacaaggtggtgctggatgtgggctgcggcaccggcatcctgtccatgtttgctgccaaggccggggccaagaaggtgctgggcgtggaccagagcgagatcctgtaccaggccatggacatcatccggctgaacaagctggaggacaccatcaccctcatcaagggcaagattgaggaggtgcacctgcctgtggagaaggtggatgtgatcatcagcgagtggatgggctacttcctgctgtttgagagcatgctggacagcgtgctgtatgccaagaacaagtacctggccaagggcggctctgtgtacccagacatctgcaccatcagcctggtggccgtgtctgatgtgaacaagcatgctgaccgcatcgccttctgggatgatgtgtatggcttcaagatgagctgcatgaagaaggctgtgattcctgaggccgtggtggaggtgctggaccccaagaccctcatcagcgagccctgtggcatcaagcacatcgactgccacaccaccagcatcagtgacctggagttcagcagtgacttcaccctgaagatcaccaggacctccatgtgcacagccatcgccggctactttgacatctactttgagaagaactgccacaacagagtggtgttcagcacaggcccccagagcaccaagacccactggaagcagacagtgttcctgctggagaagcccttctctgtgaaggccggggaggccctgaagggcaaggtgacagtgcacaagaacaagcgggaggtgctgattgtgggcatctag

SEQ ID NO: 159277 - DNA, 1596 bp, Artificial Sequence
  derived and/or modified sequence
atgtgcagcctggccagcggcgccaccggcggccggggcgccgtggagaacgaggaggacctgcctgagctaagtgatagtggggatgaggcggcatgggaggatgaagacgacgccgacctgcctcatggcaaacagcaaaccccttgcttgttttgtaatcgtcttttcacctcagccgaagagacttttagccattgcaaaagtgaacaccagttcaacatcgactccatggttcacaagcatggattagaattctacggctatataaagctgattaattttatccgcctgaaaaatccaaccgttgagtacatgaatagcatatataacccagtcccgtgggaaaaagaggaatatttgaaacccgtgctcgaggatgatctcctgctccaatttgacgtggaggacctctacgagccagtcagcgtgccttttagttaccccaatggcctgtcagaaaacacttctgtggtggaaaaactcaaacatatggaggcccgggcattgagcgccgaggcagctctggctcgcgcgcgagaggacctccagaaaatgaagcagtttgcccaggacttcgtcatgcacaccgatgtccgtacttgcagttcgtcaacttccgtgattgctgatttacaagaagatgaggatggtgtgtattttagttcatatgggcactatggcattcatgaggaaatgctcaaggataagatccgaactgagtcatatagagactttatttatcaaaacccacacatctttaaagacaaagtcgttcttgacgtgggatgcggaactggtatactgtccatgttcgccgccaaggccggcgccaagaaggtgctaggcgtggaccaatccgagattctatatcaggcaatggacatcatacggttgaacaagctcgaagataccattactctcataaagggaaagatcgaagaggtgcacttgccagtcgagaaggtagacgtgattatttccgaatggatgggctactttctgctctttgaaagtatgctggattcagtcctgtatgccaaaaataagtacctcgctaagggcggctctgtttatccggacatctgcaccattagccttgtggcagtgagcgacgttaataaacatgctgacaggatcgctttttgggatgatgtctacgggtttaagatgtcatgcatgaaaaaagctgtcatccccgaggcagtggtagaggtgctggacccaaagacccttatttcagagccttgcggtattaagcatattgattgccatactactagtattagcgatttggaattcagcagcgatttcactcttaagatcactagaacttctatgtgcaccgctatcgcaggctacttcgatatttacttcgagaaaaactgccataaccgggtggtgtttagcacaggccctcagtccacgaaaacccattggaaacagactgtgttcctgctggaaaaacccttcagcgtcaaagctggcgaagccctgaaaggaaaagtgacggtgcataagtccaaaaaggatcccagatcactaaccgttacactcacgcttaacaatagcacccaaacctatggactacaatag

SEQ ID NO: 159278 - DNA, 1554 bp, Artificial Sequence
  derived and/or modified sequence
atgtgcagcctggccagcggcgccaccggcggccggggcgccgtggagaatgaagaggaccttccagaactaagtgatagcggcgatgaggctgcctgggaagacgaagatgacgctgatctgcctcacgggaagcagcagaccccctgcttattctgtaaccggctgttcacgtcagctgaagagacattcagtcattgcaagagcgagcaccagtttaacatagactccatggtacataagcacggactggaattctatggctacattaagctcattaattttatccgcctcaagaaccccactgtcgagtatatgaatagtatttataaccctgtgccttgggaaaaagaagagtatctcaagcctgtcttggaggatgatctcctcttgcaattcgatgtggaggacctctatgagcccgtgtccgtcccattctcctaccccaacggcctctccgaaaacacctccgtcgttgagaagctcaagcacatggaggcgagggcactcagtgctgaagccgctttggcaagagcaagagaggatctgcaaaagatgaaacagttcgcccaagacttcgttatgcacaccgacgttcgcacctgctccagttcaactagcgttatagccgatttacaggaagatgaagacggagtgtatttttcctcatatggacactatggaattcacgaagaaatgctgaaggacaagatcaggactgagtcctacagggatttcatttatcagaacccacacatcttcaaagataaagtggtactggatgtgggctgcggcaccggcatactttccatgttcgccgcaaaggccggcgccaaaaaagttctgggggtagaccaaagcgagatactgtaccaggcaatggacatcatcaggttaaataaactggaagatactattactctgatcaaaggcaaaattgaggaagtgcatctgcccgtggaaaaggtggacgttataatcagcgagtggatgggatacttccttctgttcgagtcaatgctcgacagcgtgttgtacgccaagaacaagtatctggccaagggcggatcggtatatcccgacatctgtaccattagtctcgtggctgtgagcgatgtgaacaaacacgccgatcggatcgccttttgggacgatgtttatggttttaagatgtcctgtatgaagaaggccgtaatcccagaagctgtcgtagaggtgttagaccccaagacactaatttccgagccttgcggtattaaacatatcgactgtcatactacttccattagcgatctggagtttagctcagattttactctgaagattactaggacttctatgtgcacagctatcgccgggtactttgacatttacttcgagaagaactgccataaccgcgtcgtgttttccaccggaccccagtccactaagacacattggaaacagacagtcttccttttggagaagcctttctcagtgaaggccggggaggctctgaagggtaaagtgaccgttcataagaacaaacgggaagtccttattgtgggcatttag

SEQ ID NO: 159279 - DNA, 1596 bp, Artificial Sequence
  derived and/or modified sequence
atgtgtagtctggcgagtggcgcaactggcggacggggtgccgtggagaacgaggaggacctgcctgagctgtctgactcaggcgatgaagccgcatgggaggatgaggacgatgcggacttacctcacggcaagcaacagaccccatgcttgttttgcaatagactttttacgagcgccgaggaaacattttcccattgcaaatccgagcatcagttcaacatcgacagtatggtccataaacacggcctcgaattttatggctacatcaaactaatcaacttcattcggttaaaaaatcctactgtcgagtatatgaattccatttataatcctgtgccctgggagaaggaagaatacctcaaacccgtgttggaggacgatctgctgctgcagttcgacgtagaagacctgtacgaacctgttagtgtcccattttcataccctaatggcctgagcgaaaatacatccgtcgtggaaaaactcaagcatatggaagcacgagccctgtccgccgaggcagctctggcgagggcccgagaggatttgcagaagatgaaacaatttgctcaggattttgtcatgcataccgatgtccgcacctgtagctctagcacctctgtcatagcagacttgcaggaagatgaagatggcgtttacttttcttcctacgggcactatggcattcacgaggagatgttgaaggataagatccgcactgagtcatatagagatttcatttaccagaaccctcatatcttcaaagataaggtagtgttagatgtgggatgcgggacaggtattttaagtatgttcgcggcaaaggcaggtgccaaaaaagtcctgggagtggaccagtctgaaattctgtatcaggccatggatatcatccgattgaacaagctggaggacacaatcacgctgataaaggggaagatcgaagaagttcacctgccggttgaaaaggtggacgtcatcataagcgagtggatgggttactttcttctcttcgagagcatgctcgattctgtgctgtacgccaagaataaatacttggccaaaggtgggagtgtctatccggacatttgtactatatcactagtagccgtcagcgatgtcaacaaacacgcagatcgcatagccttttgggacgatgtgtatggattcaagatgtcatgcatgaaaaaggctgtcatcccagaggccgtcgtggaggtgttagacccgaagacacttattagcgaaccatgtgggatcaaacatattgattgccataccacatccatcagcgacctcgagtttagtagcgacttcactttgaaaatcaccagaacttcaatgtgtactgccattgcgggatattttgatatttacttcgagaaaaattgtcacaacagagttgtgttcagcacaggaccacagagtactaaaacacattggaaacagacagtgtttctgctggaaaaacccttctctgtgaaggcaggagaagccctcaagggtaaggtgaccgtacacaagagtaaaaaagatcctcgttccctgaccgtcacgctgacactgaacaattctactcagacctacggcttgcaatag

SEQ ID NO: 159280 - DNA, 1554 bp, Artificial Sequence
  derived and/or modified sequence
atgtgctccctggcgtccggggcaactggtgggagaggggctgtggagaacgaggaggacctgcccgagctgtcggactccggggatgaggcggcttgggaagatgaggatgatgctgacctgccacacggaaagcaacagaccccttgcttgttctgtaacaggctgtttacttcagcagaagagactttctcccactgtaagtcagaacaccagtttaatatcgactcaatggttcacaaacacggactggagttctacgggtatataaagctgattaatttcattcggctcaaaaatcccacagtggagtacatgaacagtatctataacccagtaccttgggagaaagaggagtatcttaaaccagtccttgaggacgatctgctgcttcaatttgacgtggaggacctctacgagcctgtgtcagtccctttctcatacccaaacggattgtcagaaaatacctccgtggtcgagaaattaaaacacatggaggcaagagctctctcagctgaagctgccctggctagagcccgagaagatctgcagaaaatgaagcaattcgctcaggatttcgtgatgcacaccgacgtacgaacctgttcaagctcaacaagcgtgatagccgaccttcaggaggacgaagacggagtgtattttagctcctatggtcactacggcattcacgaagagatgctaaaagacaagattagaactgaatcttacagagattttatctaccagaacccccacattttcaaggataaggttgtcctggatgtgggctgcggaaccgggatcctttctatgttcgcggcaaaagccggagctaagaaagtgctgggggttgaccaatctgaaatcttgtaccaggctatggacattattcgactgaacaagctcgaagataccataacactgatcaagggtaaaatcgaagaggtacacttacccgtcgagaaggtggacgtcattatctccgagtggatggggtatttcctcctatttgaatccatgctcgatagcgtgctctatgcaaaaaataaatatttggccaagggagggtcagtctacccggacatttgtacgattagtttagtcgcagtcagtgacgtgaataagcacgccgataggattgccttttgggacgacgtctatggatttaagatgtcttgcatgaagaaggctgtgattccagaggccgtggtcgaagtcctcgacccgaagacattgatttccgagccttgtggcattaaacacattgattgccatacgacgtcaatctccgacttggaattctctagcgattttactcttaagatcacacgcacttcaatgtgcacggctatagccggatatttcgacatctactttgagaagaattgtcacaatcgcgtcgtattctctactggaccacaatctactaagactcattggaaacagacagtttttttattggaaaagccttttagtgtgaaggctggggaagccctgaaggggaaagtgacggtccacaaaaataaacgtgaagttctcatcgtcggcatctag

SEQ ID NO: 159281 - DNA, 1701 bp, Artificial Sequence
  derived and/or modified sequence
aacccggtccccgcccccagacacgccgggctctcggggcaccacagccatgtgctcgttagcgtcaggcgctaccggcggccggggcgctgtggagaatgaggaggacctgccagaactgtcggacagcggggacgaggccgcctgggaggatgaggacgatgcagatctcccccacggcaagcagcagaccccctgcctgttctgtaacaggttattcacatctgctgaagaaacattttcacactgtaagtctgagcatcagtttaatattgacagcatggttcataaacatggacttgaattttatggatacattaagctaataaattttattagacttaagaatcctacagttgagtacatgaattccatatacaacccagtgccttgggagaaagaagagtatttgaagccagtattagaagatgaccttttacttcaatttgatgtagaagatctttatgaaccggtgtcagtacccttctcataccccaatggactcagtgaaaatacatctgttgttgaaaaattgaaacatatggaagccagggcactgtctgctgaagccgcattggccagagcacgtgaggatctgcaaaaaatgaaacaatttgctcaggattttgtgatgcacacagatgtcagaacctgctcgtcatctactagtgtcattgcggacctccaggaggatgaggatggtgtttatttcagctcatacgggcattatgggatacatgaagaaatgctaaaggacaaaatacgaacagaaagctaccgagatttcatataccaaaatccacatatcttcaaagacaaggtagttttggatgttgggtgtggaactggaattctctctatgtttgctgctaaagctggggcgaagaaggttcttggagttgatcaatctgaaatactttaccaggcaatggatattataagactaaataaacttgaagatactattacactaattaaaggaaagattgaagaagttcatcttcctgtagaaaaagtagatgttatcatatctgagtggatgggctattttcttctgtttgagtctatgttagattctgtcctttatgcaaagaacaaatacttggcaaaaggaggctcggtctaccctgacatttgcactatcagccttgtagcagtgagtgatgtgaataaacatgctgatagaattgctttttgggatgatgtctatggcttcaagatgtcctgcatgaagaaagcagttattccagaagctgttgtggaagttttagatccgaagactcttatttcagaaccttgtggtattaagcatatagattgccatacgacgtctatctcagatttggaattttcatcagattttaccctgaaaatcacaaggacatccatgtgcacggcaattgctggctactttgatatatattttgagaagaattgccacaacagggtcgtgttctctacgggccctcagagcaccaaaacacactggaaacaaacagtatttctactggaaaaaccattttcagttaaagcaggtgaagccttgaaaggaaaggtcacagttcacaagaataagagagaagttctcattgtgggaatctgacatagttcagctgaggaagagaatcagctgatcctcatggtctgccacgtaatcattttcttagacgtttgctccaccagatttaaccaaatgtaact

SEQ ID NO: 159282 - protein, 254 aa, Artificial Sequence
  derived and/or modified sequence
MASLLKVDQEVKLKVDSFRERITSEAEDLVANFFPKKLLELDSFLKEPILNIHDLTQIHSDMNLPVPDPILLTNSHDGLDGPTYKKRRLDECEEAFQGTKVFVMPNGMLKSNQQLVDIIEKVKPEIRLLIEKCNTVKMWVQLLIPRIEDGNNFGVSIQEETVAELRTVESEAASYLDQISRYYITRAKLVSKIAKYPHVEDYRRTVTEIDEKEYISLRLIISELRNQYVTLHDMILKNIEKIKRPRSSNAETLY

SEQ ID NO: 159283 - protein, 130 aa, Artificial Sequence
  derived and/or modified sequence
MASLLKVDQEVKLKVDSFRERITSEAEDLVANFFPKKLLELDSFLKEPILNIHDLTQIHSDMNLPVPDPILLTNSHDGLDGPTYKKRRLDECEEAFQGQNVGTAPDSQDRRWKQLWGVHSGGNSCRAKNC

SEQ ID NO: 159284 - protein, 193 aa, Artificial Sequence
  derived and/or modified sequence
MNLPVPDPILLTNSHDGLDGPTYKKRRLDECEEAFQGTKVFVMPNGMLKSNQQLVDIIEKVKPEIRLLIEKCNTVKMWVQLLIPRIEDGNNFGVSIQEETVAELRTVESEAASYLDQISRYYITRAKLVSKIAKYPHVEDYRRTVTEIDEKEYISLRLIISELRNQYVTLHDMILKNIEKIKRPRSSNAETLY

SEQ ID NO: 159285 - DNA, 765 bp, Artificial Sequence
  derived and/or modified sequence
atggcctcgcttttgaaagtcgaccaggaggtgaaacttaaagttgatagcttcagggaacgtatcactagcgaagctgaggatctggtggcaaactttttccctaaaaagcttctagagttagacagcttcctcaaggaacccatcctcaacattcatgatcttacccagattcactctgacatgaatctgcctgtgcctgacccaatccttctgacaaacagccatgatgggttggatggccccacttacaagaagcgacgacttgacgaatgcgaagaagcatttcaggggactaaagtgttcgtcatgccaaacggcatgctgaagtctaaccagcagctggtggatatcatagagaaagttaaacccgagatacggctcctgatagaaaaatgcaacaccgtgaagatgtgggtgcagctcctaattccaagaatcgaggacgggaacaactttggcgtttccatccaagaggagaccgtggcggaactgaggaccgtggagagcgaagctgcctcgtacctggaccagatcagtaggtactacatcacaagagctaaattagttagtaaaatagcaaagtacccccacgtggaagattatcgtaggactgtgaccgagatcgacgagaaggagtatataagtctgaggcttattatcagcgaattacgaaaccagtatgtgactttacacgacatgatcctgaagaatattgagaagataaagaggcccagatcatctaacgccgagacactctattag

SEQ ID NO: 159286 - DNA, 765 bp, Artificial Sequence
  derived and/or modified sequence
atggcctcacttctgaaagtcgaccaggaggtgaagctaaaggttgattcctttcgggaaagaatcacatctgaggccgaagatctagtggccaacttctttcctaagaagctgctcgaacttgatagctttctcaaggagccaattctaaatattcatgatctgacccagatccactcggacatgaatctgcccgtacccgatccaattcttttgaccaactctcatgatgggttagatggccctacatataagaagagaagattagatgagtgcgaagaggcatttcagggtacgaaagtgtttgtgatgcccaacgggatgttaaagagtaaccaacaactcgtcgacatcatcgagaaggtcaagcccgaaatccggctactcatcgaaaaatgcaacactgtcaaaatgtgggtacagctcttgattccccggattgaggatggcaataatttcggagtttccatccaggaggaaacagtggcagaactcaggacagttgagtccgaggccgcaagctatctcgaccagatatctagatactatatcacacgggcgaaattggtgagtaagattgccaaatatccacacgtcgaagactaccgtagaactgtcaccgagatcgatgaaaaggagtatatctcattacggctgatcatctcggagctccggaatcagtatgtcacactgcacgacatgatcttgaagaatattgagaaaatcaagcgacccagatcgagtaatgctgaaactctgtattag

SEQ ID NO: 159287 - DNA, 393 bp, Artificial Sequence
  derived and/or modified sequence
atggccagcctgttgaaagtggatcaagaggtgaaactgaaggtggactcattccgagaaagaattactagcgaagccgaagacttagtcgccaatttcttcccaaaaaagctgcttgagctggacagttttttgaaagagcccatcctgaacatacacgaccttacccagattcacagtgatatgaatctaccagttccagacccaatcttgctgaccaactctcatgatggtctggatgggcccacatataaaaaaagacgactggacgaatgcgaggaagctttccaaggccagaacgttggcacagcccccgactcccaggatcgtaggtggaaacagctctggggggtgcactccggcggcaatagttgccgtgccaaaaactgttag

SEQ ID NO: 159288 - DNA, 765 bp, Artificial Sequence
  derived and/or modified sequence
atggccagcctgctgaaggtggaccaggaggtgaagctgaaggtggacagcttccgggagcgcatcaccagcgaggccgaggacctggtggccaacttcttccccaagaagctgctggagctggacagcttcctgaaggagcccatcctgaacatccatgacctgacccagatccacagcgacatgaacctgcctgtgcctgaccccatcctgctgaccaacagccatgatggcctggatggccccacctacaagaagaggcggctggatgaatgtgaggaggccttccagggcaccaaggtgtttgtgatgcccaacggcatgctgaagagcaaccagcagctggtggacatcatcgagaaggtgaagccagagatccggctgctgattgagaagtgcaacacagtgaagatgtgggtgcagctgctgatccccagaattgaagatggcaacaactttggagtgtccatccaggaggagaccgtggccgagctgaggacagtggagagcgaggccgccagctacctggaccagatcagccgctactacatcacccgggccaagctggtgtccaagatcgccaagtacccccacgtggaggactacagaagaacagtgacagaaattgatgagaaggagtacatcagcctgcggctcatcatcagcgagctgaggaaccagtatgtgaccctgcatgacatgatcctgaagaacatcgagaagatcaagaggcccaggagcagcaatgctgagaccctgtactag

SEQ ID NO: 159289 - DNA, 393 bp, Artificial Sequence
  derived and/or modified sequence
atggccagcctgctgaaggtggaccaggaggtgaagctgaaggtggacagcttccgggagcgcatcaccagcgaggccgaggacctggtggccaacttcttccccaagaagctgctggagctggacagcttcctgaaggagcccatcctgaacatccatgacctgacccagatccacagcgacatgaacctgcctgtgcctgaccccatcctgctgaccaacagccatgatggcctggatggccccacctacaagaagaggcggctggatgaatgtgaggaggccttccagggccagaatgtgggcacagccccagacagccaggaccggcgctggaagcagctgtggggcgtgcacagcggcggcaacagctgccgggccaagaactgctag

SEQ ID NO: 159290 - DNA, 765 bp, Artificial Sequence
  derived and/or modified sequence
atggccagcctgctgaaggtggaccaggaggtgaagctgaaggtggacagtttccgagaaagaatcacctcggaggctgaagatctcgtggctaatttctttcccaagaaattgctggagttggacagttttttaaaggagcccatcctcaacatacacgacctcacccagattcattcggacatgaatctccccgtccccgatcccatactgctgactaactctcacgacggcctcgacggacctacatataagaagagacgcctcgatgagtgtgaggaagcattccaggggacaaaggtgttcgtcatgccgaatgggatgctaaagtcgaaccagcagttggtggatatcattgaaaaagtcaagcctgaaatcaggctgcttatcgaaaagtgcaatactgtcaagatgtgggtgcaactactgatcccccgtattgaggacggcaacaacttcggagtctccatacaggaggaaacggtcgccgagctgagaaccgttgagtctgaagccgcgtcctaccttgaccaaatcagtcggtactacattactcgagcgaagctggtgagcaaaatcgctaaatacccccacgtcgaggattacaggaggacagtgacagaaatcgatgaaaaggaatacatatctctgcgacttattatcagcgaactacggaaccaatatgtcaccctgcatgatatgatcctgaagaatatcgagaaaatcaagcgccccagaagctccaacgctgagaccctatactag

SEQ ID NO: 159291 - DNA, 765 bp, Artificial Sequence
  derived and/or modified sequence
atggccagcctgctgaaggtggaccaggaggtgaagctgaaggtggattccttccgggagagaataacgtcagaagctgaggatctggtcgcaaacttcttcccgaagaagttgcttgagctcgactcctttctcaaagagcccatcctcaatatccacgacctgacacagatccactccgatatgaacttaccggtccctgatccgatattgctcaccaatagccacgatggcctcgacggccccacttataaaaagcgccgcctggatgagtgcgaagaggcattccaggggaccaaggtcttcgtgatgccaaacggaatgctgaaaagcaatcaacagctggtggacattatcgagaaggttaagcccgaaatacgcctcctgatcgaaaaatgcaatacagtcaagatgtgggtgcagctgcttatcccccgtatcgaggacggcaataatttcggggtcagcatccaggaagaaaccgtggccgagctcagaacagtggaatcggaagccgcttcatatttggaccaaatctctcgctactatatcaccagggcgaagctggtgagtaaaatagctaaatatccccacgtggaggactataggcgaacagtgacagagattgacgaaaaagagtacatatcccttcggctgataatctctgagctgcgaaaccagtacgtcacccttcacgatatgatcctgaaaaacatagagaagatcaaacgaccccgatctagcaacgcagagactctgtattag

SEQ ID NO: 159292 - DNA, 393 bp, Artificial Sequence
  derived and/or modified sequence
atggccagcctgctgaaggtggaccaggaggtgaagctgaaggtggacagctttcgcgaaaggattacgagcgaagccgaggatctagtcgccaacttctttcctaagaaactgttggagctcgacagcttcctgaaggaaccaattctcaatattcatgacctgacacagatccattccgacatgaacctgcccgtgcccgatccgatattactgactaattcacatgatggactggatggacctacttataagaagcgcaggctggatgagtgcgaggaagccttccagggtcagaacgttggtacggcacctgatagccaagacagaaggtggaaacagctttggggagtgcatagcggggggaacagttgtagggctaagaactgttag

SEQ ID NO: 159293 - DNA, 765 bp, Artificial Sequence
  derived and/or modified sequence
atggcctccctcctgaaagtggatcaggaagttaaactgaaggttgatagttttcgggagagaatcaccagcgaggctgaggacctggtagctaattttttccctaagaaattactggagttagatagtttccttaaggaacccattctcaacattcatgacctgactcagattcactctgatatgaatttgccggtcccggaccctatcctgttgaccaactcacacgacggattggatggccctacatataagaaacgtcgactggatgagtgtgaggaggcattccagggcaccaaagtctttgtgatgcctaacggcatgctgaaaagcaatcagcaactcgtggatataattgagaaggtgaagcctgagatccgtcttctaatcgagaaatgtaatactgtcaaaatgtgggtccagctgctgatcccgagaatcgaagacggcaataacttcggcgtatccattcaggaggaaacagtggccgagctgaggactgtcgaatctgaagccgcaagctatctggatcagatcagccgttactacatcacaagggcaaagttagtgtctaagatagcaaaatacccacacgtggaagattatcgacgaaccgttacagaaatcgacgaaaaggaatacatttctctgcggctcatcatcagtgagttgaggaaccagtatgtcaccctccatgacatgatcctcaaaaacatcgagaaaatcaagcggcctcggtccagcaacgctgaaaccctttactag

SEQ ID NO: 159294 - DNA, 765 bp, Artificial Sequence
  derived and/or modified sequence
atggctagtctgcttaaagtagaccaggaggtaaagttaaaagtggatagcttccgcgaacgtattacttccgaagcagaggatctggtggccaatttctttccaaaaaaactcctggaacttgattcctttctgaaagagcctatcctgaacatacatgatttaacccagatccatagtgacatgaatttaccagtgcccgatcctattttgttgacgaattcgcacgatggcctggacggcccaacttacaagaaaagacggctggacgagtgcgaagaggctttccaggggaccaaggtttttgtcatgcctaatgggatgcttaagagcaatcagcagttggttgatatcatcgaaaaagtcaagccagagatccgtcttctcattgagaagtgcaatacagtcaagatgtgggtgcagctgctcatcccacggatcgaggacggcaacaacttcggagtgtccatacaggaagagaccgtagcggagctgcgcaccgttgaatccgaagccgcttcttaccttgaccagatctcgaggtactatattacacgcgcaaagttggtgtctaagattgcgaaataccctcacgtggaggactatcgccgaaccgtgacagaaatcgacgagaaagagtacatcagcttgcgactgattatcagcgagctgagaaatcaatatgtcaccctgcatgacatgatccttaagaatattgagaagatcaaaaggccacggtcttccaatgccgaaactctgtactag

SEQ ID NO: 159295 - DNA, 393 bp, Artificial Sequence
  derived and/or modified sequence
atggcatccctgctgaaggtggaccaggaggtaaagctgaaagtagattcttttagggagcgtatcacctcggaggccgaagatctcgtggcgaacttctttccaaaaaaactgctggagctggactcctttctcaaagaaccaattcttaatatccatgacttgacacagatccactccgacatgaacctccctgttcctgatccaatactacttacgaatagccatgacggactggacggacccacatataagaaaagacggctggatgaatgcgaggaggcatttcagggacaaaatgtgggaactgcacctgattcccaggacaggaggtggaagcagctgtggggcgtgcactcagggggaaactcgtgtagggctaaaaattgttag

SEQ ID NO: 159296 - DNA, 998 bp, Artificial Sequence
  derived and/or modified sequence
agtttccggcgtgagcggcgaaagccgggagggcgagcgagagagcaagcaggcagcaggctgccggcgggcgggcggacggcacagagggagggagcgagcgagcagtgagtaagccagcaagggcggtcgggtcccgaggtcagccgagatttctcaggtccctccggccccctccctggagtccacagcgcctccggtgtccagaggatcggacacggcccggcccggccatggcctcgttgctgaaggtggatcaggaagtgaagctcaaggttgattctttcagggagcggatcacaagtgaggcagaagacttggtggcaaattttttcccaaagaagttattagaacttgatagttttctgaaggaaccaatcttaaacatccatgacctaactcagatccactctgacatgaatctcccagtccctgaccccattcttctcaccaatagccatgatggactggatggtcccacttataagaagcgaaggttggatgagtgtgaagaagccttccaaggaaccaaggtgtttgtgatgcccaatgggatgctgaaaagcaaccagcagctggtggacattattgagaaagtgaaacctgagatccggctgttgattgagaaatgtaacacggtcaaaatgtgggtacagctcctgattcccaggatagaagatggaaacaactttggggtgtccattcaggaggaaacagttgcagagctaagaactgttgagagtgaagctgcatcttatctggaccagatttctagatattatattacaagagccaaattggtttctaaaatagctaaatatccccatgtggaggactatcgccgcaccgtgacagagattgatgagaaagaatatatcagccttcggctcatcatatcagagctgaggaatcaatatgtcactctacatgacatgatcctgaaaaatatcgagaagatcaaacggccccggagcagcaatgcagagactctgtactga

SEQ ID NO: 159297 - DNA, 3171 bp, Artificial Sequence
  derived and/or modified sequence
ggcgtgagcggcgaaagccgggagggcgagcgagagagcaagcaggcagcaggctgccggcgggcgggcggacggcacagagggagggagcgagcgagcagtgagtaagccagcaagggcggtcgggtcccgaggtcagccgagatttctcaggtccctccggccccctccctggagtccacagcgcctccggtgtccagaggatcggacacggcccggcccggccatggcctcgttgctgaaggtggatcaggaagtgaagctcaaggttgattctttcagggagcggatcacaagtgaggcagaagacttggtggcaaattttttcccaaagaagttattagaacttgatagttttctgaaggaaccaatcttaaacatccatgacctaactcagatccactctgacatgaatctcccagtccctgaccccattcttctcaccaatagccatgatggactggatggtcccacttataagaagcgaaggttggatgagtgtgaagaagccttccaaggaaccaaggtgtttgtgatgcccaatgggatgctgaaaagcaaccagcagctggtggacattattgagaaagtgaaacctgagatccggctgttgattgagaaatgtaacacggtcaaaatgtgggtacagctcctgattcccaggatagaagatggaaacaactttggggtgtccattcaggaggaaacagttgcagagctaagaactgttgagagtgaagctgcatcttatctggaccagatttctagatattatattacaagagccaaattggtttctaaaatagctaaatatccccatgtggaggactatcgccgcaccgtgacagagattgatgagaaagaatatatcagccttcggctcatcatatcagagctgaggaatcaatatgtcactctacatgacatgatcctgaaaaatatcgagaagatcaaacggccccggagcagcaatgcagagactctgtactgaggccagggccagggccaggggactctgtgagtctggctcaagaccgacattgccttggtttgttacatgactatcgtgatggggaaactggctggaaatagtaatcacacctctctgtttttagttagagtctaatgaaactctcatctagttctgtgatgtgtttacctcttttttcaggcctcaggaactcttctatttccttccctaataccccacacccaacctgtcgtaatttctggagaactccaggtttgtgtgtgcaggatgttggcacaaaaatacctgtgttttcattctccccctctctccctcctgtgtcttgcgctttatgttttcttccgtttgataattagttggttaaaagctgagggaaccggaaggaaagtgctaggtgttttttaggaactagggtggcggggggacgaacttctcttcctcacatgaggttactgtttctttcctctgtggggcattggatcctcccacagttgccctggtgatgacttagggcttcccatctgtgtacatcccactttgaatcttgatcgtgacaagaaataccttaggccttcagtcaattccgaagctccttcagttgtttttataatgggcgttttcacatgcacatatgtgtatgcatgtatacgcccatacagacatgcacacacagactcctactccattagctaacataccctccctctccacaacccctgtcacatacctttcaggaggtgacagttgtcttagttgtcatctacccagacaaacgtcctgggcccgtcctccctcctgatactgtagcctcttggtacccagggtgagttggtggagaacagagagatgagaagcagagggcttggggaaagcctgttcctctctgactcagccctttttggcattattgcaagagcttgactcctggttgccttttcccagccagttttcagttggggtgaaggtttctgcaagtgtgaggtccagatgctgctgctcatgttgggctttccttttgggaactatttctctttatttatagtgtcgggcttccggggaaagcaatcattggtgtgtatgtgtatgtgcatgcacacacgtgcatatacacatttgtgtatgtggaaatgtgctgggcaagtcaaaactatagaagagttgcctcctgtctctcgaatcttccagagatatcacttaattgttaacagcttttgtgttaatccccttcagcccctagctcttttattctaccacggctggagagttgatacctgcagtcagcctgccagtgactcttagtgtctgtttctgacttatttttcctgtctctgtcttccaacccccaataatatttccaccggggatgcatcatttttactcccaatattctgtagagagggagtcaggatgctgtcttcccacgaatagtactcagtaacaaaccaattgcattttagttgggcagtgctcccacccaccctccagatcccttccagctaaaacccttcccccttccctccatgtgtttctcagtttcccgtttcgtttgttggactgttccactgcccctcctcctcaccctatcacccatggatcgtaatgtaaaattcttttaccatgtcaagaaattattaaaaatacaggtactttgacctctttctaaagccgcagaccctggtgcaatgctctggtggctagggatgtactcatgctcatatgtgtgcacgcttggacacccacctccatggacacctagccaccctgttgtgtgtccttatgccagttgagctgaatcttttccccagtatagtggaaagactgaggcttctgcctactgagcaaggttgggtgcttcatttgtgttcagtctgaattatgggaaagttagctcttcccagacctaagctgccttctctccctactttcagaagatcctagttccttccttcccgagtgatacccatgaactgccagtagaggctgctatcgttccatgtgtaaggaatgaactggttcaaggcgcgtcctacccagtcattttctttaccttatactaattcttcctgaataatgtcttcagtttcttgaggagactcctagttttggttttcaaattacttggagggctgcctaggaatctatctccctctgaaataaagtttcctcatcttccaccttgc

SEQ ID NO: 159298 - DNA, 765 bp, Artificial Sequence
  derived and/or modified sequence
atggccagcctgctgaaggtggaccaggaggtgaagctgaaggtggacagcttcagagagagaatcaccagcgaggccgaggacctggtggccaacttcttccccaagaagctgctggagctggacagcttcctgaaggagcccatcctgaacatccacgacctgacccagatccacagcgacatgaacctgcccgtgcccgaccccatcctgctgaccaacagccacgacggcctggacggccccacctacaagaagagaagactggacgagtgcgaggaggccttccagggcaccaaggtgttcgtgatgcccaacggcatgctgaagagcaaccagcagctggtggacatcatcgagaaggtgaagcccgagatcagactgctgatcgagaagtgcaacaccgtgaagatgtgggtgcagctgctgatccccagaatcgaggacggcaacaacttcggcgtgagcatccaggaggagaccgtggccgagctgagaaccgtggagagcgaggccgccagctacctggaccagatcagcagatactacatcaccagagccaagctggtgagcaagatcgccaagtacccccacgtggaggactacagaagaaccgtgaccgagatcgacgagaaggagtacatcagcctgagactgatcatcagcgagctgagaaaccagtacgtgaccctgcacgacatgatcctgaagaacatcgagaagatcaagagacccagaagcagcaacgccgagaccctgtactag

SEQ ID NO: 159299 - DNA, 393 bp, Artificial Sequence
  derived and/or modified sequence
atggccagcctgctgaaggtggaccaggaggtgaagctgaaggtggacagcttcagagagagaatcaccagcgaggccgaggacctggtggccaacttcttccccaagaagctgctggagctggacagcttcctgaaggagcccatcctgaacatccacgacctgacccagatccacagcgacatgaacctgcccgtgcccgaccccatcctgctgaccaacagccacgacggcctggacggccccacctacaagaagagaagactggacgagtgcgaggaggccttccagggccagaacgtgggcaccgcccccgacagccaggacagaagatggaagcagctgtggggcgtgcacagcggcggcaacagctgcagagccaagaactgctag

SEQ ID NO: 159300 - protein, 681 aa, Artificial Sequence
  derived and/or modified sequence
MAPQVWRRRTLERCLTEVGKATGRPECFLTIQEGLASKFTSLTKVLYDFNKILENGRIHGSPLQKLVIENFDDEQIWQQLELQNEPILQYFQNAVSETINDEDISLLPESEEQEREEDGSEIEADDKEDLEDLEEEEVSDMGNDDPEMGERAENSSKSDLRKSPVFSDEDSDLDFDISKLEQQSKVQNKGQGKPREKSIVDDKFFKLSEMEAYLENIEKEEERKDDNDEEEEDIDFFEDIDSDEDEGGLFGSKKLKSGKSSRNLKYKDFFDPVESDEDITNVHDDELDSNKEDDEIAEEEAEELSISETDEDDDLQENEDNKQHKESLKRVTFALPDDAETEDTGVLNVKKNSDEVKSSFEKRQEKMNEKIASLEKELLEKKPWQLQGEVTAQKRPENSLLEETLHFDHAVRMAPVITEETTLQLEDIIKQRIRDQAWDDVVRKEKPKEDAYEYKKRLTLDHEKSKLSLAEIYEQEYIKLNQQKTAEEENPEHVEIQKMMDSLFLKLDALSNFHFIPKPPVPEIKVVSNLPAITMEEVAPVSVSDAALLAPEEIKEKNKAGDIKTAAEKTATDKKRERRKKKYQKRMKIKEKEKRRKLLEKSSVDQAGKYSKTVASEKLKQLTKTGKASFIKDEGKDKALKSSQAFFSKLQDQVKMQINDAKKTEKKKKKRQDISVHKLKL

SEQ ID NO: 159301 - DNA, 2046 bp, Artificial Sequence
  derived and/or modified sequence
atggcaccgcaagtatggaggcgtaggacattggagagatgtctgacggaagtcggtaaagctacaggacgaccagagtgtttcctcactatccaagaggggttggcgtcaaaattcaccagccttacaaaggtgctgtacgattttaataagatccttgagaacggcagaatacatggttcacccctccaaaaactggtaatagagaattttgacgacgagcaaatttggcagcagctcgagctgcaaaacgaaccgattctgcagtattttcagaacgccgtttcggagactatcaatgatgaggatatatctcttctccccgagagcgaggaacaggaacgcgaggaagacgggtccgagattgaagcggatgacaaggaagacctggaggatcttgaggaggaggaggttagtgacatgggcaatgacgatcccgaaatgggcgaacgtgcggagaactctagtaagtccgatttgaggaaatctcccgtctttagtgacgaagattctgaccttgatttcgacatctcgaagttagagcagcagagcaaggtgcaaaacaagggccagggcaaaccccgagaaaagtctatcgtcgatgacaaatttttcaaattgtccgagatggaagcttaccttgagaacatcgaaaaagaagaagaacgcaaagacgacaacgatgaggaggaagaagacatcgatttcttcgaggatattgatagcgatgaggatgagggtggcctgttcggatccaagaagcttaaaagcgggaagagttctcgtaatctgaaatacaaggacttttttgaccccgttgaatccgatgaggatatcacgaatgtccatgacgatgaactcgattccaacaaggaggatgatgaaattgccgaggaggaggcagaggagctgtctatttccgagactgacgaggatgatgacctccaggaaaatgaagataataagcagcacaaggaatccttaaaaagggtcacgtttgcactgcccgacgacgcagaaacagaggacaccggagtcctcaacgtgaagaaaaatagcgacgaagtgaagagcagttttgagaaaagacaggagaaaatgaatgagaagatagctagtctcgagaaagagttgctggaaaagaaaccctggcagctccagggcgaggtgactgcccagaaacggcccgagaatagcctgctcgaggagaccttgcacttcgatcacgccgtgcgcatggcgcctgtgattactgaggagaccactctccagctggaggatatcatcaagcagcggatacgtgaccaggcgtgggatgacgtggtgaggaaggaaaaacccaaggaggacgcctatgagtataaaaaaagacttaccttagatcacgaaaagtctaaattaagtctggccgagatctatgaacaggagtacatcaagctgaaccagcagaagacagctgaagaggagaacccagagcatgtcgaaattcagaagatgatggacagtctgtttctaaagttggacgccctgagcaattttcacttcattcccaagcctcctgttcctgaaattaaggtggtgtctaacctgcctgcaattaccatggaggaagtggctcctgtgtcagtgtcagacgctgccttattagcccccgaagagattaaggagaagaataaagctggcgatatcaaaactgccgccgagaaaaccgccacggataaaaagagggaacgtaggaagaagaagtaccagaaaaggatgaagatcaaagagaaagaaaagcgacggaagctgctggaaaaaagctcggtcgatcaggccgggaaatattccaagaccgtggcctccgagaaattgaagcaactgaccaagactggaaaggcttcctttatcaaagacgaaggcaaggataaagccctaaagtcttcacaggcatttttttccaagctgcaagaccaggtcaagatgcaaatcaatgatgccaagaagactgaaaaaaagaagaaaaagcgccaagatatttcagtgcataaactgaaactgtag

SEQ ID NO: 159302 - DNA, 2484 bp, Artificial Sequence
  derived and/or modified sequence
aggtcaggggcgtggcgaaggtcgctgctttcctgctacaacgggcctactttagctaaaacagaaacgtaaggccaggacgggtcaccctttgtgggcccctgaaaaatacaaaacgaagtttggagagagttgaaaggcgtttgggctgaccatggagatttttgtttcccaccctcctgcgaaagcgctcgcgctgccattggctctggctgagggcgagtccggaacctgtgcgccgcggaactttcggctctgaaatccaagttgcgctgggcgcatctttgccgcgcggtttccgggcggctcccttcccttgcatgctgcattgtgtcgggagttgctgacagccatggcgccgcaggtctggcgtcgacggaccctggagcggtgtctgacggaagtcggcaaagccacgggtcggcccgagtgcttcctcacgattcaagagggattggcatcaaagttcacttctttaacaaaagtgctttatgactttaataaaatattagagaatggtaggatccatggaagccccttgcaaaaacttgtgatagaaaattttgatgatgagcagatttggcaacaactggaattgcaaaatgaaccaattttacaatactttcagaatgcagttagtgaaacaattaatgatgaagatatcagtcttctcccagagagtgaagaacaggaacgtgaagaggatggttcagagatagaggctgatgacaaggaggacctagaagatttagaggaggaggaagtgtccgacatgggtaatgatgatcctgaaatgggtgagagagctgaaaactcaagcaaatctgatctgaggaaaagccccgttttcagtgatgaggattctgaccttgactttgatatcagcaaattggaacagcagagcaaggtgcaaaacaaaggacagggaaaaccaagagaaaagtccatagtagatgataaattcttcaaactctctgaaatggaggcctatttagaaaacatagaaaaagaagaggaacgaaaagatgataatgatgaggaggaggaagatattgatttttttgaagatattgattctgatgaagatgaagggggactgtttggaagtaaaaaacttaagtcaggtaaaagttccagaaatctgaaatacaaagatttttttgatccagttgaaagtgatgaagacataacaaatgttcatgatgatgagctggattcaaacaaagaagatgatgaaattgctgaagaagaagcagaagaactaagtatttcggaaacggatgaagatgatgaccttcaagaaaatgaagacaataaacaacataaagaaagcttgaaaagagtgacctttgctttaccagatgatgcggaaactgaagatacaggtgttttaaatgtaaagaaaaattctgatgaagttaaatcctcctttgaaaaaagacaggaaaagatgaatgaaaaaattgcatctttagaaaaagagttgttagaaaaaaagccgtggcagcttcagggggaagtgacagcacagaagaggccagagaacagcctcctggaggagaccctacactttgaccatgctgtccggatggcacctgtgattacagaggaaaccacccttcaactggaagatatcattaaacagaggataagagatcaggcttgggatgatgtagtacgtaaagaaaaacctaaagaggatgcatatgaatataaaaagcgtttaaccttagaccatgagaagagtaaattgagccttgctgaaatttatgaacaggagtacatcaaactcaaccagcaaaaaacagcagaagaagaaaatccagaacatgtagaaattcagaagatgatggattccctcttcttaaaattggatgccctctcaaacttccactttatccctaaaccgcctgtaccagagattaaagttgtgtcaaatctgccagccataaccatggaggaagtagccccagtgagtgttagtgatgcagctctcctggccccagaggagatcaaggagaaaaataaagctggagatataaaaacagctgctgaaaaaacagctacagacaagaaacgagagcgaaggaaaaagaaatatcaaaagcgtatgaaaataaaagagaaggagaagcggagaaaactgcttgaaaagagcagtgtagatcaagcagggaaatacagcaaaacagtagcttcggagaagttaaaacagctgaccaaaactggcaaagcttccttcataaaggatgaaggtaaagacaaggccttaaagtcctctcaagcattcttttctaaattacaagatcaagtaaaaatgcaaatcaatgatgcaaagaaaacagaaaagaaaaagaagaaaagacaggatatttctgttcataaattaaagctgtaatatattttgaatataatgtaaatattaatgtgtaagcttatattgtgtcattgttctgttttataataaaattcttgagaaccttc

SEQ ID NO: 159303 - DNA, 2046 bp, Artificial Sequence
  derived and/or modified sequence
atggccccccaggtgtggaggaggaggaccctggagcgctgcctgacagaggtgggcaaggccaccggccggcctgagtgcttcctgaccatccaggagggcctggccagcaagttcaccagcctgaccaaggtgctgtatgacttcaacaagatcctggagaatggccgcatccacggcagccccctgcagaagctggtgattgaaaattttgatgatgagcagatctggcagcagctggagctgcagaatgagcccatcctgcagtacttccagaatgctgtgtctgagaccatcaatgatgaggacatcagcctgctgcctgagagcgaggagcaggagcgggaggaggatggcagcgagattgaagcagatgacaaggaggacctggaggacctggaggaggaggaggtgtctgacatgggaaatgatgatcctgagatgggagagcgggcagagaacagcagcaagagtgacctgaggaagagccctgtgttcagtgatgaagattctgacctggactttgacatcagcaagctggagcagcagagcaaggtgcagaacaagggccagggcaagccccgggagaagagcatcgtggatgacaagttcttcaagctgtctgagatggaggcctacctggagaacatcgagaaggaggaggagaggaaggatgacaatgatgaggaggaggaggacatcgacttctttgaggacatcgacagtgatgaagatgaaggaggcctgtttggcagcaagaagctgaagagcggcaagagcagcaggaacctgaagtacaaggacttctttgatcctgtggagagtgatgaggacatcaccaacgtgcatgatgatgagctggacagcaacaaggaggatgatgaaattgctgaggaggaggccgaggagctgagcatcagcgagacagatgaagatgatgacctgcaggagaatgaagacaacaagcagcacaaggagagcctgaagagggtgacctttgccctgcctgatgatgctgagacagaggacaccggggtgctgaatgtgaagaagaacagtgatgaggtgaagagcagctttgagaagaggcaggagaagatgaatgagaagatcgccagcctggagaaggagctgctggagaagaagccctggcagctgcagggcgaggtgacagcccagaagaggcctgagaacagcctgctggaggagaccctgcactttgaccatgctgtgaggatggcccctgtgatcacagaggagaccaccctgcagctggaggacatcatcaagcagaggatccgggaccaggcctgggatgatgtggtgaggaaggagaagcccaaggaggatgcctatgagtacaagaagaggctgaccctggaccacgagaagagcaagctgagcctggccgagatctatgagcaggagtacatcaagctgaaccagcagaagacagctgaggaggagaaccctgagcacgtggagatccagaagatgatggacagcctcttcctgaagctggatgccctgagcaacttccacttcatccccaagccccctgtgcctgagatcaaggtggtgagcaacctgcctgccatcaccatggaggaggtggcccctgtgtctgtgtctgatgctgccctgctggcccctgaggagatcaaggagaagaacaaggccggggacatcaagacagctgctgagaagacagccacagacaagaagcgggagaggaggaagaagaagtaccagaagaggatgaagatcaaggagaaggagaagaggaggaagctgctggagaagagctctgtggaccaggccggcaagtacagcaagacagtggccagcgagaagctgaagcagctgaccaagacaggcaaggccagcttcatcaaggatgagggcaaggacaaggccctgaagagcagccaggccttcttcagcaagctgcaggaccaggtgaagatgcagatcaatgatgccaagaagacagagaagaagaagaagaagaggcaggacatctctgtgcacaagctgaagctgtag

SEQ ID NO: 159304 - DNA, 2046 bp, Artificial Sequence
  derived and/or modified sequence
atggccccccaggtgtggcggcggcggaccctggagcggtgcctgactgaggttggcaaggcgaccggaagacctgaatgtttcctcactatccaggagggcctggcctccaagttcacatcactgacaaaggtgctttacgactttaataagattttggagaatggtaggatacatggctcaccgctgcaaaagctggtgatcgagaactttgatgatgaacaaatctggcaacaactggaactgcaaaatgagccaatcctccagtactttcagaacgcagtttccgaaacgatcaatgacgaagatatctccctgctgcccgaatccgaggaacaggagagagaagaggacggaagcgagatagaagccgatgataaggaagatctcgaggacctggaggaagaggaagtgtctgacatggggaatgatgaccctgaaatgggcgagagagctgagaactcttcaaaaagtgatctacgcaaaagccccgtgttctccgacgaagattccgatctggatttcgatatttcaaagctggagcagcagagtaaggtgcagaataagggccaaggcaaacctagagaaaagtccatcgtggatgacaaatttttcaagctttctgagatggaagcttaccttgaaaatatcgaaaaggaagaggaaagaaaggacgacaacgatgaggaggaagaagatattgactttttcgaggacatcgacagcgatgaggacgagggagggttgttcggatccaaaaaattgaagagtggcaagtcaagtcgcaacctgaaatacaaggacttctttgacccggtcgaaagcgacgaagacatcacgaacgtgcatgatgatgagttagactccaataaggaggacgatgagatcgcagaagaagaggctgaggaactttccatcagcgagaccgatgaagatgacgatttgcaggaaaacgaggacaacaaacagcacaaagagtcgcttaagagggtgacattcgcactgcccgacgacgctgagaccgaggatacgggggttctcaacgtcaaaaagaacagcgatgaggttaaatcttcatttgagaagagacaggaaaagatgaacgagaagattgccagccttgagaaggagttgttggagaagaagccctggcagttgcagggcgaggttacagcccagaaacggccggaaaatagcctcctggaggagacactacacttcgaccatgcagtccgcatggcaccagtcatcaccgaggaaaccacactgcagctagaggacattatcaaacagcgaattcgggatcaagcatgggatgacgtggtgcgcaaagagaaacccaaagaagacgcttacgaatataagaagaggctcacacttgatcacgagaagagcaagcttagcctggctgaaatttatgaacaagagtacattaaactcaatcagcagaagactgcggaagaggagaaccccgagcatgttgaaatacagaagatgatggactcactgtttctcaaactggacgcgctgtccaactttcacttcatcccgaaacctcccgtgcccgaaattaaggtcgtgtctaacctgccagccattactatggaggaagtggctcccgtatctgtgtcagatgccgctctgctggcccccgaagagatcaaggagaaaaataaggccggcgatattaagaccgctgcagagaaaactgcaaccgataagaaaagggagcgacgtaaaaaaaagtatcagaagagaatgaagatcaaagagaaggaaaaacgccgtaaactcctcgaaaaaagtagcgttgatcaagctggtaagtacagcaaaaccgtcgcttccgagaaactcaaacagttaacaaagaccggcaaagcctccttcatcaaagatgagggtaaggacaaggccctcaaatcctcgcaggctttcttttctaaacttcaagaccaggtaaagatgcagattaatgatgctaaaaaaaccgaaaagaaaaagaagaaaaggcaagacataagcgtccataaactcaagctgtag

SEQ ID NO: 159305 - DNA, 2046 bp, Artificial Sequence
  derived and/or modified sequence
atggcccctcaggtatggcgacggcgaacccttgaacgatgcctaaccgaggtaggcaaagccacaggaaggcccgaatgcttcctgaccatccaagagggactggcttccaagtttacaagcctgacaaaggtgctgtatgacttcaacaagatactagagaatggacgtatccatggaagccccctgcagaagctggtaatcgaaaacttcgatgatgagcagatatggcagcagcttgagctgcaaaatgaacctatattacagtactttcagaacgccgtgagcgaaactatcaacgacgaagacatctccctccttcctgaatctgaggaacaggagcgcgaagaagacggcagcgaaatcgaagctgacgataaagaggacctcgaagatctggaagaggaggaagtgagcgatatgggcaatgacgatcccgaaatgggtgaaagagcagagaattcttctaaatctgacctgagaaagtccccagtcttcagtgacgaagatagcgatctggacttcgacatcagtaagttagagcagcaatccaaagtgcagaataagggacagggcaagcctagagagaagtctatcgtcgatgataagttcttcaagcttagtgagatggaagcatacctggagaatattgagaaggaagaggagcgcaaagacgacaacgacgaagaggaggaagatatcgactttttcgaagacatcgattccgacgaagatgaggggggactgtttggttctaaaaaactcaagtcaggcaaatcctccagaaaccttaaatacaaggacttctttgaccccgtggagtctgatgaagacatcaccaacgtgcacgacgatgaactcgactccaataaagaagatgacgagattgccgaagaggaggcagaggaactctccatctctgagacagacgaagacgatgatctgcaagaaaacgaggacaacaaacagcataaagagtctctgaaacgcgtaaccttcgccctgcctgatgatgctgaaaccgaagatactggagtgctgaatgtgaaaaagaactccgacgaggtgaaaagcagcttcgagaagcgacaggagaagatgaatgaaaagatcgctagcctggagaaggagctcttagagaagaagccctggcagctgcagggcgaagtgacggcacagaaaaggcctgaaaacagcctcctggaagaaactttgcattttgatcatgctgtcaggatggccccagtgattactgaagaaactactctgcagttggaggatatcattaagcaacgtatccgggaccaggcgtgggatgacgtggtccgcaaggaaaagcctaaagaagacgcctacgagtacaaaaaacgcctcacgcttgaccacgagaagtctaaactaagcctagcggaaatctatgagcaggagtacattaagcttaaccaacagaaaacagccgaggaggaaaacccagaacacgtggaaattcaaaaaatgatggatagcctgtttctgaaacttgatgccctttcgaattttcattttattcccaagcctcccgtcccggaaatcaaggtggtttctaatctgcccgctatcactatggaagaggtggctcccgtctctgtcagcgacgccgctctcctggcccctgaggagattaaagagaaaaacaaggctggtgacatcaaaactgccgctgagaagaccgctacagataagaagcgggagagaagaaagaagaaataccagaaacggatgaagatcaaggaaaaggagaaacgtcgcaagctactggagaaatcctccgtagaccaagccggaaagtatagtaaaacagtagccagcgagaaactgaaacagttaaccaagacaggcaaggctagctttataaaggatgaaggcaaagacaaagctctgaagagctcccaagcttttttttctaagctccaagaccaagtgaaaatgcagatcaacgatgccaagaagactgaaaagaagaagaaaaaaaggcaggacatttccgtgcataagttgaaactgtag

SEQ ID NO: 159306 - DNA, 2046 bp, Artificial Sequence
  derived and/or modified sequence
atggccccccaggtgtggagaagaagaaccctggagagatgcctgaccgaggtgggcaaggccaccggcagacccgagtgcttcctgaccatccaggagggcctggccagcaagttcaccagcctgaccaaggtgctgtacgacttcaacaagatcctggagaacggcagaatccacggcagccccctgcagaagctggtgatcgagaacttcgacgacgagcagatctggcagcagctggagctgcagaacgagcccatcctgcagtacttccagaacgccgtgagcgagaccatcaacgacgaggacatcagcctgctgcccgagagcgaggagcaggagagagaggaggacggcagcgagatcgaggccgacgacaaggaggacctggaggacctggaggaggaggaggtgagcgacatgggcaacgacgaccccgagatgggcgagagagccgagaacagcagcaagagcgacctgagaaagagccccgtgttcagcgacgaggacagcgacctggacttcgacatcagcaagctggagcagcagagcaaggtgcagaacaagggccagggcaagcccagagagaagagcatcgtggacgacaagttcttcaagctgagcgagatggaggcctacctggagaacatcgagaaggaggaggagagaaaggacgacaacgacgaggaggaggaggacatcgacttcttcgaggacatcgacagcgacgaggacgagggcggcctgttcggcagcaagaagctgaagagcggcaagagcagcagaaacctgaagtacaaggacttcttcgaccccgtggagagcgacgaggacatcaccaacgtgcacgacgacgagctggacagcaacaaggaggacgacgagatcgccgaggaggaggccgaggagctgagcatcagcgagaccgacgaggacgacgacctgcaggagaacgaggacaacaagcagcacaaggagagcctgaagagagtgaccttcgccctgcccgacgacgccgagaccgaggacaccggcgtgctgaacgtgaagaagaacagcgacgaggtgaagagcagcttcgagaagagacaggagaagatgaacgagaagatcgccagcctggagaaggagctgctggagaagaagccctggcagctgcagggcgaggtgaccgcccagaagagacccgagaacagcctgctggaggagaccctgcacttcgaccacgccgtgagaatggcccccgtgatcaccgaggagaccaccctgcagctggaggacatcatcaagcagagaatcagagaccaggcctgggacgacgtggtgagaaaggagaagcccaaggaggacgcctacgagtacaagaagagactgaccctggaccacgagaagagcaagctgagcctggccgagatctacgagcaggagtacatcaagctgaaccagcagaagaccgccgaggaggagaaccccgagcacgtggagatccagaagatgatggacagcctgttcctgaagctggacgccctgagcaacttccacttcatccccaagccccccgtgcccgagatcaaggtggtgagcaacctgcccgccatcaccatggaggaggtggcccccgtgagcgtgagcgacgccgccctgctggcccccgaggagatcaaggagaagaacaaggccggcgacatcaagaccgccgccgagaagaccgccaccgacaagaagagagagagaagaaagaagaagtaccagaagagaatgaagatcaaggagaaggagaagagaagaaagctgctggagaagagcagcgtggaccaggccggcaagtacagcaagaccgtggccagcgagaagctgaagcagctgaccaagaccggcaaggccagcttcatcaaggacgagggcaaggacaaggccctgaagagcagccaggccttcttcagcaagctgcaggaccaggtgaagatgcagatcaacgacgccaagaagaccgagaagaagaagaagaagagacaggacatcagcgtgcacaagctgaagctgtag

SEQ ID NO: 159307 - protein, 160 aa, Artificial Sequence
  derived and/or modified sequence
MAAERKTRLSKNLLRMKFMQRGLDSETKKQLEEEEKKIISEEHWYLDLPELKEKESFIIEEQSFLLCEDLLYGRMSFRGFNPEVEKLMLQMNAKHKAEEVEDETVELDVSDEEMARRYETLVGTIGKKFARKRDHANYEEDENGDITPIKAKKMFLKPQD

SEQ ID NO: 159308 - DNA, 483 bp, Artificial Sequence
  derived and/or modified sequence
atggccgccgagaggaagacccggctgagtaagaacctgcttcgaatgaaattcatgcagaggggcttagatagcgagactaagaagcagctggaagaggaggaaaagaaaattatcagcgaggagcactggtacttagacttacccgagcttaaggaaaaggaatcatttatcatcgaggagcagtctttccttctgtgcgaggaccttctctacgggcgcatgagtttcagaggctttaatcctgaagtggagaagctaatgttacagatgaacgccaagcacaaagctgaggaagttgaggatgaaaccgttgagttggacgtgtccgacgaagaaatggcccggagatacgaaacactggttggcactatagggaagaagttcgctcggaagagggaccacgctaattacgaagaggacgaaaacggggatattacgccaatcaaagcgaagaagatgtttttaaaacctcaggactag

SEQ ID NO: 159309 - DNA, 483 bp, Artificial Sequence
  derived and/or modified sequence
atggctgctgagaggaagacccggctgagcaagaacctgctgaggatgaagttcatgcagaggggcctggacagcgagaccaagaagcagctggaggaggaggagaagaagatcatcagcgaggagcactggtacctggacctgcctgagctgaaggagaaggagagcttcatcatcgaggagcagagcttcctgctgtgtgaggacctgctgtatggccgcatgtccttccggggcttcaaccctgaggtggagaagctgatgctgcagatgaatgccaagcacaaggccgaggaggtggaggatgagaccgtggagctggatgtgtctgatgaggagatggcccggcgctatgagaccctggtgggcaccatcggcaagaagtttgccaggaagagggaccacgccaactatgaggaggatgaaaatggagacatcacccccatcaaggccaagaagatgttcctgaagccccaggactag

SEQ ID NO: 159310 - DNA, 1103 bp, Artificial Sequence
  derived and/or modified sequence
gcatgtgcggtgaggctcgcggccggagtgcggcgctgggcggaagctaccatggcggccgagcgaaagacaaggttgtccaagaatctactgcgcatgaagtttatgcaaaggggactggactcagaaaccaagaaacaactagaagaagaagaaaagaaaatcattagtgaagagcactggtacttggatttgccagagcttaaagagaaagagagtttcataatagaagagcagagtttcttactatgtgaagatcttctctatggaagaatgtcattcagaggatttaatcctgaggttgagaaattgatgcttcagatgaatgctaagcacaaagcagaagaagttgaagatgaaacagtagagcttgatgtgtcagatgaagagatggctagaagatatgagaccttggtggggacaattgggaaaaagtttgccagaaagagagaccatgccaattatgaagaagatgaaaatggagacataacaccaattaaagcaaagaagatgttcttaaagccccaggattaagatggatgccttaagcgatggcccaggggtgcttggtggaagtcagcagggcatctggagctcatcccaatggtgtctctatagttattaatactgtaacgtttacttgtaaagagattatcattttagaaacatgctgtttttgaaacagatgtgtgatggatgttgtacatcctttgcttcttggtattcattcagagtggatttttagcccctgatctacaaatgtacattgttacagggctgcttcctaaagattttttttacctcaggtttctcttaatatagttctccagtcactgaccttgaattgacttacataaactactgccaatgtttaaattgcccttatgtttatatttattatgtcaagccaattcgtacatacaatttggaatcaaatgtcataagaatttattatataaatttatcaagaataaaaatgcctctccagccttaagtatttacatgctcccaggtcattgtcagtttatggtattatgttgttttatttaaagcattgaattgatagaaaaatttgctctgtaataaaaatctactttcacata

SEQ ID NO: 159311 - DNA, 483 bp, Artificial Sequence
  derived and/or modified sequence
atggccgccgagcggaagacccggctgagcaagaacctgctgcggatgaaattcatgcagagaggactagatagcgaaactaaaaagcagctcgaggaagaagagaagaagataatttccgaggaacattggtatttggatctcccagagctaaaggagaaggagtcattcattattgaggagcagagctttctcctgtgcgaggacctgctctatgggcggatgtcatttcgggggttcaaccccgaagttgagaaactcatgctgcagatgaatgccaagcacaaagcggaggaagtcgaagatgagacagtggagctagacgtctcggacgaggagatggctcgtcgctatgagactctggtcggaacgatcgggaaaaagtttgcccgcaagcgggatcacgccaactacgaggaagatgaaaatggtgacattaccccaataaaagcgaaaaagatgttcctgaaaccacaagactag

SEQ ID NO: 159312 - DNA, 483 bp, Artificial Sequence
  derived and/or modified sequence
atggctgccgaaagaaaaacgcgtctctctaagaacctgttgcggatgaaatttatgcagagaggcctggattcagagacgaagaaacaattggaggaagaggaaaaaaagatcatctctgaggagcactggtacctggacctccccgagttgaaagagaaggagtctttcatcatcgaagagcaaagtttcctgctgtgcgaggacttactctacgggagaatgagtttcaggggatttaaccctgaggtggagaagctcatgctgcaaatgaacgctaagcataaggctgaagaagtggaagatgaaactgtggagttagatgtgagcgatgaggagatggctcgaaggtacgagacgcttgtggggacaataggcaaaaagttcgcacggaagcgtgatcacgcaaattacgaggaggatgaaaatggcgatatcacccccattaaggcaaaaaaaatgttcctgaaaccacaggattag

SEQ ID NO: 159313 - DNA, 483 bp, Artificial Sequence
  derived and/or modified sequence
atggccgccgagagaaagaccagactgagcaagaacctgctgagaatgaagttcatgcagagaggcctggacagcgagaccaagaagcagctggaggaggaggagaagaagatcatcagcgaggagcactggtacctggacctgcccgagctgaaggagaaggagagcttcatcatcgaggagcagagcttcctgctgtgcgaggacctgctgtacggcagaatgagcttcagaggcttcaaccccgaggtggagaagctgatgctgcagatgaacgccaagcacaaggccgaggaggtggaggacgagaccgtggagctggacgtgagcgacgaggagatggccagaagatacgagaccctggtgggcaccatcggcaagaagttcgccagaaagagagaccacgccaactacgaggaggacgagaacggcgacatcacccccatcaaggccaagaagatgttcctgaagccccaggactag

SEQ ID NO: 159314 - protein, 186 aa, Artificial Sequence
  derived and/or modified sequence
MASILRSPQALQLTLALIKPDAVAHPLILEAVHQQILSNKFLIVRMRELLWRKEDCQRFYREHEGRFFYQRLVEFMASGPIRAYILAHKDAIQLWRTLMGPTRVFRARHVAPDSIRGSFGLTDTRNTTHGSDSVVSASREIAAFFPDFSEQRWYEEEEPQLRCGPVCYSPEGGVHYVAGTGGLGPA

SEQ ID NO: 159315 - protein, 194 aa, Artificial Sequence
  derived and/or modified sequence
MTQNLGSEMASILRSPQALQLTLALIKPDAVAHPLILEAVHQQILSNKFLIVRMRELLWRKEDCQRFYREHEGRFFYQRLVEFMASGPIRAYILAHKDAIQLWRTLMGPTRVFRARHVAPDSIRGSFGLTDTRNTTHGSDSVVSASREIAAFFPDFSEQRWYEEEEPQLRCGPVCYSPEGGVHYVAGTGGLGPA

SEQ ID NO: 159316 - DNA, 585 bp, Artificial Sequence
  derived and/or modified sequence
atgacccagaatctcggaagcgagatggcctcaatattgagatctccccaggcactgcagctgacgttggctttgatcaaacccgacgcagtggctcatccgctaattctcgaagccgttcatcaacagatcctgagtaataaattcctcatagtcagaatgagagaactgttgtggaggaaagaagattgccagagattctacagggagcacgagggaaggttcttttaccaacgcctggtcgaattcatggcaagtggtccaatacgcgcttacatcttggcccataaggatgccatccagctctggcggacactcatgggtcccacccgtgttttccgggctagacatgttgcccctgattcaattaggggatcctttggcctaaccgacactcggaacaccacacatgggagcgatagtgtcgtatccgctagccgagagatcgccgccttcttcccagacttctcagagcagaggtggtacgaagaagaggaaccgcaactgcggtgcgggccggtctgctacagcccagagggaggcgtgcattacgtggctggaacaggtgggctcggccctgcctag

SEQ ID NO: 159317 - DNA, 585 bp, Artificial Sequence
  derived and/or modified sequence
atgacccagaacctgggcagcgagatggccagcatcctgcggagcccccaggccctgcagctgaccctggccctgatcaagccagatgctgtggcccaccccctcatcctggaggccgtgcaccagcagatcctgagcaacaagttcctgattgtgaggatgagggagctgctgtggaggaaggaggactgccagcgcttctaccgggagcacgagggccgcttcttctaccagaggctggtggagttcatggccagcggccccatccgggcctacatcctggcccacaaggatgccatccagctgtggaggaccctgatgggccccaccagggtcttccgggcccggcacgtggccccagacagcatccggggcagctttggcctgacagacaccaggaacaccacccacggcagtgacagcgtggtgtctgccagccgggagattgctgccttcttcccagacttcagcgagcagcgctggtatgaggaggaggagccccagctgcgctgtggccctgtgtgctacagccctgagggcggcgtgcactacgtggccggcaccggcggcctgggccctgcctag

SEQ ID NO: 159318 - DNA, 585 bp, Artificial Sequence
  derived and/or modified sequence
atgacccagaacctgggcagcgagatggccagcatcctgcggagcccacaggccttgcagcttacactcgcactgattaaacccgacgcagtagctcacccgcttatactggaagcggtgcaccaacagatcctgtctaacaaattcctgatcgtccgaatgcgagagctcctatggagaaaagaagattgccagcgcttctaccgggagcatgagggccggttcttttaccagagattggttgagttcatggcctccggcccaattagggcatatatccttgcacacaaggatgcgatccaactctggcgaactctcatggggccaactcgggtcttcagagccaggcacgtagctcccgacagtatcagaggaagcttcggcctcaccgacacaaggaatacaacccacgggtccgacagcgtcgtgtccgccagcagggaaattgcagccttctttcctgacttttctgagcaacggtggtacgaggaagaagagccacagctcaggtgtggtccagtgtgttactcacccgaaggcggagtgcactatgtggccggtactggcgggttgggtcctgcctag

SEQ ID NO: 159319 - DNA, 913 bp, Artificial Sequence
  derived and/or modified sequence
actggggctccgaatgacccagaatctggggtgggcttaggccccgggccgcgtgttcttgccacgagaacccctagcagcctggccttggaatggctggatgaggtgcattcgttggttcattcagatactgttaagagccagctgtgtgctaggagtgagatggcctcaatcttgcgaagccctcaggctctccagctcactctagccctgatcaagcctgacgcagtcgcccatccactgattctggaggctgttcatcagcagattctaagcaacaagttcctgattgtacgaatgagagaactactgtggagaaaggaagattgccagaggttttaccgagagcatgaagggcgttttttctatcagaggctggtggagttcatggccagcgggccaatccgagcctacatccttgcccacaaggatgccatccagctctggaggacgctcatgggacccaccagagtgttccgagcacgccatgtggccccagattctatccgtgggagtttcggcctcactgacacccgcaacaccacccatggttcggactctgtggtttcagccagcagagagattgcagccttcttccctgacttcagtgaacagcgctggtatgaggaggaagagccccagttgcgctgtggccctgtgtgctatagcccagagggaggtgtccactatgtagctggaacaggaggcctaggaccagcctgatgcaggtctatgaagaccagtggtagtgcccagacttctcctagacatctagtctaaaacattctcctaggaccagggaagcctggcttacagtgccatttctgctgggcaccaccacctgcctgagggcctagctcaccacagcacatcctccaggatctagccttctatctacctcttctctggaatg

SEQ ID NO: 159320 - DNA, 2004 bp, Artificial Sequence
  derived and/or modified sequence
gacaaggtgaacccgcagccggacttctgctgcactggggctccgaatgacccagaatctggggagtgagatggcctcaatcttgcgaagccctcaggctctccagctcactctagccctgatcaagcctgacgcagtcgcccatccactgattctggaggctgttcatcagcagattctaagcaacaagttcctgattgtacgaatgagagaactactgtggagaaaggaagattgccagaggttttaccgagagcatgaagggcgttttttctatcagaggctggtggagttcatggccagcgggccaatccgagcctacatccttgcccacaaggatgccatccagctctggaggacgctcatgggacccaccagagtgttccgagcacgccatgtggccccagattctatccgtgggagtttcggcctcactgacacccgcaacaccacccatggttcggactctgtggtttcagccagcagagagattgcagccttcttccctgacttcagtgaacagcgctggtatgaggaggaagagccccagttgcgctgtggccctgtgtgctatagcccagagggaggtgtccactatgtagctggaacaggaggcctaggaccagcctgatgcaggtctatgaagaccagtggtagtgcccagacttctcctagacatctagtctaaaacattctcctaggaccagggaagcctggcttacagtgccatttctgctgggcaccaccacctgcctgagggcctagctcaccacagcacatcctccaggatctagccttctatctacctcttctctggaatgtttatggtggttcagaagaatgatgactcctctttgctgagaactgttcatccttcttcaagaagaagcttgccaggccgggcacggtggctcacgcctataatcccagcactttgggaggccgaggcaggcggatcacaaggtcaggaattcgagaccagcctgaccaacatggtgaaaccccatctctactaaaaatacaacaattagccaggcatggtggtgcatgcctgtaatcccagctactcagaggctgaggcaggagaattgcttgaacctgggaggcagagggtgcagtgagccgagatcgtgccattgcactccagcctgggcgacattctgtctcaaaaaaaaaaaaaaagaagcttgtctaattgacttgcctaaaaaatgcagtgactccaaacaacatttgacctgtcttcctcaataaaagtcagtgttctcctgaatcctttatgctgccacatttaggggaaacttttcaggcttcatcattctgacttctcagcagcattcagttattgcttcattctccagaaacactctcttctcttggattttctgatcccacacccttggttttctccttctgtgtgtttttcttcatctcctttatcagcttatgcaaacatttattttcataaattctctattcaagacatactgaaaaatgcaaagatggttaagacatgattgggtcctcaagttgctaattatgaatttgggtggtcagccagctataacgtggcagagatggagaagtgccctaacagaggtataaagtcctgtgggagaacagaggaaagaaggtttcctttggctgggtgaggaggtgaaggagatagggtggaaagtcttttataaaagatatagctggctttggaactaagcctgaaggtcaaatagggtatccatagcaggggtctggggcactagacagtctgttcattttcaggaatatatgggtcagttttgtatgtgtgacctaagaaacctgtgacacttcttacaggtcttgacttttctttctcagtacatgtgtatttctctttttggtggccttgaaacctttgagttgaaaattgccttcaccatctgccactttcactaatggtagaccaggaaatttggacccactgaacatagagaacaactagaaaagctgtgcaaaatataaaca

SEQ ID NO: 159321 - DNA, 1209 bp, Artificial Sequence
  derived and/or modified sequence
ggagtgagatggcctcaatcttgcgaagccctcaggctctccagctcactctagccctgatcaagcctgacgcagtcgcccatccactgattctggaggctgttcatcagcagattctaagcaacaagttcctgattgtacgaatgagagaactactgtggagaaaggaagattgccagaggttttaccgagagcatgaagggcgttttttctatcagaggctggtggagttcatggccagcgggccaatccgagcctacatccttgcccacaaggatgccatccagctctggaggacgctcatgggacccaccagagtgttccgagcacgccatgtggccccagattctatccgtgggagtttcggcctcactgacacccgcaacaccacccatggttcggactctgtggtttcagccagcagagagattgcagccttcttccctgacttcagtgaacagcgctggtatgaggaggaagagccccagttgcgctgtggccctgtgtgctatagcccagagggaggtgtccactatgtagctggaacaggaggcctaggaccagcctgatgcaggtctatgaagaccagtggtagtgcccagacttctcctagacatctagtctaaaacattctcctaggaccagggaagcctggcttacagtgccatttctgctgggcaccaccacctgcctgagggcctagctcaccacagcacatcctccaggatctagccttctatctacctcttctctggaatgtttatggtggttcagaagaatgatgactcctctttgctgagaactgttcatccttcttcaagaagaagcttgccaggccgggcacggtggctcacgcctataatcccagcactttgggaggccgaggcaggcggatcacaaggtcaggaattcgagaccagcctgaccaacatggtgaaaccccatctctactaaaaatacaacaattagccaggcatggtggtgcatgcctgtaatcccagctactcagaggctgaggcaggagaattgcttgaacctgggaggcagagggtgcagtgagccgagatcgtgccattgcactccagcctgggcgacattctgtctcaaaaaaaaaaaaaaagaagcttgtctaattgacttgcctaaaaaatgcagtgactccaaacaacatttgacctgtcttcctcaataaaagtcagtgttctcctg

SEQ ID NO: 159322 - DNA, 1353 bp, Artificial Sequence
  derived and/or modified sequence
agaatctggggtgggcttaggccccgggccgcgtgttcttgccacgagaacccctagcagcctggccttggaatggctggatgaggtgcattcgttggttcattcagatactgttaagagccagctgtgtgctaggtactgcttacaccttctggtggtgaagacggaactgaagggaacttgcaaggagctgtgagaaagtgtaacgggaagtgagctaagatcactaaggagtgagatggcctcaatcttgcgaagccctcaggctctccagctcactctagccctgatcaagcctgacgcagtcgcccatccactgattctggaggctgttcatcagcagattctaagcaacaagttcctgattgtacgaatgagagaactactgtggagaaaggaagattgccagaggttttaccgagagcatgaagggcgttttttctatcagaggctggtggagttcatggccagcgggccaatccgagcctacatccttgcccacaaggatgccatccagctctggaggacgctcatgggacccaccagagtgttccgagcacgccatgtggccccagattctatccgtgggagtttcggcctcactgacacccgcaacaccacccatggttcggactctgtggtttcagccagcagagagattgcagccttcttccctgacttcagtgaacagcgctggtatgaggaggaagagccccagttgcgctgtggccctgtgtgctatagcccagagggaggtgtccactatgtagctggaacaggaggcctaggaccagcctgatgcaggtctatgaagaccagtggtagtgcccagacttctcctagacatctagtctaaaacattctcctaggaccagggaagcctggcttacagtgccatttctgctgggcaccaccacctgcctgagggcctagctcaccacagcacatcctccaggatctagccttctatctacctcttctctggaatgtttatggtggttcagaagaatgatgactcctctttgctgagaactgttcatccttcttcaagaagaagcttgccaggccgggcacggtggctcacgcctataatcccagcactttgggaggccgaggcaggcggatcacaaggtcaggaattcgagaccagcctgaccaacatggtgaaaccccatctctactaaaaatacaacaattagccaggcatggtggtgcatgcctgtaatcccagctactcagaggctgaggcaggagaattgcttgaacctgggaggcagagggtgcagtgagccgagatcgtgccattgcactccagcctgggcgacattctgtctcaaaaaaaaaaaaaaagaa

SEQ ID NO: 159323 - DNA, 585 bp, Artificial Sequence
  derived and/or modified sequence
atgacgcagaatctgggtagcgaaatggccagcattctgagatccccccaggccctgcagctgacgctcgccttaattaagcccgatgctgtggcccacccactcatactcgaggccgtgcatcaacagattctgtccaacaagtttctgatcgtaagaatgcgcgaactcttatggcggaaagaagactgtcaaagattttaccgggagcacgagggcagatttttctaccagagattggtggagttcatggcatccggccctatcagagcatacatcctggctcacaaggacgcaattcaactgtggcgcacactgatgggaccaacacgggtgttcagggcaagacatgttgcacccgacagtattaggggcagtttcgggcttacagacactcggaatacaacgcacgggagcgacagcgtcgtgagtgcttcaagggagatcgccgcttttttcccggacttcagtgagcaaagatggtacgaagaagaagagcctcagcttcggtgcgggcctgtatgttactcgccagaggggggagtacattacgtagctgggaccggtggcttaggcccagcttag

SEQ ID NO: 159324 - DNA, 585 bp, Artificial Sequence
  derived and/or modified sequence
atgacccagaacctgggcagcgagatggccagcatcctgagaagcccccaggccctgcagctgaccctggccctgatcaagcccgacgccgtggcccaccccctgatcctggaggccgtgcaccagcagatcctgagcaacaagttcctgatcgtgagaatgagagagctgctgtggagaaaggaggactgccagagattctacagagagcacgagggcagattcttctaccagagactggtggagttcatggccagcggccccatcagagcctacatcctggcccacaaggacgccatccagctgtggagaaccctgatgggccccaccagagtgttcagagccagacacgtggcccccgacagcatcagaggcagcttcggcctgaccgacaccagaaacaccacccacggcagcgacagcgtggtgagcgccagcagagagatcgccgccttcttccccgacttcagcgagcagagatggtacgaggaggaggagccccagctgagatgcggccccgtgtgctacagccccgagggcggcgtgcactacgtggccggcaccggcggcctgggccccgcctag

SEQ ID NO: 159325 - protein, 280 aa, Artificial Sequence
  derived and/or modified sequence
MLSAVARGYQGWFHPCARLSVRMSSTGIDRKGVLANRVAVVTGSTSGIGFAIARRLARDGAHVVISSRKQQNVDRAMAKLQGEGLSVAGIVCHVGKAEDREQLVAKALEHCGGVDFLVCSAGVNPLVGSTLGTSEQIWDKILSVNVKSPALLLSQLLPYMENRRGAVILVSSIAAYNPVVALGVYNVSKTALLGLTRTLALELAPKDIRVNCVVPGIIKTDFSKVFHGNESLWKNFKEHHQLQRIGESEDCAGIVSFLCSPDASYVNGENIAVAGYSTRL

SEQ ID NO: 159326 - protein, 225 aa, Artificial Sequence
  derived and/or modified sequence
MLSAVARGYQGWFHPCARLSVRMSSTGIDRKGVLANRVAVVTGSTSGIGFAIARRLARDGAHVVISSRKQQNVDRAMAKLQGEGLSVAGIVCHVGKAEDREQLVAKALEHCGGVDFLVCSAGVNPLVGSTLGTSEQIWDKILSVNVKSPALLLSQLLPYMENRRGAVILVSSIAAYNPVVALGVYNVSKTALLGLTRTLALELAPKDIRVNCVVPGIIKTDFSKV

SEQ ID NO: 159327 - DNA, 678 bp, Artificial Sequence
  derived and/or modified sequence
atgctgagcgccgtggccagaggctaccagggctggttccacccctgcgccagactgagcgtgagaatgagcagcaccggcatcgacagaaagggcgtgctggccaacagagtggccgtggtgaccggcagcaccagcggcatcggcttcgccatcgccagaagactggccagagacggcgcccacgtggtgatcagcagcagaaagcagcagaacgtggacagagccatggccaagctgcagggcgagggcctgagcgtggccggcatcgtgtgccacgtgggcaaggccgaggacagagagcagctggtggccaaggccctggagcactgcggcggcgtggacttcctggtgtgcagcgccggcgtgaaccccctggtgggcagcaccctgggcaccagcgagcagatctgggacaagatcctgagcgtgaacgtgaagagccccgccctgctgctgagccagctgctgccctacatggagaacagaagaggcgccgtgatcctggtgagcagcatcgccgcctacaaccccgtggtggccctgggcgtgtacaacgtgagcaagaccgccctgctgggcctgaccagaaccctggccctggagctggcccccaaggacatcagagtgaactgcgtggtgcccggcatcatcaagaccgacttcagcaaggtgtag

SEQ ID NO: 159328 - DNA, 843 bp, Artificial Sequence
  derived and/or modified sequence
atgcttagtgctgtggctcgaggttaccaggggtggttccatccctgcgctagactgtccgtgcgcatgagcagcaccggcatagaccgtaagggagttctcgccaatcgagtggcagtggtgacaggatctacctccggaatcgggtttgcaatagcacgccgcctggcaagggatggcgctcacgtggtgatcagtagccggaagcagcagaacgtggaccgtgcgatggccaagctgcagggcgaagggctatctgtggccgggatcgtgtgccacgtgggaaaggcagaagatcgggagcagttggttgcgaaggctctggagcattgcggtggtgtggattttctggtgtgtagcgccggggtgaatccattggtcgggtccacgctcggtactagcgagcaaatctgggacaaaatcctgagtgtgaacgtgaagagccctgccttgttgctcagccagctgttgccatatatggagaatagaagaggcgcagtgattttagtctcaagtatcgctgcttataaccctgtcgttgctctaggggtgtataatgtttcaaagactgctttgttgggactcacgcgaacattggcgctggagcttgcacccaaagacattagggtgaactgtgttgtcccgggaatcattaagaccgatttctctaaagtgtttcacggaaacgaatcattatggaaaaattttaaggagcatcaccagcttcagcgtattggggagagcgaagactgcgctgggattgtaagctttctgtgtagcccggatgccagctacgtgaacggagaaaatatcgctgttgctggatactccacacgactgtag

SEQ ID NO: 159329 - DNA, 678 bp, Artificial Sequence
  derived and/or modified sequence
atgctgagtgcagttgcgcgtggttaccagggctggtttcacccctgcgccagactctctgttcggatgtcatcaactggcattgaccgcaaaggcgtcttggccaatcgcgtggcagtggtgaccggtagcacttcaggcatcggttttgctatcgctcgccggctcgctcgggatggggcccacgtggttatttcgagtcgcaaacagcagaacgtggatagagcaatggccaaattacagggggagggtctaagcgtggccggtatcgtctgccacgtcggtaaagctgaagatagagaacaactcgtcgccaaggctctggagcactgtgggggtgtcgatttccttgtctgttctgctggcgtcaacccgctcgttggctcaactttggggacgagcgaacagatatgggataagattctgagcgtgaatgttaagtccccagccttgctcctctcccagttactcccatacatggagaaccggagaggcgccgtaattttggtgagcagtatagcagcttacaatcctgtggtggctctcggggtctacaatgtctccaaaaccgcactcttgggcctgacacgcacactggctctcgagctggcccccaaggacatcagggtcaattgcgtagtccctggcatcatcaagactgacttctcaaaagtttag

SEQ ID NO: 159330 - DNA, 843 bp, Artificial Sequence
  derived and/or modified sequence
atgctgtctgctgtggcccggggctaccagggctggttccacccctgtgcccggctgtctgtgaggatgagcagcacaggcatcgacagaaaaggagtgctggccaacagagtggccgtggtgacaggcagcaccagcggcatcggctttgccatcgcccggcggctggccagagatggagcccacgtggtgatcagcagcaggaagcagcagaatgtggaccgggccatggccaagctgcagggcgagggcctgtctgtggccggcatcgtgtgccacgtgggcaaggccgaggaccgggagcagctggtggccaaggccctggagcactgcggcggcgtggacttcctggtgtgcagcgctggggtgaaccccctggtgggcagcaccctgggcaccagcgagcagatctgggacaagatcctgtctgtgaatgtgaagagccctgccctgctgctgagccagctgctgccctacatggagaacagaagaggagctgtgatcctggtgagcagcattgctgcctacaaccctgtggtggccctgggcgtgtacaacgtgtccaagacagccctgctgggcctgaccaggaccctggccctggagctggcccccaaggacatccgggtgaactgtgtggtgcccggcatcatcaagacagacttcagcaaggtgttccatggaaatgaaagcctgtggaagaacttcaaggagcaccaccagctgcagagaattggagagagcgaggactgtgccggcatcgtgtccttcctgtgcagcccagatgccagctatgtgaatggagaaaatattgctgtggccggctacagcacccggctgtag

SEQ ID NO: 159331 - DNA, 678 bp, Artificial Sequence
  derived and/or modified sequence
atgctgtctgctgtggcccggggctaccagggctggttccacccctgtgcccggctgtctgtgaggatgagcagcacaggcatcgacagaaaaggagtgctggccaacagagtggccgtggtgacaggcagcaccagcggcatcggctttgccatcgcccggcggctggccagagatggagcccacgtggtgatcagcagcaggaagcagcagaatgtggaccgggccatggccaagctgcagggcgagggcctgtctgtggccggcatcgtgtgccacgtgggcaaggccgaggaccgggagcagctggtggccaaggccctggagcactgcggcggcgtggacttcctggtgtgcagcgctggggtgaaccccctggtgggcagcaccctgggcaccagcgagcagatctgggacaagatcctgtctgtgaatgtgaagagccctgccctgctgctgagccagctgctgccctacatggagaacagaagaggagctgtgatcctggtgagcagcattgctgcctacaaccctgtggtggccctgggcgtgtacaacgtgtccaagacagccctgctgggcctgaccaggaccctggccctggagctggcccccaaggacatccgggtgaactgtgtggtgcccggcatcatcaagacagacttcagcaaggtgtag

SEQ ID NO: 159332 - DNA, 843 bp, Artificial Sequence
  derived and/or modified sequence
atgctgagcgccgtggcccggggctaccagggctggttccacccctgcgcacgcttatcagtgcggatgagttctacaggaattgacaggaaaggagtgctggcgaatagagtggctgtggtgaccggctccacctctgggatcggattcgcaattgcccggcgcctggccagagacggcgcacacgttgtcattagtagcaggaaacagcaaaatgtcgaccgggctatggctaagctacagggcgagggcttatccgtcgctggcatcgtttgtcacgtaggaaaggctgaagatcgcgaacagctagtcgctaaagcattagaacattgcggcggcgtggatttcctcgtatgtagcgcgggggtgaatccacttgtggggagcacgcttgggactagtgagcaaatttgggacaagattttgtctgttaacgtcaagtccccggctctactgctgagtcagctcctgccgtacatggaaaatcgcagaggggccgtgattctggtgtcttcaatcgccgcctacaaccccgtggtcgctctgggtgtgtataatgtaagcaaaacggccctgctgggcctcaccaggacactcgccctggagttagcccccaaagacatccgtgtaaactgtgtggtccctggtatcatcaaaaccgacttcagcaaggtttttcacgggaatgagtctctatggaagaacttcaaggagcatcatcagttacagcggattggcgagagtgaggattgcgcagggatcgtttccttcctgtgctcccccgatgcttcatatgtcaatggggagaatatagctgtcgctggctactcaacacgactttag

SEQ ID NO: 159333 - DNA, 678 bp, Artificial Sequence
  derived and/or modified sequence
atgctgagcgccgtggcccggggctaccagggctggttccacccctgtgcgagactgtctgtaaggatgagctctaccggcattgatcgtaaaggggtgctggccaacagagttgctgtggtgactggctccaccagcgggatcgggttcgcaattgctcggcgcctcgcccgggatggagctcacgtagtgatctcctctagaaagcagcagaatgtggatagagcaatggccaaattgcagggtgaaggtctcagtgtcgcgggaatcgtgtgccacgtcgggaaagctgaggatcgagagcaattggtggcgaaggccttagagcattgtgggggcgtcgatttcctggtgtgttccgcaggtgtgaatccactggtcggtagtactctggggacgagtgagcagatatgggataaaatcctgagcgttaatgtgaaatcccccgccttgctgctctcacagttactcccttatatggaaaaccggcgcggggccgtgatcctggtttcatccattgccgcctataatccagtggtagccctgggtgtatacaatgtgtcaaagaccgctcttctggggctgacaagaacgctcgcgctcgagctggccccgaaagacatccgggtgaattgcgttgtgcctggaattatcaagactgacttcagtaaagtgtag

SEQ ID NO: 159334 - DNA, 843 bp, Artificial Sequence
  derived and/or modified sequence
atgttgagtgcagtcgcaagagggtatcagggttggtttcacccatgtgcaaggttgagcgtacggatgagctccacaggaattgaccggaagggggtcctcgcaaaccgggttgccgtcgttactggctcaacatccggcataggcttcgcaattgccaggaggctggccagagatggtgctcatgtggtgatctcgtcaaggaaacagcagaatgtggacagagccatggctaaactgcagggcgagggcctgtctgtcgccggtatcgtgtgtcacgtgggaaaggccgaggacagagagcagctcgtggcgaaagccttagaacactgtggcggagtggattttcttgtgtgttctgctggggtgaacccgttggtggggtcaactctgggcaccagtgagcagatatgggacaagatcctttccgtcaacgttaaatcacctgcactccttctgagccagctgttgccctatatggaaaatcgcaggggcgcagtaattctggtgtcttctattgctgcatacaacccagtggtggcactgggagtgtataatgttagcaaaaccgccctgctcgggctcaccagaacactcgctctggaactggccccaaaggacatccgcgtgaactgtgtggtcccgggaattattaaaacagatttcagtaaagtttttcacggaaatgagtctctttggaagaactttaaggagcatcaccagctgcagcggattggcgagtcagaagactgtgcaggtatcgtgagcttcctgtgctcccccgatgcctcttatgtgaacggagagaacatcgcagttgctggatacagtactcggttatag

SEQ ID NO: 159335 - DNA, 1705 bp, Artificial Sequence
  derived and/or modified sequence
aataaaagcaggctgcctgagccggcagcagcaacctgctctggttcccttccacgctgtggaagctttgttcttttggtcttcatgataaatcttgctgctgctcactcgttgggtccgtgccacctttaagagctgtaacactcaccgcgaaggtctgcaacttcactcctggggccagcaagaccacgaatgcaccgagaggaatgaacaactctggacacaccatctttaagaaccgtaatactcaccgcaagggtctgcaacttcattcttgaagtcagtgaggccaagaacccatcaattccgtacacattttggtgactttgaagagactgtcacctatcaccaagtggtgagactattgccaagcagtgagactattgccaagtggtgagaccatcaccaagcggtgagactatcacctatcgccaagtggcctgattcagcaggaagcatctcagacaccaaccactatgctgtcagcagttgcccggggctaccagggctggtttcatccctgtgctaggctttctgtgaggatgagcagcaccgggatagacaggaagggcgtcctggctaaccgggtagccgtggtcacggggtccaccagtgggatcggctttgccatcgcccgacgtctggcccgggacggggcccacgtggtcatcagcagccggaagcagcagaacgtggaccgggccatggccaagctgcagggggaggggctgagtgtggcgggcattgtgtgccacgtggggaaggctgaggaccgggagcagctggtggccaaggccctggagcactgtgggggcgtcgacttcctggtgtgcagcgcaggggtcaaccctctggtagggagcactctggggaccagtgagcagatctgggacaagatcctaagtgtgaacgtgaagtccccagccctgctgctgagccagttgctgccctacatggagaacaggaggggtgctgtcatcctggtctcttccattgcagcttataatccagtagtggcgctgggtgtctacaatgtcagcaagacagcgctgctgggtctcactagaacactggcattggagctggcccccaaggacatccgggtaaactgcgtggttccaggaattatcaaaactgacttcagcaaagtgtttcatgggaatgagtctctctggaagaacttcaaggaacatcatcagctgcagaggattggggagtcagaggactgtgcaggaatcgtgtccttcctgtgctctccagatgccagctacgtcaacggggagaacattgcggtggcaggctactccactcggctctgagaggagtgggggcggctgcgtagctgtggtcccaggcccaggagcctgagggggtgtctaggtgatcatttggatctggaggcagagtctgccattctgccagactagcaatttgggggcttactcatgctaggcttgaggaagaagaaaaacgcttcggcattctccttaggacttatctgcttgtagatttggctgatccaattaacatgtggggttcttggtgtgggtctggggagctgaaggattttatggagctggtgctttggaggaatcttaagggaaaggagtagaagctcaggcctttgaaggatttcagctcctcctctctgtaatttgtgctttaagcattttttttcctaaaataaactcaaatttatcctcaa

SEQ ID NO: 159336 - DNA, 678 bp, Artificial Sequence
  derived and/or modified sequence
atgctgtcagctgtagccagagggtaccagggatggtttcacccctgcgctagactgtctgtgcggatgtccagcacgggaattgaccgaaagggagtgttggccaatagagtggcggtggtcactggcagcaccagcggcattgggtttgccatcgcacgcagactcgcgcgagacggcgcacacgtcgttatatcatcaagaaaacagcaaaatgtggatagggccatggctaaactccagggtgagggactgagtgtggctggcatcgtgtgccatgtcggcaaggccgaggatcgggaacaactggtggccaaggccttagagcattgcgggggagtagatttcctggtatgtagtgcgggagtcaatcccctcgtgggatcaactctgggtacctccgagcaaatttgggataagattttatcagtcaacgtgaaatcaccggcactgctgctatcacagctgctgccttatatggagaatcgaagaggcgctgtgatcctggtcagttccatagcagcttacaatcccgtggtggctctcggggtatacaatgtcagcaagaccgctctcttgggcctcactcggacacttgcactggagctggcgccaaaagacatcagagtgaactgtgtggtccccggtatcatcaagacggatttcagcaaagtgtag

SEQ ID NO: 159337 - DNA, 834 bp, Artificial Sequence
  derived and/or modified sequence
agatagaatctgcagtgcctgaaatccagcctgctgcttactcacatcctcatactcagctgcagactgcctgacagaagggctgccaaactgcactccagacagacaggtgcacagccaggcctgattcagcaggaagcatctcagacaccaaccactatgctgtcagcagttgcccggggctaccagggctggtttcatccctgtgctaggctttctgtgaggatgagcagcaccgggatagacaggaagggcgtcctggctaaccgggtagccgtggtcacggggtccaccagtgggatcggctttgccatcgcccgacgtctggcccgggacggggcccacgtggtcatcagcagccggaagcagcagaacgtggaccgggccatggccaagctgcagggggaggggctgagtgtggcgggcattgtgtgccacgtggggaaggctgaggaccgggagcagctggtggccaaggccctggagcactgtgggggcgtcgacttcctggtgtgcagcgcaggggtcaaccctctggtagggagcactctggggaccagtgagcagatctgggacaagatcctaagtgtgaacgtgaagtccccagccctgctgctgagccagttgctgccctacatggagaacaggaggggtgctgtcatcctggtctcttccattgcagcttataatccagtagtggcgctgggtgtctacaatgtcagcaagacagcgctgctgggtctcactagaacactggcattggagctggcccccaaggacatccgggtaaactgcgtggttccaggaattatcaaaactgacttcagcaaagtg

SEQ ID NO: 159338 - DNA, 843 bp, Artificial Sequence
  derived and/or modified sequence
atgctgagcgccgtggccagaggctaccagggctggttccacccctgcgccagactgagcgtgagaatgagcagcaccggcatcgacagaaagggcgtgctggccaacagagtggccgtggtgaccggcagcaccagcggcatcggcttcgccatcgccagaagactggccagagacggcgcccacgtggtgatcagcagcagaaagcagcagaacgtggacagagccatggccaagctgcagggcgagggcctgagcgtggccggcatcgtgtgccacgtgggcaaggccgaggacagagagcagctggtggccaaggccctggagcactgcggcggcgtggacttcctggtgtgcagcgccggcgtgaaccccctggtgggcagcaccctgggcaccagcgagcagatctgggacaagatcctgagcgtgaacgtgaagagccccgccctgctgctgagccagctgctgccctacatggagaacagaagaggcgccgtgatcctggtgagcagcatcgccgcctacaaccccgtggtggccctgggcgtgtacaacgtgagcaagaccgccctgctgggcctgaccagaaccctggccctggagctggcccccaaggacatcagagtgaactgcgtggtgcccggcatcatcaagaccgacttcagcaaggtgttccacggcaacgagagcctgtggaagaacttcaaggagcaccaccagctgcagagaatcggcgagagcgaggactgcgccggcatcgtgagcttcctgtgcagccccgacgccagctacgtgaacggcgagaacatcgccgtggccggctacagcaccagactgtag

SEQ ID NO: 159339 - protein, 461 aa, Artificial Sequence
  derived and/or modified sequence
MEKKCTLNFLVLLPFFMILVTAELEESPEDSIQLGVTRNKIMTAQYECYQKIMQDPIQQAEGVYCNRTWDGWLCWNDVAAGTESMQLCPDYFQDFDPSEKVTKICDQDGNWFRHPASNRTWTNYTQCNVNTHEKVKTALNLFYLTIIGHGLSIASLLISLGIFFYFKSLSCQRITLHKNLFFSFVCNSVVTIIHLTAVANNQALVATNPVSCKVSQFIHLYLMGCNYFWMLCEGIYLHTLIVVAVFAEKQHLMWYYFLGWGFPLIPACIHAIARSLYYNDNCWISSDTHLLYIIHGPICAALLVNLFFLLNIVRVLITKLKVTHQAESNLYMKAVRATLILVPLLGIEFVLIPWRPEGKIAEEVYDYIMHILMHFQGLLVSTIFCFFNGEVQAILRRNWNQYKIQFGNSFSNSEALRSASYTVSTISDGPGYSHDCPSEHLNGKSIHDIENVLLKPENLYN

SEQ ID NO: 159340 - protein, 37 aa, Artificial Sequence
  derived and/or modified sequence
MEKKCTLNFLVLLPFFMILVTAELEESPEDSIQLGVT

SEQ ID NO: 159341 - DNA, 1386 bp, Artificial Sequence
  derived and/or modified sequence
atggaaaaaaagtgtaccctgaacttccttgtgcttcttcctttcttcatgattttagtgactgcagagttggaggaatctcctgaggatagcattcaactcggggtgacacgcaataagatcatgacagctcagtacgagtgttaccagaaaataatgcaggatcctattcagcaggcagaaggtgtgtactgtaaccgaacctgggatggctggttgtgctggaatgatgtcgctgccggtaccgaatcaatgcagttgtgccctgattattttcaagactttgacccttcggagaaagttaccaaaatctgcgaccaggacggaaattggtttcgccaccctgcgagcaatagaacttggacgaactacacccagtgtaacgtcaacacacacgagaaggtcaagaccgctctcaatcttttttatctgacaatcattggacacggcctttcgatcgcgtccctcctgatctctctggggatttttttctacttcaagtcactttcttgccaaaggatcacgttgcataagaatctctttttttccttcgtatgtaatagtgtggtaactattattcatcttacagctgtggcaaacaaccaggccctggttgcgaccaatccagttagctgcaaagtttcacagttcattcatctgtatcttatggggtgcaactacttttggatgctttgcgagggcatttatttacatactctaatagtggtcgcagtgtttgctgagaagcagcaccttatgtggtactattttctgggatgggggtttccacttatccctgcctgtatccacgccatcgctaggtctctttattataatgataattgctggatctctagtgatactcacctgctttacataatacacggacccatctgtgccgctctcctagtgaatcttttcttcttattgaacatcgtgcgggtcctcataactaaactaaaagtgacccatcaagccgagtccaacctctacatgaaggctgtgagggcaaccctgatcctcgtgcccctactcggaattgagtttgttctgattccctggcggcccgaagggaaaatcgcagaagaggtctacgattatatcatgcacatattgatgcacttccaaggcctactcgtcagcacgattttttgcttctttaatggggaggtacaggcaatcctacgaagaaactggaatcagtacaagatacagtttggtaattcattcagcaactctgaggcattacggagcgcttcctacactgtctccacaattagcgatggtcctggatactcacacgattgtccttctgagcacctcaacgggaaaagcatccatgatatcgaaaacgtcttactgaaacccgagaacctttataactag

SEQ ID NO: 159342 - DNA, 1386 bp, Artificial Sequence
  derived and/or modified sequence
atggaaaaaaagtgtactttgaattttctggtactgcttcccttttttatgatactcgtgacagctgaactagaggagtctccagaggacagtatacaacttggcgtaacacgtaataagatcatgactgcccagtacgagtgttatcagaaaattatgcaggatccgatacagcaggccgaaggcgtttactgcaatagaacttgggatgggtggctgtgttggaacgatgttgccgcgggtaccgagtcgatgcagctttgtccagactatttccaggatttcgacccatccgaaaaggtaaccaagatctgtgaccaggatggcaattggttccgacatccagctagcaacaggacctggaccaattacacacagtgcaatgtgaatacccatgagaaagtgaaaactgctttgaacttgttctacctgaccatcataggacatgggttgagcatcgcaagcctgctgatatctttgggcattttcttttacttcaagtcactgtcatgtcagcgcatcaccttgcataagaacctgttcttttcattcgtgtgcaattctgtagtgaccatcattcatctcacagccgtggctaataaccaagctttagtggctacaaaccctgtgagctgcaaagtgagccagttcattcacttatatctcatgggatgcaactatttctggatgctttgtgaagggatttacctacatactctaatagttgtggccgtttttgcagagaaacagcaccttatgtggtattacttcctgggatggggttttcccctgataccagcatgtattcatgctattgctcggagcctctattacaacgacaactgttggatttcaagcgatacgcacttactgtacattattcatggacctatctgcgctgctctgctggtaaatctcttcttcctgctgaacatcgtgcgggtgttgattacaaagctcaaggtgactcatcaagccgaatccaacctttatatgaaggcagtgcgggccactctgatcttggtgcctctgttgggaatcgaatttgtgctgatcccgtggaggcctgagggcaagatcgcagaggaggtgtatgactatattatgcatattctgatgcacttccagggcttgttggtgtccactatcttctgcttttttaatggtgaagtgcaggccattctccgccgaaactggaatcagtataagatccagttcggaaacagttttagcaacagcgaggccctgagatctgcttcctatactgtgtcaacaatctccgacggtcctgggtacagccatgactgcccatcagaacaccttaatggaaaaagtatacatgacattgagaatgtgttgttgaagcctgagaatttatataattag

SEQ ID NO: 159343 - DNA, 1386 bp, Artificial Sequence
  derived and/or modified sequence
atggaaaagaagtgcaccctcaacttcctggtgctccttccatttttcatgatattagttaccgcagagctagaggaatcccccgaagacagcatccagcttggggtaacccgcaacaaaataatgaccgcccagtatgaatgctaccagaagatcatgcaagatccaatacaacaagccgagggggtctactgtaataggacatgggatggctggctgtgttggaatgatgtggcagcagggactgagtccatgcaactctgtcctgattactttcaagattttgatcccagcgagaaggtaaccaagatatgcgatcaggatggcaattggttcaggcatccagcaagcaataggacctggactaactacacccaatgtaacgtgaacactcatgagaaagtgaaaaccgccctaaatctcttttaccttacaatcatcgggcacggcttatccatagcttccctgctgatctctttagggatattcttctatttcaagagtcttagttgccagaggatcaccctccacaagaatctttttttctctttcgtttgcaattcggtcgtgacaatcatacacctgactgcagttgctaacaatcaggccctggtggccacaaatccggtcagctgcaaggtatcccagttcattcatctgtacctgatgggctgcaattacttctggatgttgtgcgaggggatctaccttcatactctcattgtagtggctgtctttgccgaaaagcagcatttgatgtggtactacttcctcgggtggggcttcccccttatccctgcttgcattcacgccatcgcaagaagtctgtattataacgataattgctggatttccagcgacactcacctactgtatattattcatggtcctatctgcgccgcactgctggtgaatcttttcttcttactaaatatcgttcgagtactcataactaaactgaaagtgacacatcaggctgagagtaacttgtacatgaaggccgtgagggcaacactgattctggtcccgttgctggggattgagtttgtgctcataccctggaggcccgaagggaagatcgccgaggaggtttatgactatatcatgcatatccttatgcactttcaaggtctgttggtatctaccatcttttgtttcttcaatggcgaggttcaagccatcctaagaagaaactggaatcagtataagatccagttcgggaacagcttcagcaactccgaggccctccgtagcgcttcttacactgtgagcaccatctctgacggtcccggatatagtcatgactgtccctctgagcacctgaacggaaagtctattcatgacatcgaaaacgttctgcttaagcccgagaatctctacaattag

SEQ ID NO: 159344 - DNA, 114 bp, Artificial Sequence
  derived and/or modified sequence
atggaaaagaagtgcacgctgaatttcctagtgttactacccttctttatgatcctggtcaccgctgaactggaggagtctcccgaagattcaatacagctcggcgtgacttag

SEQ ID NO: 159345 - DNA, 237 bp, Artificial Sequence
  derived and/or modified sequence
atggaaaagaagtgtacacttaacttcctggtgctcctgccattcttcatgatcctggtgaccgcagaactggaagagagccctgaggattcaattcagctgggagtcacaaggaataagattatgaccgcgcagtatgagtgctatcaaaaaattatgcaagaccccatacagcaagctgaaggcgtgtattgcaatagaacatgggacggctggctttgctggaacgacgtgtag

SEQ ID NO: 159346 - DNA, 1386 bp, Artificial Sequence
  derived and/or modified sequence
atggagaagaagtgcaccctgaacttcctggtgctgctgcccttcttcatgatcctggtgacagctgagctggaggagagcccagaagattccatccagctgggcgtgaccaggaacaagatcatgacagcccagtatgagtgctaccagaagatcatgcaggaccccatccagcaggccgagggcgtgtactgcaacagaacctgggatggctggctgtgctggaatgatgtggccgccggcacagagagcatgcagctgtgcccagactacttccaggactttgaccccagcgagaaggtgaccaagatctgtgaccaggacggcaactggttccgccacccagccagcaacagaacctggaccaactacacccagtgcaatgtgaacacccatgagaaggtgaagacagccctgaacctcttctacctgaccatcattggacatggcctgagcatcgccagcctgctgatcagcctgggcatcttcttctacttcaagagcctgagctgccagaggatcaccctgcacaagaacctcttcttctcctttgtgtgcaacagcgtggtgaccatcatccacctgacagctgtggccaacaaccaggccctggtggccaccaaccctgtgtcctgcaaggtgtcccagttcatccacctgtacctgatgggctgcaactacttctggatgctgtgtgagggcatctacctgcacaccctgattgtggtggccgtgtttgctgagaagcagcacctgatgtggtactacttcctgggctggggcttccccctcatcccagcctgcatccacgccatcgcccggagcctgtactacaatgacaactgctggatcagcagtgacacccacctgctgtacatcatccacggccccatctgtgccgccctgctggtgaacctcttcttcctgctgaacatcgtgcgggtgctgatcaccaagctgaaggtgacccaccaggccgagagcaacctgtacatgaaggctgtgcgggccaccctcatcctggtgcccctgctgggcattgaatttgtgctgatcccctggaggcctgagggcaagattgctgaggaggtgtatgactacatcatgcacatcctgatgcacttccagggcctgctggtgtccaccatcttctgcttcttcaacggggaggtgcaggccatcctgcggaggaactggaaccagtacaagatccagtttggaaacagcttcagcaacagcgaggccctgcggagcgccagctacacagtgtccaccatcagtgatggccctggctacagccatgactgccccagcgagcacctgaatggcaagagcatccatgacattgaaaatgtgctgctgaagccagaaaatctctacaactag

SEQ ID NO: 159347 - DNA, 114 bp, Artificial Sequence
  derived and/or modified sequence
atggagaagaagtgcaccctgaacttcctggtgctgctgcccttcttcatgatcctggtgacagctgagctggaggagagcccagaagattccatccagctgggcgtgacctag

SEQ ID NO: 159348 - DNA, 237 bp, Artificial Sequence
  derived and/or modified sequence
atggagaagaagtgcaccctgaacttcctggtgctgctgcccttcttcatgatcctggtgacagctgagctggaggagagcccagaagattccatccagctgggcgtgaccaggaacaagatcatgacagcccagtatgagtgctaccagaagatcatgcaggaccccatccagcaggccgagggcgtgtactgcaacagaacctgggatggctggctgtgctggaatgatgtgtag

SEQ ID NO: 159349 - DNA, 1386 bp, Artificial Sequence
  derived and/or modified sequence
atggagaagaagtgcaccctgaacttcctggtgctgctgcccttcttcatgattttggtcacagccgagcttgaggagtcacctgaggactcaattcagctcggcgttactcgcaacaagatcatgacagctcaatacgaatgctaccagaagatcatgcaggatcccattcaacaggccgaaggcgtgtattgtaatagaacttgggatggatggctgtgctggaatgacgttgccgccggcacagaatccatgcagttatgtcccgattactttcaggattttgatccgtcggaaaaagtgaccaagatctgcgatcaagatggtaactggtttcggcatcccgctagtaaccggacctggactaattacacccagtgcaacgtcaatacacacgagaaggtgaaaactgccttgaacctgttttatctgacaatcataggccacggcctgtccattgcttcactgctaatctccctaggaattttcttttacttcaagagcctgtcatgccagcggattactctgcataaaaacttattttttagtttcgtgtgcaacagtgtggttacaattatccacctgacagctgtcgcaaataatcaagctctggtcgcaacaaatccagtctcttgcaaagtcagtcaattcatccatctgtatttgatgggctgtaactatttttggatgttatgcgaaggaatatacttgcataccttgatagtggttgcagtatttgcagaaaagcagcatctgatgtggtactatttcctggggtggggtttcccccttatacccgcctgcattcacgccatcgcccggagcctttattacaacgacaattgttggatttcatcggatactcacctcctgtacatcatccacggacccatttgcgctgctctcttggttaaccttttttttctgctgaatattgtgagagttctgataacaaagctgaaagtgactcatcaggctgagtcgaacctttatatgaaggcggtacgcgcgaccctgatcctcgtccccctgttaggcatcgaatttgtccttattccttggaggcctgaaggaaagatcgcagaggaagtgtacgactacattatgcacatcctgatgcacttccagggactgcttgtgtccaccattttctgttttttcaatggcgaggtgcaggctatcctgaggcggaactggaaccaatacaagattcagtttgggaattcattttctaatagcgaggcgctgaggagcgcctcttatacagtgtcaactatctcagatggacctggatactcccacgactgtcccagcgagcacctgaacgggaagagcatacacgatatcgagaatgttctgttaaagccggagaacctctacaactag

SEQ ID NO: 159350 - DNA, 1386 bp, Artificial Sequence
  derived and/or modified sequence
atggagaagaagtgcaccctgaacttcctggtgctgctgcccttctttatgattctcgtgaccgccgagctcgaggaaagtcccgaggatagcatccagctgggcgttacgcgcaacaagataatgaccgcccagtacgaatgctaccagaagatcatgcaggacccaatacagcaagcggagggcgtctattgcaacagaacttgggatgggtggctgtgttggaacgatgtggccgctggtacggagagcatgcagctctgtcctgattactttcaggacttcgatccttcggagaaagtgactaagatctgtgatcaggatgggaattggtttcgtcatccagccagcaataggacctggacaaactacacacagtgcaacgtgaacacacacgaaaaagtgaaaaccgctctcaacctgttctaccttaccattatcgggcacggcctgtcaattgcttcgctgctgatctcactgggtatttttttctacttcaagtccctgagctgccagaggattaccctacataagaatctgttcttttcattcgtgtgcaacagcgtggtcaccattatacatttgacggccgttgccaacaatcaggccctggtagccaccaatcctgtgtcatgcaaggtcagccagtttatccatctgtacctgatgggctgtaattacttctggatgctctgcgagggtatctacctccacacattaattgtcgtagcagtctttgctgagaagcaacatcttatgtggtattactttctagggtggggttttcccctaattcctgcctgtatccacgcaatcgctcgcagtttgtattacaatgataactgctggatctcatctgacactcaccttttgtacattattcatgggccaatctgtgctgcactgctggtcaatctctttttcctcttaaacatagttagagttctgatcaccaagctcaaggtgactcaccaggccgaatcaaatctgtacatgaaggccgtgagggccacccttatcttagtgcccttgctgggcattgaattcgtgctgatcccttggagacctgaagggaaaatcgctgaggaggtgtatgactatattatgcacattctgatgcatttccaaggtttgctggtgagcacaatcttttgcttctttaatggcgaggtccaggcaatccttcgccgtaactggaatcaatataagatccaatttggaaactctttcagcaactcagaagcgctgaggagcgcttcttacaccgtatccaccatctctgatggcccaggatactcccacgactgccctagcgagcacttgaatggcaaatcaatccacgacatcgaaaatgtgctactaaagcctgagaacctgtacaactag

SEQ ID NO: 159351 - DNA, 1386 bp, Artificial Sequence
  derived and/or modified sequence
atggagaagaagtgcaccctgaacttcctggtgctgctgcccttcttcatgatcctggtgacagccgagctggaagagtcacctgaagactccatacagctgggcgtgactagaaacaaaatcatgaccgcccagtacgagtgttatcagaagataatgcaggacccaattcagcaggctgaaggcgtatattgcaatcgcacttgggacgggtggctctgctggaatgacgtagccgcgggaaccgagtctatgcagctatgccctgattattttcaagattttgacccttccgagaaggtgacgaaaatttgcgaccaggacgggaattggtttcggcatcccgcaagcaatcgaacatggactaattacacccagtgcaatgtgaacacccacgagaaggtcaaaactgctctgaacctgttctatctcactattattggccacggtctgagtatcgcatctttgctgatctctctggggattttcttctactttaagtctctttcctgtcagcggatcacgctgcataagaatttatttttcagtttcgtgtgcaactccgtcgttacaattatacatctgactgccgtggccaataaccaggccttagttgcaacaaaccctgtaagctgtaaggtgtcacagtttatccatctgtatctgatgggctgcaactatttctggatgctctgcgaaggcatttatctgcacacactcattgtcgtggctgtgttcgctgagaaacaacacctgatgtggtattacttcctcggatggggcttccctctgatcccagcttgcattcatgccatcgcacgatccctttattataacgacaattgctggatctcgtccgatactcatctgttatatattattcacggtcctatttgcgctgcgctccttgtgaacctcttcttcttactaaacatagtgagggtactcatcaccaaattgaaagtaacgcatcaggctgagagtaatctgtacatgaaggccgtgagggccacactgattttagtgcccctgctgggcattgagtttgtcctaataccctggaggcccgaaggtaagatagccgaggaagtctacgattatattatgcatatactgatgcacttccagggtctgttggtgtctactatcttctgctttttcaatggggaagtacaggcgattttgcggagaaattggaatcagtacaagatccagtttggcaactcattttctaacagcgaggcgctccgatccgcatcgtacacagtaagcaccatttcagatggcccaggttatagccacgactgtccttcagagcacttgaacggcaaatcaatacacgatattgaaaacgtgctgctgaagcccgaaaacttgtacaattag

SEQ ID NO: 159352 - DNA, 114 bp, Artificial Sequence
  derived and/or modified sequence
atggagaagaagtgcaccctgaacttcctggtgctgctgcccttctttatgatcctcgtgacagctgagcttgaagagagccccgaagacagcattcagctcggcgtcacatag

SEQ ID NO: 159353 - DNA, 237 bp, Artificial Sequence
  derived and/or modified sequence
atggagaagaagtgcaccctgaacttcctggtgctgctgcccttctttatgattctggtcacagccgagctggaggagtcacccgaggacagcattcagctcggagtgaccaggaacaagattatgactgcccaatatgagtgttaccaaaagatcatgcaagacccgattcagcaggccgagggcgtgtattgtaataggacctgggatggttggctgtgttggaatgacgtgtag

SEQ ID NO: 159354 - DNA, 1386 bp, Artificial Sequence
  derived and/or modified sequence
atggagaaaaaatgcaccttgaactttctggtgcttctgccgttctttatgattctagtcactgccgagcttgaggaaagccccgaagatagcattcagcttggcgtaaccagaaacaagattatgaccgcccaatatgagtgctaccagaagattatgcaggatcccattcagcaggcagagggggtgtactgcaacagaacatgggatggttggctgtgctggaacgatgtcgcagcaggcacagaatctatgcaactgtgcccagactattttcaggactttgacccctcagagaaggtgacaaagatctgcgatcaggatggcaactggtttcgtcaccctgccagtaatagaacctggacaaattacacccagtgcaacgtgaacacacatgagaaagtcaagacagctcttaatctgttctatctcactattatcggtcacgggctatcgatcgctagcctactgataagtttggggattttcttctacttcaagtccttatcctgccagagaatcaccctgcacaagaatctgttcttctcattcgtctgcaactctgtggtgacaataattcacctcacggcggtggctaacaaccaagcactggtggcaaccaacccagtgtcatgtaaggtctcccagttcatacacctatacctgatgggatgcaattacttttggatgctttgcgaaggaatctacttgcacaccctgatcgtggtcgctgtgtttgcagaaaagcagcacctgatgtggtattacttcttaggttgggggttccctctgattcccgcttgcatccacgccattgccagatctctctattataatgacaactgttggatatcatcagacacacatcttttgtacatcatccacggccctatttgcgccgcattactcgttaacttatttttcctcttgaatatcgtccgggtcttgataaccaaattaaaggtgacccaccaggcggaatccaacctttacatgaaggccgtgagggccactctcatcctcgtgcccctcctcgggatcgaattcgtgctcatcccctggcgaccagagggtaaaatcgcagaagaggtctatgactatattatgcatattcttatgcatttccagggcttattggttagcacgatattctgtttttttaacggggaggtgcaagcaatcttgcggagaaattggaatcaatacaagatccagttcggcaattcctttagtaactcagaggccctgcggagcgcctcttacacagtgtccacaattagcgacggcccaggttactctcacgactgccctagcgaacacctgaacggcaagtctattcacgacattgagaacgttcttctcaagccagaaaacctgtacaattag

SEQ ID NO: 159355 - DNA, 1386 bp, Artificial Sequence
  derived and/or modified sequence
atggaaaagaaatgtacactgaattttttggtcttgctacctttctttatgatactggtaacggctgagcttgaggaaagccctgaagactctatccagctgggagtgactagaaacaaaatcatgaccgcccaatacgagtgctatcagaagattatgcaggatcccattcagcaagccgagggggtatattgcaatcgcacctgggatggctggctctgctggaatgatgttgcagctggtactgagagcatgcagctctgcccagactactttcaggactttgaccccagcgagaaggtcacaaagatatgcgaccaggacggaaattggtttcgccatcctgcgagcaatcggacatggactaattacactcagtgcaatgtgaacacacatgaaaaagtgaaaacagcgctgaatctgttttacctaacaattattgggcacggtctgagtatagccagtctccttatttccctgggcatatttttttacttcaaaagcctcagctgtcagcggatcaccttgcataaaaatttatttttttccttcgtttgcaattcagtcgtcaccattatacacctcactgcagtggctaacaaccaagcactggtcgcgacaaatccagtttcttgcaaagttagccagttcattcacttatacctgatgggctgtaattacttctggatgctgtgcgaaggcatatatctgcataccttaatcgtggtggcagtgttcgccgagaagcagcacctgatgtggtactattttctcggctggggattccccctgattccagcttgtattcatgcgatcgcgagatcactttattataatgataactgctggatatcctccgacacccatctcctgtacatcatacatgggcctatttgcgctgcgctcctcgtgaacttgttcttcctgctgaacatcgtcagggttttgattactaaacttaaggttacacatcaggccgagtcgaacctctatatgaaggctgtcagggccacactaatcctcgtgcctctgttgggaattgagtttgtcctcattccttggagacccgaaggaaaaatagccgaggaggtatatgattatattatgcacatcctaatgcacttccagggcctgctagtgtctaccatcttctgtttttttaatggcgaagtccaggcaatcttacgaaggaattggaaccagtacaagattcagttcggcaatagtttcagtaattcagaagcccttagatccgctagctatactgtgtcaaccatttctgatggacctgggtactcccacgactgcccaagcgagcacctcaatgggaagtccattcacgacatcgaaaacgtgctgctgaagcctgaaaatctctacaactag

SEQ ID NO: 159356 - DNA, 1386 bp, Artificial Sequence
  derived and/or modified sequence
atggaaaaaaagtgtaccctcaattttctagttctgctacccttcttcatgattcttgtgacagccgagcttgaggaatcccccgaggactctatacagctgggcgtgaccaggaataagattatgacagcccagtacgagtgttaccagaagatcatgcaggaccctatccagcaagccgaaggcgtgtactgcaaccgcacttgggacggatggctgtgttggaacgatgtagccgctggaaccgagtctatgcagctgtgtccagactattttcaggatttcgaccctagcgagaaagttaccaagatctgtgaccaagatgggaactggtttaggcacccagcaagtaaccgtacttggacaaactacacccagtgcaacgtaaacacgcacgagaaagtgaagacggccttgaacctattctacctcaccatcattggtcatggattgtcaattgcctctctgctgatttccttaggaatcttcttttattttaaatccctttcttgtcaaagaatcacgcttcacaaaaatctgttcttcagcttcgtgtgtaactccgtcgtgaccattatccacctgaccgccgtagcgaataaccaggcgctcgtggcgaccaatcccgtgtcctgcaaggtatctcagtttattcacctgtatctcatgggatgcaactatttctggatgctgtgcgagggcatctatctacatactttgatcgtggtcgccgtgttcgctgagaaacagcatctaatgtggtattactttctgggctggggcttccccttgattcccgcatgcatccatgccatagctcgcagcctgtattataacgacaattgctggatctcctccgatacacacctgctgtatatcatccacgggccaatatgtgcagccctcctggtgaacctcttctttctgcttaatatcgtgcgtgtgctgattacgaagctgaaagttactcaccaggcagagtccaatctttacatgaaggccgtgcgggctaccctcattctcgtgcccttactaggcatcgagtttgtgcttatcccctggcgccctgagggaaagatcgctgaagaagtctatgactacattatgcatattctcatgcactttcaagggctgctcgtctctacaatcttctgcttctttaatggagaggttcaagctattctacgcaggaactggaaccagtataaaattcagttcggcaattccttttctaactcagaggctctccgatcagcttcctacaccgtgagcaccattagcgatggcccaggatactcccacgattgccccagtgagcatctcaatggtaagagcatccacgatatcgagaacgtgttgttgaaacccgaaaatctctataactag

SEQ ID NO: 159357 - DNA, 114 bp, Artificial Sequence
  derived and/or modified sequence
atggaaaaaaagtgcacccttaacttccttgtgctgctacctttttttatgattttggtgacagctgagctggaggagtcacccgaagactccatccagttgggggtcacctag

SEQ ID NO: 159358 - DNA, 237 bp, Artificial Sequence
  derived and/or modified sequence
atggagaagaaatgcactctgaattttctcgtcttactgccttttttcatgattctggtgactgccgagttagaggaaagccctgaggacagcatacaattgggcgtgacacgcaataagatcatgactgcacagtatgaatgttatcagaaaatcatgcaggatcctatccagcaggcagaaggtgtgtactgcaatcggacctgggacgggtggctctgctggaacgatgtatag

SEQ ID NO: 159359 - DNA, 1386 bp, Artificial Sequence
  derived and/or modified sequence
atggagaagaagtgcaccctgaacttcctggtgctgctgcccttcttcatgatcctggtgaccgccgagctggaggagagccccgaggacagcatccagctgggcgtgaccagaaacaagatcatgaccgcccagtacgagtgctaccagaagatcatgcaggaccccatccagcaggccgagggcgtgtactgcaacagaacctgggacggctggctgtgctggaacgacgtggccgccggcaccgagagcatgcagctgtgccccgactacttccaggacttcgaccccagcgagaaggtgaccaagatctgcgaccaggacggcaactggttcagacaccccgccagcaacagaacctggaccaactacacccagtgcaacgtgaacacccacgagaaggtgaagaccgccctgaacctgttctacctgaccatcatcggccacggcctgagcatcgccagcctgctgatcagcctgggcatcttcttctacttcaagagcctgagctgccagagaatcaccctgcacaagaacctgttcttcagcttcgtgtgcaacagcgtggtgaccatcatccacctgaccgccgtggccaacaaccaggccctggtggccaccaaccccgtgagctgcaaggtgagccagttcatccacctgtacctgatgggctgcaactacttctggatgctgtgcgagggcatctacctgcacaccctgatcgtggtggccgtgttcgccgagaagcagcacctgatgtggtactacttcctgggctggggcttccccctgatccccgcctgcatccacgccatcgccagaagcctgtactacaacgacaactgctggatcagcagcgacacccacctgctgtacatcatccacggccccatctgcgccgccctgctggtgaacctgttcttcctgctgaacatcgtgagagtgctgatcaccaagctgaaggtgacccaccaggccgagagcaacctgtacatgaaggccgtgagagccaccctgatcctggtgcccctgctgggcatcgagttcgtgctgatcccctggagacccgagggcaagatcgccgaggaggtgtacgactacatcatgcacatcctgatgcacttccagggcctgctggtgagcaccatcttctgcttcttcaacggcgaggtgcaggccatcctgagaagaaactggaaccagtacaagatccagttcggcaacagcttcagcaacagcgaggccctgagaagcgccagctacaccgtgagcaccatcagcgacggccccggctacagccacgactgccccagcgagcacctgaacggcaagagcatccacgacatcgagaacgtgctgctgaagcccgagaacctgtacaactag

SEQ ID NO: 159360 - DNA, 114 bp, Artificial Sequence
  derived and/or modified sequence
atggagaagaagtgcaccctgaacttcctggtgctgctgcccttcttcatgatcctggtgaccgccgagctggaggagagccccgaggacagcatccagctgggcgtgacctag

SEQ ID NO: 159361 - DNA, 237 bp, Artificial Sequence
  derived and/or modified sequence
atggagaagaagtgcaccctgaacttcctggtgctgctgcccttcttcatgatcctggtgaccgccgagctggaggagagccccgaggacagcatccagctgggcgtgaccagaaacaagatcatgaccgcccagtacgagtgctaccagaagatcatgcaggaccccatccagcaggccgagggcgtgtactgcaacagaacctgggacggctggctgtgctggaacgacgtgtag

SEQ ID NO: 159362 - protein, 1092 aa, Artificial Sequence
  derived and/or modified sequence
MMDSPKIGNGLPVIGPGTDIGISSLHMVGYLGKNFDSAKVPSDEYCPACREKGKLKALKTYRISFQESIFLCEDLQCIYPLGSKSLNNLISPDLEECHTPHKPQKRKSLESSYKDSLLLANSKKTRNYIAIDGGKVLNSKHNGEVYDETSSNLPDSSGQQNPIRTADSLERNEILEADTVDMATTKDPATVDVSGTGRPSPQNEGCTSKLEMPLESKCTSFPQALCVQWKNAYALCWLDCILSALVHSEELKNTVTGLCSKEESIFWRLLTKYNQANTLLYTSQLSGVKDGDCKKLTSEIFAEIETCLNEVRDEIFISLQPQLRCTLGDMESPVFAFPLLLKLETHIEKLFLYSFSWDFECSQCGHQYQNRHMKSLVTFTNVIPEWHPLNAAHFGPCNNCNSKSQIRKMVLEKVSPIFMLHFVEGLPQNDLQHYAFHFEGCLYQITSVIQYRANNHFITWILDADGSWLECDDLKGPCSERHKKFEVPASEIHIVIWERKISQVTDKEAACLPLKKTNDQHALSNEKPVSLTSCSVGDAASAETASVTHPKDISVAPRTLSQDTAVTHGDHLLSGPKGLVDNILPLTLEETIQKTASVSQLNSEAFLLENKPVAENTGILKTNTLLSQESLMASSVSAPCNEKLIQDQFVDISFPSQVVNTNMQSVQLNTEDTVNTKSVNNTDATGLIQGVKSVEIEKDAQLKQFLTPKTEQLKPERVTSQVSNLKKKETTADSQTTTSKSLQNQSLKENQKKPFVGSWVKGLISRGASFMPLCVSAHNRNTITDLQPSVKGVNNFGGFKTKGINQKASHVSKKARKSASKPPPISKPPAGPPSSNGTAAHPHAHAASEVLEKSGSTSCGAQLNHSSYGNGISSANHEDLVEGQIHKLRLKLRKKLKAEKKKLAALMSSPQSRTVRSENLEQVPQDGSPNDCESIEDLLNELPYPIDIASESACTTVPGVSLYSSQTHEEILAELLSPTPVSTELSENGEGDFRYLGMGDSHIPPPVPSEFNDVSQNTHLRQDHNYCSPTKKNPCEVQPDSLTNNACVRTLNLESPMKTDIFDEFFSSSALNALANDTLDLPHFDEYLFENY

SEQ ID NO: 159363 - DNA, 3279 bp, Artificial Sequence
  derived and/or modified sequence
atgatggacagccccaagatcggcaacggcctgcccgtgatcggccccggcaccgacatcggcatcagcagcctgcacatggtgggctacctgggcaagaacttcgacagcgccaaggtgcccagcgacgagtactgccccgcctgcagagagaagggcaagctgaaggccctgaagacctacagaatcagcttccaggagagcatcttcctgtgcgaggacctgcagtgcatctaccccctgggcagcaagagcctgaacaacctgatcagccccgacctggaggagtgccacaccccccacaagccccagaagagaaagagcctggagagcagctacaaggacagcctgctgctggccaacagcaagaagaccagaaactacatcgccatcgacggcggcaaggtgctgaacagcaagcacaacggcgaggtgtacgacgagaccagcagcaacctgcccgacagcagcggccagcagaaccccatcagaaccgccgacagcctggagagaaacgagatcctggaggccgacaccgtggacatggccaccaccaaggaccccgccaccgtggacgtgagcggcaccggcagacccagcccccagaacgagggctgcaccagcaagctggagatgcccctggagagcaagtgcaccagcttcccccaggccctgtgcgtgcagtggaagaacgcctacgccctgtgctggctggactgcatcctgagcgccctggtgcacagcgaggagctgaagaacaccgtgaccggcctgtgcagcaaggaggagagcatcttctggagactgctgaccaagtacaaccaggccaacaccctgctgtacaccagccagctgagcggcgtgaaggacggcgactgcaagaagctgaccagcgagatcttcgccgagatcgagacctgcctgaacgaggtgagagacgagatcttcatcagcctgcagccccagctgagatgcaccctgggcgacatggagagccccgtgttcgccttccccctgctgctgaagctggagacccacatcgagaagctgttcctgtacagcttcagctgggacttcgagtgcagccagtgcggccaccagtaccagaacagacacatgaagagcctggtgaccttcaccaacgtgatccccgagtggcaccccctgaacgccgcccacttcggcccctgcaacaactgcaacagcaagagccagatcagaaagatggtgctggagaaggtgagccccatcttcatgctgcacttcgtggagggcctgccccagaacgacctgcagcactacgccttccacttcgagggctgcctgtaccagatcaccagcgtgatccagtacagagccaacaaccacttcatcacctggatcctggacgccgacggcagctggctggagtgcgacgacctgaagggcccctgcagcgagagacacaagaagttcgaggtgcccgccagcgagatccacatcgtgatctgggagagaaagatcagccaggtgaccgacaaggaggccgcctgcctgcccctgaagaagaccaacgaccagcacgccctgagcaacgagaagcccgtgagcctgaccagctgcagcgtgggcgacgccgccagcgccgagaccgccagcgtgacccaccccaaggacatcagcgtggcccccagaaccctgagccaggacaccgccgtgacccacggcgaccacctgctgagcggccccaagggcctggtggacaacatcctgcccctgaccctggaggagaccatccagaagaccgccagcgtgagccagctgaacagcgaggccttcctgctggagaacaagcccgtggccgagaacaccggcatcctgaagaccaacaccctgctgagccaggagagcctgatggccagcagcgtgagcgccccctgcaacgagaagctgatccaggaccagttcgtggacatcagcttccccagccaggtggtgaacaccaacatgcagagcgtgcagctgaacaccgaggacaccgtgaacaccaagagcgtgaacaacaccgacgccaccggcctgatccagggcgtgaagagcgtggagatcgagaaggacgcccagctgaagcagttcctgacccccaagaccgagcagctgaagcccgagagagtgaccagccaggtgagcaacctgaagaagaaggagaccaccgccgacagccagaccaccaccagcaagagcctgcagaaccagagcctgaaggagaaccagaagaagcccttcgtgggcagctgggtgaagggcctgatcagcagaggcgccagcttcatgcccctgtgcgtgagcgcccacaacagaaacaccatcaccgacctgcagcccagcgtgaagggcgtgaacaacttcggcggcttcaagaccaagggcatcaaccagaaggccagccacgtgagcaagaaggccagaaagagcgccagcaagcccccccccatcagcaagccccccgccggcccccccagcagcaacggcaccgccgcccacccccacgcccacgccgccagcgaggtgctggagaagagcggcagcaccagctgcggcgcccagctgaaccacagcagctacggcaacggcatcagcagcgccaaccacgaggacctggtggagggccagatccacaagctgagactgaagctgagaaagaagctgaaggccgagaagaagaagctggccgccctgatgagcagcccccagagcagaaccgtgagaagcgagaacctggagcaggtgccccaggacggcagccccaacgactgcgagagcatcgaggacctgctgaacgagctgccctaccccatcgacatcgccagcgagagcgcctgcaccaccgtgcccggcgtgagcctgtacagcagccagacccacgaggagatcctggccgagctgctgagccccacccccgtgagcaccgagctgagcgagaacggcgagggcgacttcagatacctgggcatgggcgacagccacatccccccccccgtgcccagcgagttcaacgacgtgagccagaacacccacctgagacaggaccacaactactgcagccccaccaagaagaacccctgcgaggtgcagcccgacagcctgaccaacaacgcctgcgtgagaaccctgaacctggagagccccatgaagaccgacatcttcgacgagttcttcagcagcagcgccctgaacgccctggccaacgacaccctggacctgccccacttcgacgagtacctgttcgagaactactag

SEQ ID NO: 159364 - DNA, 3279 bp, Artificial Sequence
  derived and/or modified sequence
atgatggatagtcctaaaatcggcaacggcctacccgtaatcggcccgggtactgatatcggaatctcatctctccatatggtaggttacctgggaaagaacttcgactccgcaaaagtgccatccgatgaatactgccccgcatgtagagaaaaagggaaattaaaggctctgaagacatatcgaatctcgtttcaggaatccatctttttgtgcgaagatctccaatgtatctatcctcttgggagtaaaagtctcaataacctcatttcacccgatctggaagaatgtcacaccccacataaaccccagaaaagaaaatccctggaaagctcttacaaagattctctactgctggccaacagtaaaaagacacgaaactacatcgccattgacggtggaaaagtgctgaacagcaagcataatggggaagtgtatgacgaaacctctagcaatttgccagattcctccgggcagcagaatccgattcggactgcggattctttggaacggaatgagatcctcgaggcagataccgtcgatatggcgaccaccaaagaccctgccaccgtcgatgttagtggcaccggtcgccctagtccccagaacgaggggtgtacatctaaattagagatgccgttggagtctaaatgtacatctttcccccaggctctctgtgtacagtggaaaaacgcctatgctctgtgttggctggactgcattctctcagccctggtacatagtgaggagttaaaaaataccgttaccggcctgtgttctaaggaagagagcatattctggaggctgctgacgaaatacaaccaggccaataccctgttgtatacctctcagctgagtggcgtcaaggacggggactgcaagaagctaacctcagagatattcgctgagattgagacatgcctcaatgaagtaagagacgaaatttttatctcactccagccacaattaagatgtactttaggggatatggagtcccctgttttcgcattccctctcttgcttaagttggagacccatatcgagaagctgtttctctattccttttcttgggatttcgaatgcagccagtgtggacaccaataccagaaccggcatatgaaatccctcgtgaccttcactaacgtgattccagagtggcaccccctcaatgcggctcactttgggccctgcaacaactgcaacagcaagtctcagatcagaaaaatggtgttggaaaaggtatcacctattttcatgctacacttcgtcgaaggcctcccccaaaatgacttgcagcattatgccttccactttgaaggatgtctctaccagatcacctcagtgatccaatatcgagcgaataatcattttataacctggatcctcgacgccgatggctcctggcttgagtgtgacgatctgaagggaccctgtagcgagaggcataagaagtttgaggtgcccgcatcagagatacatattgtgatatgggagcgcaagatatctcaagtcaccgacaaggaggccgcatgcttgccccttaaaaagacgaatgatcagcacgccctaagcaacgaaaaacctgtatctctcacatcttgtagcgttggtgatgccgcctctgccgagactgctagcgtcacacatccgaaggatatttccgtcgcaccaaggactttgagtcaagatactgccgtcacacacggcgaccacttgctttcaggacccaaaggcctagtagacaatatcctgccgctcacccttgaggaaacaatccaaaagactgcctccgtcagtcagcttaactccgaggctttcctgctggaaaacaagcccgtcgctgaaaatactggcattctgaagactaatacgttactttcccaggagtcgctgatggcaagctccgtgtccgcaccatgcaatgagaaattaattcaggatcagtttgttgatatttcgttcccctcgcaggtggtcaataccaatatgcagagtgtgcagctgaacaccgaagacacagtgaatactaagtctgtgaacaacactgatgccacgggcttgattcagggcgtaaagagcgttgagattgagaaggatgcccagcttaagcagtttttaaccccaaagaccgaacagcttaaacctgagagagtgactagtcaggtgtcaaacctgaaaaagaaggagactacagctgactctcagaccacaacttccaagagtctccaaaatcagtctctgaaggaaaatcagaaaaagccattcgtgggcagctgggtcaagggtctgatctcacgcggggcctcttttatgccgttatgcgttagtgcgcataaccgcaataccataacagaccttcagccttctgtcaagggtgtcaacaacttcggtggctttaagacaaagggaatcaaccagaaggcctcacacgtgtccaagaaagccaggaagagcgccagtaagccaccccccattagcaagcctccagccggccccccttcaagtaatggaactgccgcccacccacacgctcacgccgcctctgaagttctagagaaaagcggatccacctcatgcggcgcgcaactgaatcactcgtcttacgggaatggcatttcctctgccaaccatgaggatctggtggaaggccagatccataagctgagactgaagctgcgcaagaaactgaaggccgagaaaaaaaagctggcagctctgatgagttctccacagtcaagaaccgtgagatctgagaaccttgagcaagtcccgcaggacggatccccaaacgactgcgaaagtatagaagatctgctcaatgagcttccctatccaatcgacatcgcatccgaatccgcctgtactactgtccccggcgtcagtctgtattctagccagactcatgaagagatcctggcagagcttctgtcgcccacacccgtctctacagagctgtcggagaatggagagggcgattttcggtacctgggaatgggcgatagtcatattcccccccccgtcccctcagaatttaatgatgtcagtcagaatactcacttgaggcaagaccacaactattgctctcccaccaagaagaacccgtgtgaagtgcaacctgattcgctgacaaataatgcgtgcgtaaggaccttgaacctcgaatcccccatgaaaaccgatatcttcgacgagttctttagcagttcagcactcaatgcactcgcaaatgacacactggatctccctcacttcgacgaatatctcttcgagaattattag

SEQ ID NO: 159365 - DNA, 3279 bp, Artificial Sequence
  derived and/or modified sequence
atgatggacagccccaagattggaaatggcctgcccgtcatcggccctggaacagacatcggcatcagcagcctgcacatggtgggctacctgggcaagaactttgattctgccaaggtgcccagtgatgagtactgcccagcctgccgggagaagggcaagctgaaggccctgaagacctaccgcatctccttccaggagagcatcttcctgtgtgaggacctgcagtgcatctaccccctgggcagcaagagcctgaacaacctgatcagcccagacctggaggagtgccacaccccccacaagccccagaagaggaagagcctggagagcagctacaaggacagcctgctgctggccaacagcaagaagaccaggaactacatcgccattgatggcggcaaggtgctgaacagcaagcacaacggggaggtgtatgatgagaccagcagcaacctgcctgacagcagcggccagcagaaccccatcagaacagctgacagcctggagagaaatgagatcctggaggccgacacagtggacatggccaccaccaaggaccctgccaccgtggatgtgtctggcaccggccggcccagcccccagaatgaaggctgcaccagcaagctggagatgcccctggagagcaagtgcaccagcttcccccaggccctgtgtgtgcagtggaagaatgcctatgccctgtgctggctggactgcatcctgagcgccctggtgcacagcgaggagctgaagaacacagtgacaggcctgtgcagcaaggaggagagcatcttctggaggctgctgaccaagtacaaccaggccaacaccctgctgtacaccagccagctgagcggcgtgaaggatggagactgcaagaagctgaccagcgagatctttgctgagattgagacctgcctgaatgaggtgagagatgagatcttcatcagcctgcagccccagctgcgctgcaccctgggggacatggagagccctgtgtttgccttccccctgctgctgaagctggagacccacatcgagaagctgttcctgtacagcttctcctgggactttgagtgcagccagtgtggccaccagtaccagaacagacacatgaagagcctggtgaccttcaccaacgtcatccctgagtggcaccccctgaatgctgcccacttcggcccctgcaacaactgcaacagcaagagccagatcaggaagatggtgctggagaaggtgagccccatcttcatgctgcactttgtggagggcctgccccagaatgacctgcagcactacgccttccactttgagggctgcctgtaccagatcaccagcgtcatccagtaccgggccaacaaccacttcatcacctggatcctggatgctgatggctcctggctggagtgtgatgacctgaagggcccctgcagcgagcggcacaagaagtttgaggtgcctgccagcgagatccacatcgtcatctgggagaggaagatcagccaggtgacagacaaggaggccgcctgcctgcccctgaagaagaccaatgaccagcacgccctgagcaatgagaagcctgtgtccctgaccagctgcagcgtgggagatgctgccagcgctgagacagcctctgtgacccaccccaaggacatctctgtggcccccaggaccctgagccaggacacagctgtgacccacggggaccacctgctgagcggccccaagggcctggtggacaacatcctgcccctgaccctggaggagaccatccagaagacagcctctgtgtcccagctgaacagcgaggccttcctgctggagaacaagcctgtggctgaaaatacaggcatcctgaagaccaacaccctgctgagccaggagagcctgatggccagctctgtgtctgccccctgcaatgagaagctgatccaggaccagtttgtggacatctccttccccagccaggtggtgaacaccaacatgcagagcgtgcagctgaacacagaagatactgtgaacaccaagtctgtgaacaacacagatgccaccggcctcatccagggcgtgaagtctgtggagattgagaaggatgcccagctgaagcagttcctgacccccaagacagagcagctgaagccagagcgggtgaccagccaggtgagcaacctgaagaagaaggagaccacagctgacagccagaccaccaccagcaagagcctgcagaaccagagcctgaaggagaaccagaagaagccctttgtgggctcctgggtgaagggcctcatcagcagaggagccagcttcatgcccctgtgtgtgtctgcccacaacagaaacaccatcacagacctgcagcccagcgtgaagggcgtgaacaactttggaggcttcaagaccaagggcatcaaccagaaggccagccacgtgtccaagaaggccaggaagagcgccagcaagcccccacccatcagcaagcccccagctggcccccccagcagcaatggaacagctgcccacccccacgcccacgccgccagcgaggtgctggagaagagcggcagcaccagctgtggggcccagctgaaccacagcagctatggaaatggcatcagcagcgccaaccacgaggacctggtggagggccagatccacaagctgcggctgaagctgaggaagaagctgaaggccgagaagaagaagctggccgccctgatgagcagcccccagagcaggacagtgcgctctgagaacctggagcaggtgccccaggacggcagccccaatgactgtgagagcattgaggacctgctgaatgagctgccctaccccatcgacatcgccagcgagagcgcctgcaccaccgtgcctggggtgtccctgtacagcagccagacccatgaggagatcctggccgagctgctgagccccacccctgtgtccacagagctgtctgaaaatggagagggggacttccgctacctgggcatgggagacagccacatccccccacctgtgcccagcgagttcaatgatgtgtcccagaacacccacctgcggcaggaccacaactactgcagccccaccaagaagaacccctgtgaggtgcagcctgacagcctgaccaacaatgcctgtgtgaggaccctgaacctggagagccccatgaagacagacatctttgatgagttcttcagcagcagcgccctgaatgccctggccaatgacaccctggacctgccccactttgatgagtacctgtttgagaactactag

SEQ ID NO: 159366 - DNA, 3279 bp, Artificial Sequence
  derived and/or modified sequence
atgatggacagccccaagatcggcaacggcctgcccgtgatcggcccgggcacagatatcgggatctcaagcttacacatggtgggatatctgggcaagaatttcgactccgccaaggtgcccagcgatgagtattgcccagcctgtagggagaaagggaaactgaaagctcttaagacatataggatcagtttccaggagtccatctttctttgcgaggatctgcagtgcatctaccctttggggtctaagtccctcaataacctcatttctcccgacctggaagagtgtcatactccacataaaccacagaaacgaaagagcctggaatcttcatacaaagacagtcttcttctggccaactcaaagaagacccggaattacattgcaattgatgggggtaaggtgctgaatagcaaacataatggcgaagtttacgacgagaccagtagtaacctgcctgatagcagcggccagcagaatcctatcagaactgcagactcattggagagaaacgaaatactggaagcggacacagtggacatggccaccacaaaagatccagccacagtggatgttagtgggaccggtcgcccatccccccagaacgagggctgcacttcaaagctggaaatgccgctggaaagtaaatgtacatccttcccccaggccctgtgtgtacagtggaagaatgcttacgcactgtgctggctggactgcatcctatccgctcttgtgcactccgaagagctcaagaacactgtgacgggtctctgctccaaagaggagtccatattctggcggctactgacaaagtataaccaggccaacaccctgttatatacgtcacagctttccggagtgaaagatggagattgcaagaagctcacatcagaaatctttgcagagattgagacctgtcttaatgaggtgcgggacgagatctttatcagcttgcagccccaacttcgttgcactttgggcgatatggaatcacccgtttttgcatttccgctgctgctgaaactcgagacccatatagaaaaactgttcctctactctttttcctgggattttgaatgctcacagtgtggtcatcagtaccaaaatcgccacatgaagtccctcgttacattcacaaacgttatcccagagtggcaccctctcaacgctgctcacttcggaccctgcaacaactgtaattccaaatcacagattcgaaagatggttctcgagaaagtttcgcctatctttatgctacacttcgtggagggactgcctcaaaatgacctccaacactacgcctttcactttgaagggtgtctttatcaaataactagtgtcatccaataccgcgccaacaatcattttatcacatggatactggatgcagacggttcatggctagaatgcgatgatctgaagggaccatgcagcgaacggcataagaagttcgaggttcccgcaagtgagattcacatcgtcatctgggagagaaagattagccaggtgacagacaaggaggccgcatgcctgccattaaaaaaaacaaacgatcagcacgccctatcaaacgaaaagcctgtatcactcacatcctgcagtgtgggcgatgctgcttccgctgagactgccagtgtgacgcatccaaaagatatttcagtggctccaaggaccctcagccaggacactgccgtaacccatggagatcacctactcagtggtcctaaagggctggttgataacatcctgcccttaaccctggaagaaactatccagaaaacagcctcggtttcgcaactgaactccgaggcttttctgctggaaaacaagccagttgcggagaatactggaatcctgaagactaatactctgctctcacaggagagtctgatggcttcatccgtctctgcgccctgcaacgagaagctgattcaggatcagtttgttgacatttcgttcccctcccaggtcgtcaataccaatatgcagtcggttcagctaaatacagaagacacagtcaatacaaaatccgtaaataatacagatgcaacgggcctgatacagggcgttaagagcgtagagatcgagaaagatgcccagctgaagcagtttttaactcctaagaccgagcagcttaaacccgagcgcgtaactagccaggtttctaatttgaagaaaaaagagaccaccgcagactcccagactacgacctctaagtcacttcagaatcagtccctcaaggagaatcagaagaaaccgtttgttggaagttgggtgaagggattgatctcacgcggagcctcgtttatgcccttgtgcgtgtccgcccacaatcggaacactattaccgatctacaaccttcagtgaaaggagtcaacaattttgggggttttaagacaaagggcatcaatcagaaagccagccacgtaagtaagaaggcacgtaaatcagctagcaagccacctcccatctctaaacctcctgccggcccaccctcttctaacggtactgctgcacatcctcatgctcatgccgcatctgaagtactggagaagtccgggtcgacttcttgcggtgcccagctaaaccattcgtcctacggaaacggcatttcttccgcaaatcatgaggacctggtggaaggacagatccataaactccgcctgaagctgagaaagaagcttaaggcggaaaagaaaaagttggcagctctgatgagctccccccaatctcgtaccgttcgatcagaaaatctagaacaggtgccacaggacgggtctcctaacgactgtgaatctatcgaggatttgctgaacgagctgccttaccctatcgatatcgcaagtgaatcggcatgcaccactgtccctggtgtaagtctatattctagtcagactcacgaagagatcttggccgagctattgtcccccacacctgtttctaccgagctcagtgagaacggagagggcgacttcaggtacctgggaatgggcgattcccatatacctccacccgtaccttcagaatttaacgacgtgtcccagaacacccatttgaggcaggaccataattattgcagccccactaagaagaacccctgcgaggtgcagcctgactccctgacaaataacgcctgtgtgcgtacgttaaaccttgagtccccgatgaaaaccgatatttttgatgagttcttcagcagcagcgctctcaacgcccttgccaatgatactctggacctgccccatttcgatgaatatctcttcgagaactactag

SEQ ID NO: 159367 - DNA, 3279 bp, Artificial Sequence
  derived and/or modified sequence
atgatggactccccgaagatcggaaacggactgccagtgatcgggccaggcaccgacatagggatcagctccctgcacatggtgggttacctgggcaaaaatttcgactcagcaaaggttccatctgatgaatattgcccagcttgcagagaaaaagggaaacttaaggccctcaagacatataggatcagcttccaggaatcaatattcctgtgtgaagacctacaatgcatttatcccctggggtcaaaatcactgaataatttaatcagccccgatctcgaagaatgtcatacgccccataaaccccaaaagagaaagagtctggagagctcctacaaagactcactactgctggcaaactcaaaaaagacccgcaattatatcgcgatagatgggggtaaagtgctgaactcgaagcacaacggagaggtgtatgatgagacctcatccaaccttccggacagcagcggccagcagaatccaatccgaacagcagactcactggagcgcaacgaaatcctggaggcggacacggtggacatggctacgacaaaggacccagccaccgttgacgtctcgggtacagggcgtccatcccctcagaacgagggctgtactagcaaattggaaatgcctcttgagtccaagtgcacctccttcccgcaggccctctgtgtgcagtggaagaatgcatatgcattgtgctggttggattgtatcctttccgcactggtgcactcggaagagctcaaaaacacagtaactgggctgtgttcaaaagaagagtcaatattttggcgcctgctgactaagtataatcaggccaacactcttctttatacctctcagctgagcggcgtgaaagacggagactgtaaaaagctgaccagcgagatcttcgctgagattgagacatgtttgaacgaagtgcgtgacgaaatctttatcagtctgcagccacagctgcggtgtaccctaggcgatatggagagccccgtttttgccttccctctgctgctcaaacttgagacacatattgagaagctgtttctgtattcattttcttgggacttcgagtgcagccaatgtggccaccagtaccagaatagacatatgaaatctctggtgacattcacgaacgtgatacctgagtggcatcccctgaatgcagctcattttggcccttgcaacaactgtaactccaagtcacagatacgcaaaatggtgttggagaaagtctcccccatctttatgctgcactttgtggagggtttacctcagaatgatctacagcactacgcctttcatttcgaaggttgtctgtaccagattacctctgtcatacagtacagagccaataaccacttcatcacctggatcttagacgcggacggatcctggctcgaatgtgacgatctcaagggcccttgctccgaaaggcacaagaagttcgaggtgccagcttccgaaatacacattgttatttgggaacgaaagatatctcaagtaacagacaaggaggccgcttgcctgccactcaaaaagactaatgaccagcacgcactgtcgaacgaaaagccggtcagcctgacatcttgttcagttggggatgcagcctctgccgagacggcaagcgtgacccatccaaaggacatcagcgtggctcctaggactctcagccaggatacagctgtgacgcatggcgaccacctgctttcgggtcctaaaggcctcgtagacaatattctgccccttaccctcgaggaaactatacagaagacggccagtgtgtcccagttaaactcagaagcttttctcctggagaataagcccgtagccgaaaacaccggcattctgaaaaccaatacacttctgagccaggaatcattgatggctagcagtgtgtccgcgccatgtaatgagaaactcatccaggaccagttcgttgatataagtttcccttcccaagttgttaataccaatatgcagagcgtacagctgaacacggaagacacagtaaacacaaaaagcgtaaacaatactgacgccactggcctgatccaaggagtcaagagtgtagagatcgagaaagacgctcagcttaaacagttcctcacacctaagaccgagcagctgaagccagaaagagtcacatctcaggtgtctaatctaaagaaaaaggagacaactgcagattcccaaaccactacctcaaaatcattgcagaatcagtctctcaaagaaaatcagaagaagcctttcgtgggcagttgggtcaagggtctgattagccgcggagcctcattcatgccactgtgtgtgagcgctcacaatcgcaacacgataacagatctgcaaccaagtgtcaaaggcgtaaataactttggcggtttcaaaacaaaagggattaatcagaaggcatcacatgtgtctaaaaaggcgagaaagtcggcgtccaagccgccaccgatttctaaaccccctgctggacccccaagcagcaacgggaccgccgcacaccctcacgcccacgcagctagcgaggtgctcgaaaaaagtgggtctactagctgtggtgcacagctgaaccactcgagttacggcaacgggatttctagcgccaaccatgaagatctagtggagggacagattcacaaactaagactgaaactgagaaagaaattgaaggccgagaaaaaaaaactcgcggcacttatgagctctcctcagtcaagaactgtccggtctgagaatcttgaacaggtgccccaggacggctcccccaatgattgtgaaagcattgaagatctgttgaatgaacttccatatccaatagacatcgcctccgaatcggcttgtacaaccgtccccggagtcagtctctactcttcccaaactcatgaggagatcctcgctgaactgctgtccccgacccccgtttctaccgagctgtccgaaaatggagagggagacttccggtacctcggaatgggtgacagccatatcccaccccctgtgcctagcgagtttaatgacgtgtcccagaacacccaccttcggcaggaccacaattactgctcacctaccaaaaaaaacccgtgtgaggtccaacctgatagcttaacaaacaacgcgtgcgttcggacccttaatttggagtcacccatgaagaccgacatattcgatgagttttttagttcatctgccttgaacgccttggcaaatgataccctcgacctgccacactttgacgaatacttgttcgagaattactag

SEQ ID NO: 159368 - DNA, 3814 bp, Artificial Sequence
  derived and/or modified sequence
agggcggacagccacgcctctgcggagggcgaccggaagtgctcacgtcttcaccttccccgccacgccaccgtcctttcaggcccagcgtgcagcaggaaggaggactcttttgccgcggactcaagccggaagccgccttcctagtggagacgcgagtgggggaggagcagtccgaggggaacgtgggttgaacgttgcaactagggtggagatcaagctggaacaggagttccgatcgacccggtaccaagaaggggagtgcccgcggcagggttcattgaaaaaatccttagtgatattgacatgtctcaagtgacataaattagccaatgactcggaatgatggattctccgaagattggaaatggtttgccagtgattggaccagggactgatatagggatatcttcactccacatggtggggtatttgggaaaaaattttgattcagctaaagttccatcagatgagtattgccctgcttgtagagagaagggaaagttaaaagccttaaagacttaccgaattagttttcaagaatctatctttttgtgtgaggatctgcagtgcatctatcctttgggctctaaatcacttaataacctaatttctcctgatttggaagaatgtcacactccacataagcctcagaaaaggaagagcttagaaagcagctataaggattcacttcttttagcaaattccaaaaagactagaaattatattgctattgacggtggaaaagttttgaacagcaaacataatggagaagtatatgacgaaacctcgtcaaacttacctgatagtagtggtcaacagaatccaattaggacagctgattccttggagcggaatgagattttggaagctgatactgttgacatggctactacaaaagatcctgctacagttgatgtctctggaactggcagaccttcccctcaaaatgaaggatgtacatctaaactggaaatgccactggagagcaaatgtacatcatttccccaggctttatgtgtccagtggaaaaatgcttatgctctctgttggttagactgtatcctgtcagctttggtgcactcggaagagttaaagaacaccgtgactggactgtgctcgaaggaggaatctatattctggcggttgcttacaaaatataatcaagcaaatacacttctatataccagtcaattgagtggtgttaaagatggagattgtaaaaaacttacctcagaaatatttgcagagatagagacctgtctgaatgaagttagagatgaaatttttattagccttcagccccagcttagatgcacattaggtgatatggaaagccctgtgtttgcatttcccctgctcttaaaactagaaacccacattgaaaagctcttcctatattctttttcttgggactttgaatgttcgcagtgtggacaccaatatcaaaacaggcatatgaagagtctggtcacctttacaaatgtcatccctgagtggcacccacttaatgctgcccattttggtccatgtaacaattgcaacagtaaatcacaaataagaaaaatggtattagaaaaagtatctcccatattcatgttgcactttgtagaaggcttaccacagaatgacttgcagcactatgcatttcattttgaaggctgtctttatcagataacttctgtaattcagtatcgagcaaataatcattttataacatggattttagatgctgatggaagttggctggaatgtgatgacttaaaaggcccatgttctgaaaggcacaagaaatttgaagttcctgcttcagagatacatattgttatttgggaaagaaaaatatcccaagtgacagataaagaagctgcctgccttccacttaaaaagactaatgaccaacacgctctcagtaatgagaaaccagtatctttaacatcgtgttctgtgggtgatgctgcctcagctgaaacagcctcagtaactcaccctaaagatatatcagttgcccctcgtactctttcacaggacacagctgtaactcatggagatcatttactttcaggtccaaaaggtttggttgacaatattttacctctgacacttgaagaaactatccagaaaacagcctcagtttcacagttaaattctgaagctttcctgttagaaaataaacctgtagcagaaaatacaggaattctcaaaaccaatactttgctatcacaagaatcactaatggcttcttcagtatcagctccatgtaatgaaaagcttattcaagaccaatttgtggacataagttttccatcccaagttgtaaatacaaacatgcagtcagtacagctgaatacagaagatactgtaaatactaaatctgtgaataatactgatgctactggtcttatacagggagtgaagtcagtagaaattgagaaggacgctcagttaaaacaattccttacaccaaaaactgaacaattaaaaccagaacgtgtcacatctcaggtatctaatttgaagaaaaaagaaactacagcagattctcaaaccacaacatctaagtcattacagaatcagtctctgaaagaaaatcagaagaagccatttgtgggaagttgggttaaaggcttaataagcaggggtgcttcttttatgccactctgtgtttcagctcataatagaaacactataactgatttacaaccttcagttaaaggggtaaataattttggtggctttaaaactaaaggtataaaccagaaggccagccacgtatccaagaaagctcgtaagagtgcaagtaagcctcctcccatcagtaagccaccagcaggccctccatcgtctaatggcacagctgcccacccacatgctcatgctgcttcagaagttttggaaaagtctggaagcacctcatgtggagctcaactcaaccacagttcttatgggaatggtatttcttcagcaaaccatgaagacttggtggaaggtcagattcataaacttcgtctaaaacttcgtaaaaagctaaaggcagaaaagaagaaattagctgctcttatgtcttccccgcaaagcagaacagttcgaagtgaaaatctagaacaggtgccccaggatgggtctccaaatgattgtgaatcaatagaggacttgttaaatgagctaccatatccaattgatattgccagtgagtctgcatgcaccactgttcctggtgtttccctgtacagtagtcaaactcatgaagaaattttagcggaattattgtctcctacacctgtttcaacagagctgtcagaaaatggggaaggtgactttaggtatttgggaatgggagatagtcatatcccaccaccagtaccaagtgaattcaatgatgtttcccagaacacacatctgagacaggaccataattattgtagccccaccaagaaaaatccatgtgaagttcagccagactctctgacaaataatgcctgcgttagaacattaaacttggagagtccgatgaagactgatattttcgatgagtttttttcctcctcagcattaaatgctttagcaaatgacacattagacctacctcatttcgatgaatatctgtttgagaattattgaattaatgcttgttaacttttttcatataatatttattattattagaagaacttacaatgtgttcaggtagtgtttatacactggacttgtgtaattacttgtgtaataaccatgaacaaaatgcaaggtttaacctttggttctgcccatgaagcatgtaatctttcttacacattaaaatcactgaatgtgt

SEQ ID NO: 159369 - protein, 113 aa, Artificial Sequence
  derived and/or modified sequence
MSAIQNLHSFDPFADASKGDDLLPAGTEDYIHIRIQQRNGRKTLTTVQGIADDYDKKKLVKAFKKKFACNGTVIEHPEYGEVIQLQGDQRKNICQFLVEIGLAKDDQLKVHGF

SEQ ID NO: 159370 - DNA, 342 bp, Artificial Sequence
  derived and/or modified sequence
atgagcgccatccagaacctgcacagcttcgaccccttcgccgacgccagcaagggcgacgacctgctgcccgccggcaccgaggactacatccacatcagaatccagcagagaaacggcagaaagaccctgaccaccgtgcagggcatcgccgacgactacgacaagaagaagctggtgaaggccttcaagaagaagttcgcctgcaacggcaccgtgatcgagcaccccgagtacggcgaggtgatccagctgcagggcgaccagagaaagaacatctgccagttcctggtggagatcggcctggccaaggacgaccagctgaaggtgcacggcttctag

SEQ ID NO: 159371 - DNA, 342 bp, Artificial Sequence
  derived and/or modified sequence
atgtctgcaatccaaaacctgcactcatttgaccctttcgctgatgcctctaagggggatgacctcttgcctgccggaaccgaggactacatacacatcaggatccagcagcgtaacggccgcaaaaccttaacgaccgttcaggggatagccgacgactacgataaaaagaagttggttaaggcgttcaaaaaaaaattcgcgtgtaatgggaccgttatagagcaccctgagtatggagaggtgattcaattgcagggtgaccaacgaaagaatatctgtcaattcctggttgagatcgggctggccaaggatgaccagctgaaggtacacggattctag

SEQ ID NO: 159372 - DNA, 342 bp, Artificial Sequence
  derived and/or modified sequence
atgtctgccatccagaacctgcacagctttgacccctttgctgatgccagcaaaggagatgacctgctgcctgctggaacagaggactacatccacatccgcatccagcagagaaatggaaggaagaccctgaccaccgtgcagggcattgctgatgattatgacaagaagaagctggtgaaggccttcaagaagaagtttgcctgcaatggcaccgtcatcgagcacccagaatatggagaggtgatccagctgcagggcgaccagaggaagaacatctgccagttcctggtggagatcggcctggccaaggatgaccagctgaaggtgcacggcttctag

SEQ ID NO: 159373 - DNA, 342 bp, Artificial Sequence
  derived and/or modified sequence
atgagcgccatccagaacctgcacagcttcgaccccttcgccgacgctagcaagggtgacgacctcttaccagcgggaacagaggactatatccacatccgtattcaacagcggaatggaagaaaaacactcacaacggtccagggtattgccgacgactacgataagaagaaacttgtcaaggccttcaagaaaaaattcgcctgcaacggcaccgtaatcgaacaccccgagtacggcgaagtgattcagcttcaaggggaccaacgcaaaaacatttgccagtttctcgtggagatcggcctggctaaggatgaccagttgaaagtccatgggttttag

SEQ ID NO: 159374 - DNA, 342 bp, Artificial Sequence
  derived and/or modified sequence
atgtcagccatccagaaccttcacagcttcgatccattcgccgacgcgagtaagggagatgacctgttgccagcaggaactgaagattatattcacattcggattcagcaaagaaatggcaggaagacgctaacaacagtgcagggaatcgcagatgactacgacaaaaagaaactcgtcaaggcttttaagaaaaagtttgcgtgcaacggaacagtcatcgagcatcctgagtacggcgaggtgatccaactgcagggcgatcagagaaagaatatctgccagtttctcgtcgagattggtttagccaaagacgaccagttaaaagtccatggcttttag

SEQ ID NO: 159375 - DNA, 2330 bp, Artificial Sequence
  derived and/or modified sequence
cactgagccgccgccgaggattcagcagcctcccccttgagccccctcgcttcccgacgttccgttcccccctgcccgccttctcccgccaccgccgccgccgccttccgcaggccgtttccaccgaggaaaaggaatcgtatcgtatgtccgctatccagaacctccactctttcgacccctttgctgatgcaagtaagggtgatgacctgcttcctgctggcactgaggattatatccatataagaattcaacagagaaacggcaggaagacccttactactgtccaagggatcgctgatgattacgataaaaagaaactagtgaaggcgtttaagaaaaagtttgcctgcaatggtactgtaattgagcatccggaatatggagaagtaattcagctacagggtgaccaacgcaagaacatatgccagttcctcgtagagattggactggctaaggacgatcagctgaaggttcatgggttttaagtgcttgtggctcactgaagcttaagtgaggatttccttgcaatgagtagaatttcccttctctcccttgtcacaggtttaaaaacctcacagcttgtataatgtaaccatttggggtccgcttttaacttggactagtgtaactccttcatgcaataaactgaaaagagccatgctgtctagtcttgaagtccctcatttaaacagaggtcaagcaataggcgcctggcagtgtcaagcctgaaaccaagcaataccgtcatgtttcagccaagcccagagccctaagattacaaacaactatggccggaacctcctcagctctccctctgcagagttccctaccctaagagaatgttaccacctgaacagtcctcggtgaatctgagaggagaggatggggtaaggcagaagcaccagctgtactactagaagggagcttttggtggtagatcccctggtgtctccaacctgactaggtggacagagctcaaagaggccctcttaccgctagcgaggtgataggacatctggcttgccacaaaggtctgttcgaccagacatatcctagctaagggatgtccaaacatcagaatgtgaggccaaccttctatcagagttaaacttttgacaagggaacaaatctcaaactgatccatcagtcatgtagctagctgtagagcttgcaacttaatagcagcagctgcccaatgccatgtgaagtaacaaactggtttttggtttttttttccccttcagttttaatgttatgtgtaatgtatttaaacccttatttaaataaaacttgttttcagaaatacctgacttgcagattatttatatatagtcgatcttgtgcatataaaggaaccatagaaatgggcagtggaggattcgtccacacccacagcttctcaacgggcctgaatttggccaagaaaaacctttatgagcttgtccctctctggtcaactggttttttgttcgtttgttttttgagacaggtttgcccttgttgcccaggctggagtgcagtggcacaatctcggctcactgcaacctccacctcaggttcaagcaattgtcgtgcctcagcctccctagtagctgggattacaggcaccatgcccagctaacttttgtatttttagtagagacagggtttctccatgttggccaggctggtcttgaacacctggcctcaagtgatctgcctgtcttggcctcccaaagtgctgggattacaggcatgagccaccatgcccagcaggtcaactgtttttgcaagcatttagccagagtcatgctgtgctgttaatcagtgtcctggagaatgggttgcttggaaatcttggcgccccctcagtagtaacagccttggtttaagggcgcagagtggagagtaaatgcaagggctataacaagggcattcatgctgtgggttaagatccacaaatcgctaggaatgtgtatactctgggtagtaagtttgtagtattagaaggtttaatgacaagtatttgaagagctgaagttaagtgttgggaggccatcccttatgaaggacaatgaatggcaagtaaaagaccaagttctgttcctgggtccattaatttagttaaaaaggcaaagttctttcagcacacatatctgcatgcagtcacgtgctgcctaaggatgcttcattcaacaatgagcctcacagccgtgctacacaataagattataatactgtatttttactgtaccttttaacattgtgttacaatggcctacaagaagcttgtgtggatggctttgaatgtggcccaacacgaactaataaattttgctaaaacatga

SEQ ID NO: 159376 - protein, 1045 aa, Artificial Sequence
  derived and/or modified sequence
MGSQPPLGSPLSREEGEAPPPAPASEGRRRSRRVRLRGSCRHRPSFLGCRELAASAPARPAPASSEIMASAAKEFKMDNFSPKAGTSKLQQTVPADASPDSKCPICLDRFDNVSYLDRCLHKFCFRCVQEWSKNKAECPLCKQPFDSIFHSVRAEDDFKEYVLRPSYNGSFVTPDRRFRYRTTLTRERNASVYSPSGPVNRRTTTPPDSGVLFEGLGISTRPRDVEIPQFMRQIAVRRPTTADERSLRKIQEQDIINFRRTLYRAGARVRNIEDGGRYRDISAEFFRRNPACLHRLVPWLKRELTVLFGAHGSLVNIVQHIIMSNVTRYDLESQAFVSDLRPFLLNRTEHFIHEFISFARSPFNMAAFDQHANYDCPAPSYEEGSHSDSSVITISPDEAETQELDINVATVSQAPWDDETPGPSYSSSEQVHVTMSSLLNTSDSSDEELVTGGATSQIQGVQTNDDLNNDSDDSSDNCVIVGFVKPLAERTPELVELSSDSEDLGSYEKMETVKTQEQEQSYSSGDSDVSRCSSPHSVLGKDEQINKGHCDSSTRIKSKKEEKRSTSLSSPRNLNSSVRGDRVYSPYNHRHRKRGRSRSSDSRSQSRSGHDQKNHRKHHGKKRMKSKRSRSRESSRPRGRRDKKRSRTRDSSWSRRSQTLSLSSESTSRSRSRSSDHGKRRSRSRNRDRYYLRNNYGSRYKWEYTYYSRNKDRDGYESSYRRRTLSRAHYSRQSSSPEFRVQSFSERTNARKKNNHSERKYYYYERHRSRSLSSNRSRTASTGTDRVRNEKPGGKRKYKTRHLEGTNEVAQPSREFASKAKDSHYQKSSSKLDGNYKNESDTFSDSRSSDRETKHKRRKRKTRSLSVEIVYEGKATDTTKHHKKKKKKHKKKHKKHHGDNASRSPVVITIDSDSDKDSEVKEDTECDNSGPQDPLQNEFLAPSLEPFETKDVVTIEAEFGVLDKECDIATLSNNLNNANKTVDNIPPLAASVEQTLDVREESTFVSDLENQPSNIVSLQTEPSRQLPSPRTSLMSVCLGRDCDMS

SEQ ID NO: 159377 - DNA, 3138 bp, Artificial Sequence
  derived and/or modified sequence
atgggcagccagccccccctgggcagccccctgagcagagaggagggcgaggcccccccccccgcccccgccagcgagggcagaagaagaagcagaagagtgagactgagaggcagctgcagacacagacccagcttcctgggctgcagagagctggccgccagcgcccccgccagacccgcccccgccagcagcgagatcatggccagcgccgccaaggagttcaagatggacaacttcagccccaaggccggcaccagcaagctgcagcagaccgtgcccgccgacgccagccccgacagcaagtgccccatctgcctggacagattcgacaacgtgagctacctggacagatgcctgcacaagttctgcttcagatgcgtgcaggagtggagcaagaacaaggccgagtgccccctgtgcaagcagcccttcgacagcatcttccacagcgtgagagccgaggacgacttcaaggagtacgtgctgagacccagctacaacggcagcttcgtgacccccgacagaagattcagatacagaaccaccctgaccagagagagaaacgccagcgtgtacagccccagcggccccgtgaacagaagaaccaccaccccccccgacagcggcgtgctgttcgagggcctgggcatcagcaccagacccagagacgtggagatcccccagttcatgagacagatcgccgtgagaagacccaccaccgccgacgagagaagcctgagaaagatccaggagcaggacatcatcaacttcagaagaaccctgtacagagccggcgccagagtgagaaacatcgaggacggcggcagatacagagacatcagcgccgagttcttcagaagaaaccccgcctgcctgcacagactggtgccctggctgaagagagagctgaccgtgctgttcggcgcccacggcagcctggtgaacatcgtgcagcacatcatcatgagcaacgtgaccagatacgacctggagagccaggccttcgtgagcgacctgagacccttcctgctgaacagaaccgagcacttcatccacgagttcatcagcttcgccagaagccccttcaacatggccgccttcgaccagcacgccaactacgactgccccgcccccagctacgaggagggcagccacagcgacagcagcgtgatcaccatcagccccgacgaggccgagacccaggagctggacatcaacgtggccaccgtgagccaggccccctgggacgacgagacccccggccccagctacagcagcagcgagcaggtgcacgtgaccatgagcagcctgctgaacaccagcgacagcagcgacgaggagctggtgaccggcggcgccaccagccagatccagggcgtgcagaccaacgacgacctgaacaacgacagcgacgacagcagcgacaactgcgtgatcgtgggcttcgtgaagcccctggccgagagaacccccgagctggtggagctgagcagcgacagcgaggacctgggcagctacgagaagatggagaccgtgaagacccaggagcaggagcagagctacagcagcggcgacagcgacgtgagcagatgcagcagcccccacagcgtgctgggcaaggacgagcagatcaacaagggccactgcgacagcagcaccagaatcaagagcaagaaggaggagaagagaagcaccagcctgagcagccccagaaacctgaacagcagcgtgagaggcgacagagtgtacagcccctacaaccacagacacagaaagagaggcagaagcagaagcagcgacagcagaagccagagcagaagcggccacgaccagaagaaccacagaaagcaccacggcaagaagagaatgaagagcaagagaagcagaagcagagagagcagcagacccagaggcagaagagacaagaagagaagcagaaccagagacagcagctggagcagaagaagccagaccctgagcctgagcagcgagagcaccagcagaagcagaagcagaagcagcgaccacggcaagagaagaagcagaagcagaaacagagacagatactacctgagaaacaactacggcagcagatacaagtgggagtacacctactacagcagaaacaaggacagagacggctacgagagcagctacagaagaagaaccctgagcagagcccactacagcagacagagcagcagccccgagttcagagtgcagagcttcagcgagagaaccaacgccagaaagaagaacaaccacagcgagagaaagtactactactacgagagacacagaagcagaagcctgagcagcaacagaagcagaaccgccagcaccggcaccgacagagtgagaaacgagaagcccggcggcaagagaaagtacaagaccagacacctggagggcaccaacgaggtggcccagcccagcagagagttcgccagcaaggccaaggacagccactaccagaagagcagcagcaagctggacggcaactacaagaacgagagcgacaccttcagcgacagcagaagcagcgacagagagaccaagcacaagagaagaaagagaaagaccagaagcctgagcgtggagatcgtgtacgagggcaaggccaccgacaccaccaagcaccacaagaagaagaagaagaagcacaagaagaagcacaagaagcaccacggcgacaacgccagcagaagccccgtggtgatcaccatcgacagcgacagcgacaaggacagcgaggtgaaggaggacaccgagtgcgacaacagcggcccccaggaccccctgcagaacgagttcctggcccccagcctggagcccttcgagaccaaggacgtggtgaccatcgaggccgagttcggcgtgctggacaaggagtgcgacatcgccaccctgagcaacaacctgaacaacgccaacaagaccgtggacaacatcccccccctggccgccagcgtggagcagaccctggacgtgagagaggagagcaccttcgtgagcgacctggagaaccagcccagcaacatcgtgagcctgcagaccgagcccagcagacagctgcccagccccagaaccagcctgatgagcgtgtgcctgggcagagactgcgacatgagctag

SEQ ID NO: 159378 - DNA, 3138 bp, Artificial Sequence
  derived and/or modified sequence
atggggagccagcctcccctgggcagcccgctttcccgcgaggagggggaagcccccccccctgctcctgcatcagaggggcgcaggcgcagcaggcgggtgaggctacgggggagctgcagacatcgtccttcctttctgggttgccgcgaactggctgccagtgcccctgcaaggcctgccccagcctcatccgaaattatggcatccgccgcgaaggaattcaaaatggataattttagtcccaaagcaggcaccagcaagctccaacaaactgtgcctgccgacgcatcgccagattctaaatgccccatttgtctcgatcggttcgataacgtgtcataccttgacaggtgtttgcacaaattctgcttccgttgtgttcaagaatggtccaagaacaaagctgaatgccctctttgcaagcaaccttttgactcaatattccacagtgtgcgggcagaggatgatttcaaggaatacgtactacgaccatcctacaacggcagcttcgtgacccccgaccgtcggtttagatacaggactacactgactagagagcgcaacgcgtctgtatacagcccttccgggcctgttaacaggagaactacaacacccccggactcaggagtgctctttgagggattgggtatctcgacaaggcctagggacgtcgaaattcctcaatttatgaggcagatcgctgtccggaggccgacgacagctgatgagcgcagcctccggaagattcaggagcaggatatcatcaacttccgcaggactctctatagggcgggtgccagggtgaggaatatcgaggatggcggtcggtaccgtgatatctccgcagagttctttcgacggaatcctgcttgtctgcaccgtttggtgccgtggttaaaacgggagctgacagtgctgtttggtgcacatggcagcctcgtcaatatagtgcagcatatcattatgtccaatgtgaccagatatgatttagaatctcaggcctttgtaagtgatctgcgcccatttctgctaaacagaacagagcatttcatccacgagtttatcagtttcgccaggtccccctttaatatggcggctttcgatcagcatgccaattatgattgccctgctccctcatacgaagagggatctcatagcgatagcagtgttatcacaatcagccctgatgaggcagagacgcaagaactggacatcaatgtagcaacagtgagccaggccccctgggacgacgaaactcccgggccttcctacagcagttccgaacaggtgcatgtaaccatgtcttcgttactgaatactagtgattcatccgatgaagaactggtcactggcggagcaacttcccagatccagggggtgcagaccaacgacgatttaaacaatgactcagacgactcttcagacaattgtgtgatcgtggggtttgtgaaacctctagctgagaggaccccggagcttgtggaactcagctccgactctgaagatcttgggagttacgaaaaaatggaaaccgtgaagacccaggagcaggagcagagttatagtagtggagattccgatgtaagtagatgctcctccccccactcagtgctggggaaagatgagcagattaataaaggccattgcgactcttccaccagaattaaaagcaaaaaagaggaaaagaggtctacctcactctcatcccctcgaaatcttaactccagtgttcgaggagatagagtttactccccctacaatcatagacaccggaaacgcgggagatcccgttcctctgattcccgcagtcagagcagatccggacacgaccagaagaatcaccgtaaacaccacgggaaaaagcgaatgaagagcaagcgatcacggtcgagggagagcagtagaccaagaggccgtagagataagaagcgcagcaggactagagattccagctggtcccgtcggtcacagactttgtccctctcttctgaatccacgtcgaggagtaggagcagatcctccgatcacggaaagaggcgatccaggtcaagaaatcgggacagatattacctcaggaacaactacgggtctcggtacaagtgggagtacacttattactctcgaaacaaagaccgggacggttacgaatcatcatacaggcggcgcaccctctcacgggcacactatagccggcagagcagctctccagagttcagggtacagtcatttagcgaaagaactaacgcacgtaagaagaacaaccacagcgaaagaaagtattactattacgagcgccaccggagccgctcattgagcagcaaccggtctaggactgcttctaccggcactgatagagttaggaacgagaaacccggcggaaagagaaagtacaagactagacatctggaggggaccaatgaagtggctcaacccagtagagaattcgcatctaaagctaaagatagtcattatcagaaatcgagttccaaactagacgggaactataagaacgagagtgacaccttctctgattcccgatcttctgacagggaaactaagcacaagcgaaggaaacgcaagactcgctccctgagcgtggagattgtgtacgaaggcaaggccacagacacgacaaagcaccacaagaaaaagaagaagaaacacaaaaaaaagcacaaaaagcaccatggagataatgcatccaggagcccggtcgtgattactatagacagcgatagtgacaaggattctgaagtgaaggaggacacagaatgcgataattccggtcctcaggaccctctgcagaatgagttccttgccccatcactcgaaccctttgaaaccaaggacgtagtaaccattgaggccgagttcggcgtcctagacaaagagtgcgacattgccaccttgagtaacaacctcaataatgctaataaaactgtggacaatattcctcccctggcagcaagcgtggagcaaacattggatgtgcgagaagagtcaactttcgtttcagatcttgaaaaccagccgtcaaatattgtctctttacagactgagccttcaaggcagctgccttcaccccggacgtccctgatgagcgtctgcctcggccgggattgcgacatgtcctag

SEQ ID NO: 159379 - DNA, 3138 bp, Artificial Sequence
  derived and/or modified sequence
atgggcagccagccccccctgggcagccccctgagccgggaggagggggaggcccctcctccagccccagccagcgagggcagaagaagaagccggcgggtgcggctgcggggcagctgccgccaccggcccagcttcctgggctgccgggagctggccgccagcgccccagcccggcctgccccagccagcagcgagatcatggccagcgctgccaaggagttcaagatggacaacttcagccccaaggccggcaccagcaagctgcagcagacagtgcctgcagatgccagcccagacagcaagtgccccatctgcctggacagatttgacaacgtgtcctacctggaccgctgcctgcacaagttctgcttccgctgtgtgcaggagtggagcaagaacaaggcagaatgtcccctgtgcaagcagccctttgacagcatcttccacagcgtgcgggcagaagatgacttcaaggagtatgtgctgcggcccagctacaacggcagctttgtgaccccagaccggcgcttccgctaccgcaccaccctgacccgggagagaaatgcctctgtgtacagccccagcggccctgtgaacagaaggaccaccaccccaccagattctggagtgctgtttgagggcctgggcatcagcacccggcccagagatgtggagatcccccagttcatgaggcagattgctgtgagaagacccaccacagcagatgagaggagcctgaggaagatccaggagcaggacatcatcaacttccggaggaccctgtacagagctggggcccgggtgaggaacattgaagatggcggccgctacagagacatctctgctgagttcttcagaagaaatcctgcctgcctgcaccggctggtgccctggctgaagcgggagctgactgtgctgtttggagcccacggcagcctggtgaacatcgtgcagcacatcatcatgagcaatgtgaccaggtatgacctggagagccaggcctttgtgtctgacctgcggcccttcctgctgaacagaacagagcacttcatccacgagttcatcagctttgcccggagccccttcaacatggccgcctttgaccagcacgccaactatgactgcccagcccccagctatgaggagggcagccacagcgacagcagcgtcatcaccatcagcccagatgaagctgagacccaggagctggacatcaacgtggccaccgtgtcccaggccccctgggatgatgagaccccaggccccagctacagcagcagcgagcaggtgcacgtgaccatgagcagcctgctgaacaccagtgacagcagtgatgaggagctggtgactggaggagccaccagccagatccagggcgtgcagaccaatgatgacctgaacaatgacagtgatgacagcagtgacaactgtgtgattgtgggctttgtgaagcccctggccgagaggaccccagagctggtggagctgagcagtgacagcgaggacctgggcagctatgagaagatggagaccgtgaagacccaggagcaggagcagagctacagcagcggggacagtgatgtgagccgctgcagcagcccccacagcgtgctgggcaaggatgagcagatcaacaagggccactgtgacagcagcacccgcatcaagagcaagaaggaggagaagaggagcaccagcctgagcagccccaggaacctgaacagctctgtgcggggggacagagtgtacagcccctacaaccaccgccacaggaagaggggccgcagccgcagcagtgacagccgcagccagagccgcagcggccatgaccagaagaaccacaggaagcaccacggcaagaagaggatgaagagcaagaggagccgcagccgggagagcagccggccccggggccggcgggacaagaagaggagcaggacccgggacagctcctggagcagaagaagccagaccctgagcctgagcagcgagagcaccagccgcagccgcagccgcagcagtgaccacggcaagaggaggagccgcagcaggaacagagaccgctactacctgaggaacaactacggcagccgctacaagtgggagtacacctactacagcaggaacaaggacagagatggctatgagagcagctacagaagaaggaccctgagccgggcccactacagccggcagagcagcagccctgagttccgggtgcagagcttcagcgagaggaccaatgccaggaagaagaacaaccacagcgagaggaagtactactactatgaaagacacaggagccgcagcctgagcagcaacagaagcaggacagccagcactggaacagacagagtgagaaatgagaagccaggcggcaagaggaagtacaagaccaggcacctggagggcaccaatgaggtggcccagcccagccgggagtttgccagcaaggccaaggacagccactaccagaagagcagcagcaagctggatggcaactacaagaatgaaagtgacaccttcagtgacagccgcagcagtgaccgggagaccaagcacaagaggaggaagaggaagaccaggagcctgtctgtggagatcgtgtatgagggcaaggccacagacaccaccaagcaccacaagaagaagaagaagaagcacaagaagaagcacaagaagcaccacggggacaatgccagccgcagccctgtggtgatcaccatcgacagcgacagcgacaaggacagcgaggtgaaggaggacacagaatgtgacaacagcggcccccaggaccccctgcagaatgagttcctggcccccagcctggagccctttgagaccaaggatgtggtgaccattgaagctgagtttggagtgctggacaaggaatgtgacatcgccaccctgagcaacaacctgaacaatgccaacaagacagtggacaacatcccccccctggccgcctctgtggagcagaccctggatgtgcgggaggagagcacctttgtgtctgacctggagaaccagcccagcaacatcgtgtccctgcagacagagcccagccggcagctgcccagccccaggaccagcctgatgtctgtgtgcctgggccgggactgtgacatgtcctag

SEQ ID NO: 159380 - DNA, 3138 bp, Artificial Sequence
  derived and/or modified sequence
atgggcagccagccccccctgggcagccccctgagccgggaggagggagaagcccccccccctgcccccgccagcgagggcagaagacggtccagaagagtacgtttgaggggaagctgccgccacagaccgtccttcttggggtgtcgagaactggccgcatctgctcctgccaggcccgccccagcttccagcgagatcatggccagtgctgccaaggaattcaaaatggataatttctcccccaaagcaggaacttccaaactccagcaaacggtgcctgctgacgcatctccggattccaaatgccccatatgtcttgaccgattcgataatgtgagttaccttgaccgctgccttcataaattttgcttcagatgcgtccaggaatggtccaagaataaagctgaatgccccctgtgtaagcagccttttgacagcatcttccacagcgtgcgggctgaggatgactttaaggaatacgtactgaggcctagctataacgggtctttcgtgactcccgaccggaggtttaggtaccgaacaaccctcacgagggaacgaaatgcctccgtgtactccccctcgggcccagtgaaccgccgcactacaacacccccagatagtggcgtcttgttcgagggcctcggtatcagcacgcgtcccagggacgtggaaatcccacagttcatgaggcaaatcgcagtgcggcgcccgacaacagcagatgaacgctcactccggaagatccaggaacaggacatcattaactttagaaggacactgtacagagccggcgcgcgagttcggaacatagaagacggagggcggtatcgcgatatttccgcagagttcttcagaagaaatccggcctgccttcatagacttgtcccatggctgaagcgggagctcacagtgctgttcggcgcccatggctcactggtgaacatcgtgcagcacatcatcatgagcaatgtgacacgctatgatcttgaatcccaggcctttgtatccgacctgagaccatttttgcttaatagaaccgagcatttcattcatgagtttatcagctttgctaggtccccatttaatatggccgcttttgatcagcatgccaactacgattgcccagcgccatcctacgaggagggatcacacagtgacagctccgttattaccatcagtccagatgaggcagagacccaagagcttgatatcaacgtcgcaacagtgtcccaggccccgtgggatgacgagacaccaggcccatcatactcctcctctgaacaggttcacgtgaccatgtcttcactacttaacacctcagacagcagtgatgaagagctcgtcactgggggggctacctctcaaattcagggcgtgcagacaaatgatgacctgaataatgactccgatgactcaagcgacaattgcgtaattgtgggattcgtcaagcccttggccgagcgaacccctgaattggtggaactgtcctcggactctgaagatctgggctcgtatgagaaaatggaaactgtgaaaacccaggagcaggagcagagttacagctccggagatagcgacgtttctcgatgctcatcaccacattctgtactggggaaggatgagcagattaacaaaggacactgcgattcttcaactagaataaaaagtaagaaagaggaaaaaaggagcacatctctgagctctcctcgaaacctcaactcttccgttcggggcgaccgggtctacagtccctacaatcacagacaccggaagcgaggaaggtcccgcagtagcgacagtcggtcccagagccgtagtggacacgaccaaaagaaccacagaaagcatcacggaaaaaagcggatgaagtccaaaagatcacgcagccgcgagagttcacgccccagggggaggagggataaaaaacgaagccggaccagggattcatcctggtctcgaagaagccaaacactatccctcagttcagagagcaccagccgtagcagatcgaggtcatctgaccacgggaagcgtcggtcccggtcacgaaaccgcgataggtattatttgaggaacaactatggaagccgatacaaatgggaatacacgtattattcaaggaacaaggatagagacgggtacgaaagcagctaccgacggcgaacactgagcagggcacattattcacgccaatcatccagtccagagtttagagtgcagagcttcagcgaaaggaccaacgctcgcaaaaagaacaaccattctgagcggaagtactattactacgagaggcaccggtctcgttccctctcaagtaaccgctctcggacggcaagcaccggcaccgaccgggttagaaatgaaaagcctggcggtaagcggaagtacaaaactcgtcacctagagggcacaaacgaggtggcacagccatctcgcgaatttgcatcaaaggctaaagattctcattatcagaaatcctcaagcaagctcgatgggaattacaaaaacgagtccgatactttctctgactccagaagttccgacagggaaaccaagcacaagcgccggaagcggaagacgcgttctctatctgtagagatcgtgtacgaaggaaaggctacagacacaaccaagcatcataaaaagaagaagaaaaagcataagaagaaacacaaaaagcaccacggggataacgcttcccgatccccggtcgtcataacaattgattcagactccgataaagactcggaggtaaaggaagatactgaatgtgataactccgggccacaggaccccctgcagaacgagtttttggctccctcattggagccctttgagactaaggatgtagtcaccatcgaggctgagttcggcgtgttggataaggagtgtgatatagcgaccttatctaataacctgaacaatgctaataagaccgtggacaatataccgcccctggccgcctcagtggagcagacactggacgtacgagaggagtccacgttcgtcagtgacctcgaaaaccaaccatccaacatcgtgtcgctgcaaaccgaacctagccggcagctgccctcaccacgcacttccctgatgagtgtttgtctgggcagggactgtgatatgtcttag

SEQ ID NO: 159381 - DNA, 3138 bp, Artificial Sequence
  derived and/or modified sequence
atgggatcccagccgccacttggcagccccctatctcgcgaggagggggaagccccacctcctgcaccagcttccgaagggagaagacgatcccgccgagttcggcttcgtgggagttgccgtcatagaccaagtttcctggggtgtcgggagcttgcggcaagcgcaccggctcgacctgctccagcttcatcagagataatggccagtgccgcaaaggaattcaaaatggacaatttctcacccaaggccggaactagcaaactacagcagactgtgcctgcagacgcttcccctgattcaaagtgcccaatttgtctggaccgattcgataacgtgagctaccttgaccggtgcctccacaaattctgttttcgctgcgtgcaggagtggtctaaaaacaaagcagagtgtccactgtgtaaacagccctttgactccatcttccactctgtgcgagcagaggacgacttcaaagagtacgttcttcggccatcttataacggctcctttgtgacgccagatcgcagattccgctaccgcacaacccttacccgcgaaagaaacgccagcgtgtacagtccctccggaccagtaaacaggcgcacaacaaccccgcctgatagcggcgtcctgtttgaggggcttggtattagtacccggccaagagacgtggagatcccccagttcatgcgacaaattgcagttcgccgtcccaccaccgctgatgaaaggtctctccggaaaattcaggagcaggatatcatcaatttccggagaactctgtaccgggcaggagcaagagtccggaatatcgaagatggtggccgataccgagatatctcagctgaattctttcgcagaaaccccgcatgtcttcacaggcttgtgccttggttgaagcgagaactgaccgtccttttcggcgctcacggttcactagtcaacatcgtgcaacatatcatcatgtctaacgtgactcgatatgatcttgagtcacaggctttcgtttcagacttgcgaccttttcttctcaatagaaccgaacatttcatacatgaattcatctcttttgcacggtctccattcaatatggccgcattcgatcagcatgccaattatgattgccccgctcctagctacgaagagggatcgcactctgactcatctgtaattactatttcccctgatgaagccgagacccaagaacttgacattaacgttgccactgtcagccaagccccttgggacgatgagacccctggaccaagctactcctccagtgagcaagtgcatgttaccatgtcttcactccttaacaccagcgatagttccgacgaagagctggtcactggcggtgccaccagtcaaattcagggcgtgcagacgaatgatgatctgaataatgattctgatgattcttccgataattgcgttatcgtggggtttgtcaaaccactggctgaacgcaccccggagctcgtcgaattgagttctgattcggaagatctgggttcatatgagaagatggagaccgtgaaaacccaggagcaggaacagagctacagttccggtgactcggacgtgagtagatgcagttcaccccactcagtgctgggaaaagacgagcagatcaacaagggtcactgcgactcatccacgaggatcaagagtaagaaagaagaaaagcgttcaacatctctcagtagcccacgcaatctgaatagtagtgtcaggggggaccgcgtgtactctccatataatcaccggcatcgcaaacgcggtagaagtaggagcagcgacagtcgctcccagagtaggagtggccacgatcagaagaatcaccgaaaacaccatggcaaaaaaagaatgaagtcaaagaggtcccgcagcagggaaagctcccggcctcgcggtaggcgagataagaagcggagccgtacccgggactcttcttggagtcgccgatcacagacactgtctttgagctctgagagcacatcgcgctcacggtcccgatcaagcgatcacgggaagcgacgaagtcgaagcaggaaccgggacagatattacctcagaaacaactacggctcacggtacaagtgggagtatacatactatagtcgcaacaaggaccgagatgggtacgaatctagctataggcgtcgtaccctgtcccgcgctcactactctcgacaatcgtcaagtcccgaattccgggtgcaatcttttagtgagaggacaaacgcgcgaaagaagaacaatcatagtgaacgcaagtattactattacgagcggcacagatcaagaagcctgagctctaaccggtctagaaccgcctctactggtaccgatcgtgtgcgcaatgagaaacctggaggcaagcgcaaatacaagacccgtcaccttgaggggactaatgaagtggcccagccctcaagggaattcgcttccaaggcaaaggactcacactaccaaaaaagctcttcaaaattggatggcaattataagaacgaatccgacacattctccgatagcagaagcagcgatcgcgaaacgaagcacaaacgacgtaagcgcaaaacgcggtcactgagcgtagagattgtgtacgaggggaaggcaacagacactaccaagcaccacaagaaaaagaagaagaagcacaagaaaaaacataagaagcaccatggcgacaacgcgagcagaagccctgtggtgattactatcgactctgacagtgacaaagatagcgaggtcaaggaagataccgagtgtgataattcagggcctcaggatccactccaaaacgagttccttgccccttctttggagccctttgaaacaaaggatgtggtgaccatcgaggctgagttcggcgttcttgacaaagaatgcgacatagctaccttgagcaacaatctgaataacgcaaataaaaccgtggataacattcctccattggctgccagcgtggagcagacattggacgtgcgagaagagtccaccttcgtaagcgacttagagaatcagccctcaaacatcgtctccttgcaaactgagccgagccgacaactgccaagccctaggactagccttatgagcgtctgcctcggcagagactgtgacatgagttag

SEQ ID NO: 159382 - DNA, 4098 bp, Artificial Sequence
  derived and/or modified sequence
tgaagaaatagggcctttccgcctgcgggcccagtgagtcgacacggtgggggcccgcgatccccgggacttaccactgaataaatccagtccagcgtgcgacgacttactggcttcatggggtcgcagccgccgctggggtctccgctgtctcgcgaggagggtgaagcgcccccgcctgctcccgcttcggagggtaggcggagaagtcgccgggtacgccttcgcggatcctgccgacaccgacctagctttctgggctgccgggagctcgcggcgagcgccccagccaggcctgcgccggcatcctccgagataatggcatcagctgctaaggaatttaaaatggacaacttttcacctaaagctggcactagcaaattgcaacagacagtaccagctgatgcatctcctgattctaagtgtcctatatgcttggatagatttgataatgtgtcttacttagatcgctgcttacataagttctgttttcgctgtgtacaggagtggtcaaaaaacaaagctgaatgcccactatgtaaacagccctttgattctattttccattctgtgagggcagaagatgacttcaaggagtatgtcctaaggccttcgtataatggttcttttgtcacccctgatcgacgatttcgctaccgtacaactctgacaagggaacgaaatgcttctgtgtattcacctagtggtcctgtgaacagaagaacaacaactccaccggatagtggagtactgtttgaagggttaggcatttcaacaagacctagagatgttgaaattcctcagtttatgagacagattgcagtaaggaggccaactacggcagatgaaagatctttgcggaaaattcaagaacaagatattattaattttagacgaactctttatcgtgctggtgctcgagttagaaatattgaagatggtggccgctacagggatatttcagctgaatttttccgtagaaatccagcttgccttcacagattagtcccctggttaaaacgtgaacttacagttctttttggagctcatggatctttagtgaatattgtccagcatattatcatgagtaatgttactcgctatgacttggagagtcaggcatttgtgtctgatttaagaccatttttacttaatcgaactgagcattttatacatgaatttatcagttttgcccgatctccttttaacatggcagcctttgaccagcatgccaattatgattgccctgctccttcatacgaagaaggcagccattctgattcttcagtcataacaatatctccagatgaggctgagacccaagagctggatattaatgtagccactgttagtcaggcaccatgggatgatgaaactccaggaccatcttactcaagctcagagcaggtacacgttactatgtcttctcttttaaatacttctgacagttcagatgaagaacttgtcacaggaggagccacgtctcagatacaaggagtacaaaccaatgacgacctaaataatgacagtgatgattcttcagataattgtgtcattgttgggtttgttaaaccactagctgagaggaccccagaacttgttgaactgtcctctgattctgaggacttaggttcttatgagaaaatggagacagtgaagacacaagaacaggagcaatcttacagttctggtgatagcgatgttagtagatgctcatctccacactctgtccttggaaaggatgaacaaataaataaaggtcattgtgattctagtacaagaatcaaatcaaagaaggaagagaaacgatctacatcattgtcatctcccagaaacctgaactcatctgtaagaggagacagagtatattctccatataaccatagacacagaaagaggggaagatcaagaagttcagattcacgttctcagagtagaagtgggcatgatcagaagaatcatagaaagcatcatgggaagaaaagaatgaaaagtaaacgatccagaagcagggaaagtagcagacctagagggagaagagacaaaaagagatcaagaactagagatagcagttggtccagaagaagccaaactctgtctctaagtagtgaaagcacaagcagatcaaggtctcgtagcagtgatcatggtaaaagaagatcacggagcagaaatagagatcgttattatttaagaaataattatggaagcagatacaaatgggagtatacttattacagtagaaacaaggacagggatgggtacgaatcatcttacaggaggaggactctgtccagagctcattattctagacagtcttcaagtccagaatttagagttcagtccttttctgaaagaacaaatgctaggaaaaaaaataatcacagtgagaggaagtattactactatgaaaggcacagatcaaggagcctgtctagtaacagatcaaggactgcatctaccgggactgaccgggtgagaaatgaaaagcctggagggaaacgaaaatacaaaacacggcatttggagggtactaacgaagtggctcagccatctcgtgaatttgcttctaaagcaaaggacagtcattaccaaaaatcttcatcaaaattggatggaaactacaaaaatgagagtgataccttttcagacagccgatcatcagacagagagacaaaacacaaaaggagaaaaaggaagacccggagcctaagtgtagagatagtttatgaaggaaaagctactgatacaactaaacaccataaaaagaaaaagaagaaacataagaagaagcataagaaacaccatggagataatgcttcacgttccccagttgtaattaccattgacagtgacagtgataaggattctgaagtaaaggaggatacagaatgtgacaatagtggtcctcaagaccctctacaaaatgagtttttggctccttccttggaaccatttgaaactaaagatgtagttacaatagaagctgaatttggtgtgctggacaaggaatgtgatattgccacacttagtaacaacttgaataatgccaacaaaactgtagataatattccacctctggcagcttcagttgaacaaactctcgatgtaagagaagagagcacctttgtttctgatttggagaaccagcccagtaacattgtgtctcttcaaactgagccatcaaggcaattgccatcgccacggacatcattaatgtcagtatgtcttggtagagactgtgatatgtcttaaaactgccaaagcatttcattgagaattatgatgttataaaaaggaaaaaggaagaatgtcgtctactgcagtctatttaaagatgacatttggtgaaaactctcttcctccttacaatattttaaatgattttttttttggtgttaatttgtaaaaatcattatttgttcaaaatgtatgtcccaccctcaaagatatgcacttttaagtgaagaaaatgatactgctagcagcttatttaaaacttggggtcctttttaaataagaaaaattatataaattttagaagttatttcataaagccatacggtattgacatatttttaaggtagtcaatgagtatttttgaattttttttttttgagagttattctggaaatgtgttataagctaggagaatccctttggacagtctttatttttcttcttaaaaatttatatgattcaaaaccatttcttcaggttaaattgaggcattttaatctgcacagtttatcttctgccaaaataaaaatttactatttcctttatatacttgtttatctggactgccagtaaaacaaatgtgtattcaacaaaagaaaaaaaataaaacagtaacactttaaaacaagaatcagacattttcctatgcagtatttttttttaaagtttattttagtaaagttaaaatcttgaaagtagctaagggcataattatgtcataaatactgaacttcaggtgaacaaatactttatagttttaattattttctttgattttgaggagtatcttatttgctttctatcatcagtaaaaacagcatttaacttgctaaataaacatgaaaaacccttgtcata

SEQ ID NO: 159383 - protein, 427 aa, Artificial Sequence
  derived and/or modified sequence
MFFTCGPNEAMVVSGFCRSPPVMVAGGRVFVLPCIQQIQRISLNTLTLNVKSEKVYTRHGVPISVTGIAQVKIQGQNKEMLAAACQMFLGKTEAEIAHIALETLEGHQRAIMAHMTVEEIYKDRQKFSEQVFKVASSDLVNMGISVVSYTLKDIHDDQDYLHSLGKARTAQVQKDARIGEAEAKRDAGIREAKAKQEKVSAQYLSEIEMAKAQRDYELKKAAYDIEVNTRRAQADLAYQLQVAKTKQQIEEQRVQVQVVERAQQVAVQEQEIARREKELEARVRKPAEAERYKLERLAEAEKSQLIMQAEAEAASVRMRGEAEAFAIGARARAEAEQMAKKAEAFQLYQEAAQLDMLLEKLPQVAEEISGPLTSANKITLVSSGSGTMGAAKVTGEVLDILTRLPESVERLTGVSISQVNHKPLRTA

SEQ ID NO: 159384 - protein, 192 aa, Artificial Sequence
  derived and/or modified sequence
MFFTCGPNEAMVVSGFCRSPPVMVAGGRVFVLPCIQQIQRISLNTLTLNVKSEKVKIQGQNKEMLAAACQMFLGKTEAEIAHIALETLEGHQRAIMAHMTVEEIYKDRQKFSEQVFKVASSDLVNMGISVVSYTLKDIHDDQDYLHSLGKARTAQVQKDARIGEAEAKRDAGIREAKAKQEKVSAQYLSEIE

SEQ ID NO: 159385 - protein, 235 aa, Artificial Sequence
  derived and/or modified sequence
MFFTCGPNEAMVVSGFCRSPPVMVAGGRVFVLPCIQQIQRISLNTLTLNVKSEKVYTRHGVPISVTGIAQVKIQGQNKEMLAAACQMFLGKTEAEIAHIALETLEGHQRAIMAHMTVEEIYKDRQKFSEQVFKVASSDLVNMGISVVSYTLKDIHDDQDYLHSLGKARTAQVQKDARIGEAEAKRDAGIREAKAKQEKVSAQYLSEIEMAKAQRDYELKKAAYDIEVNTRRAQAD

SEQ ID NO: 159386 - protein, 185 aa, Artificial Sequence
  derived and/or modified sequence
MFFTCGPNEAMVVSGFCRSPPVMVAGGRVFVLPCIQQIQRISLNTLTLNVKSEKVYTRHGVPISVTGIAQVKIQGQNKEMLAAACQMFLGKTEAEIAHIALETLEGHQRAIMAHMTVEEIYKDRQKFSEQVFKVASSDLVNMGISVVSYTLKDIHDDQDYLHSLGKARTAQVQKDARIGEAEAKR

SEQ ID NO: 159387 - protein, 210 aa, Artificial Sequence
  derived and/or modified sequence
MFFTCGPNEAMVVSGFCRSPPVMVAGGRVFVLPCIQQIQRISLNTLTLNVKSEKVYTRHGVPISVTGIAQVKIQGQNKEMLAAACQMFLGKTEAEIAHIALETLEGHQRAIMAHMTVEEIYKDRQKFSEQVFKVASSDLVNMGISVVSYTLKDIHDDQDYLHSLGKARTAQVQKDARIGEAEAKRDAGIREAKAKQEKVSAQYLSEIEMA

SEQ ID NO: 159388 - protein, 252 aa, Artificial Sequence
  derived and/or modified sequence
MFFTCGPNEAMVVSGFCRSPPVMVAGGRVFVLPCIQQIQRISLNTLTLNVKSEKVYTRHGVPISVTGIAQVKIQGQNKEMLAAACQMFLGKTEAEIAHIALETLEGHQRAIMAHMTVEEIYKDRQKFSEQVFKVASSDLVNMGISVVSYTLKDIHDDQDYLHSLGKARTAQVQKDARIGEAEAKRDAGIREAKAKQEKVSAQYLSEIEMAKAQRDYELKKAAYDIEVNTRRAQADLAYQLQVAKTKQQIEEQ

SEQ ID NO: 159389 - protein, 182 aa, Artificial Sequence
  derived and/or modified sequence
VKIQGQNKEMLAAACQMFLGKTEAEIAHIALETLEGHQRAIMAHMTVEEIYKDRQKFSEQVFKVASSDLVNMGISVVSYTLKDIHDDQDYLHSLGKARTAQVQKDARIGEAEAKRDAGIREAKAKQEKVSAQYLSEIEMAKAQRDYELKKAAYDIEVNTRRAQADLAYQLQVAKTKQQIEEQ

SEQ ID NO: 159390 - protein, 165 aa, Artificial Sequence
  derived and/or modified sequence
VKIQGQNKEMLAAACQMFLGKTEAEIAHIALETLEGHQRAIMAHMTVEEIYKDRQKFSEQVFKVASSDLVNMGISVVSYTLKDIHDDQDYLHSLGKARTAQVQKDARIGEAEAKRDAGIREAKAKQEKVSAQYLSEIEMAKAQRDYELKKAAYDIEVNTRRAQAD

SEQ ID NO: 159391 - protein, 82 aa, Artificial Sequence
  derived and/or modified sequence
DYLHSLGKARTAQVQKDARIGEAEAKRDAGIREAKAKQEKVSAQYLSEIEMAKAQRDYELKKAAYDIEVNTRRAQADLAYQL

SEQ ID NO: 159392 - protein, 60 aa, Artificial Sequence
  derived and/or modified sequence
VAKTKQQIEEQRVQVQVVERAQQVAVQEQEIARREKELEARVRKPAEAERYKLERLAEAE

SEQ ID NO: 159393 - protein, 231 aa, Artificial Sequence
  derived and/or modified sequence
VKIQGQNKEMLAAACQMFLGKTEAEIAHIALETLEGHQRAIMAHMTVEEIYKDRQKFSEQVFKVASSDLVNMGISVVSYTLKDIHDDQDYLHSLGKARTAQVQKDARIGEAEAKRDAGIREAKAKQEKVSAQYLSEIEMAKAQRDYELKKAAYDIEVNTRRAQADLAYQLQVAKTKQQIEEQRVQVQVVERAQQVAVQEQEIARREKELEARVRKPAEAERYKLERLAEAE

SEQ ID NO: 159394 - DNA, 1912 bp, Artificial Sequence
  derived and/or modified sequence
ggcggggcgaagtgggggtgcttagtccgttgcggggggcggggtcgcgtctgccgcagcaacggggtgcggcagggtggggaacgcgggagcggggccagctcccaggaaagctggtctgcgagcggcccctgcccggctcccaggtccctgcgcgaccccgcccttcccgagaccccagccgggctgccgcccgcgtcccggaagctccagcctgaaccatgtttttcacttgtggcccaaatgaggccatggtggtctccgggttctgccgaagccccccagtcatggtggctggagggcgtgtctttgtcctgccctgcatccaacagatccagaggatctctctcaacacactgaccctcaatgtcaagagtgaaaaggtttacactcgccatggggtccccatctcagtcactggcattgcccaggtaaaaatccaggggcagaacaaggagatgttggcggccgcctgtcagatgttcctggggaagacggaggctgagattgcccacattgccctggagacgttagagggccaccagagggccatcatggcccacatgactgtggaggagatctataaggacaggcagaaattctcagaacaggttttcaaagtggcctcctcagacctggtcaacatgggcatcagtgtggttagctacactctgaaggacattcacgatgaccaggactatttgcactctttggggaaggctcgaacagctcaagtccaaaaagatgcacggattggagaagcagaggccaagagagatgctgggatccgggaagctaaagccaagcaggaaaaggtgtctgctcagtacctgagtgagatcgagatggccaaggcacagagagattacgaactgaagaaggccgcctatgacatcgaggtcaacacccgccgagcacaggctgacctggcctatcagcttcaggtggccaagactaagcagcagattgaggagcagcgggtgcaggtgcaggtggtggagcgggcccagcaggtggcagtgcaggagcaggagatcgcccggcgggagaaggagctggaggcccgggtgcggaagccagcggaagcggagcgctacaagctggagcgcctagccgaggcagagaagtcccaactaattatgcaggcggaggcagaagccgcgtctgtgcggatgcgtggggaagctgaggcctttgccataggggcccgagcccgagccgaggctgagcagatggccaagaaggcagaagccttccagctgtaccaagaggctgctcagctggacatgctgctagagaagctgccccaggtggcagaggagatcagtggtcccttgacttcagccaataagatcacactggtgtccagcggcagtgggaccatgggggcagccaaagtgactggggaagtactggacattctaactcgcctgccagagagtgtggaaagactcacaggcgtgagcatctcccaggtgaatcacaagcctttgagaacagcctgagccttcagccctcacagatgcccagcctcatagctgaagttgcctgaatgatcctcctgttgcatgtaacccactggcctccctgagcatgtccattgacagtgaggtcccacccctcatctctccttgccaaatagtttgtgccttgtcttgaagggggttgctccccttgccaacctcacactgctatgattgccaactccagcggtcccatgtcagccttctgatgatcccactccaccccacctcaacttatttaacttcctaattaaatcagactgtttgagcctgttgtctagaatattttcctgaccaagactgagggatgggctggaggttttcaactttgctacccaaataaattgctgtaagtaagtactaataaaacagaagcaactggaaattaa

SEQ ID NO: 159395 - DNA, 592 bp, Artificial Sequence
  derived and/or modified sequence
ctccagcctgaaccatgtttttcacttgtggcccaaatgaggccatggtggtctccgggttctgccgaagccccccagtcatggtggctggagggcgtgtctttgtcctgccctgcatccaacagatccagaggatctctctcaacacactgaccctcaatgtcaagagtgaaaaggtaaaaatccaggggcagaacaaggagatgttggcggccgcctgtcagatgttcctggggaagacggaggctgagattgcccacattgccctggagacgttagagggccaccagagggccatcatggcccacatgactgtggaggagatctataaggacaggcagaaattctcagaacaggttttcaaagtggcctcctcagacctggtcaacatgggcatcagtgtggttagctacactctgaaggacattcacgatgaccaggactatttgcactctttggggaaggctcgaacagctcaagtccaaaaagatgcacggattggagaagcagaggccaagagagatgctgggatccgggaagctaaagccaagcaggaaaaggtgtctgctcagtacctgagtgagatcgagat

SEQ ID NO: 159396 - DNA, 792 bp, Artificial Sequence
  derived and/or modified sequence
gaaaggatgggcccctgtggacgccacagcgcgccttccccatccgcaaaggctttccctccctctcctccagctccagcctgaaccatgtttttcacttgtggcccaaatgaggccatggtggtctccgggttctgccgaagccccccagtcatggtggctggagggcgtgtctttgtcctgccctgcatccaacagatccagaggatctctctcaacacactgaccctcaatgtcaagagtgaaaaggtttacactcgccatggggtccccatctcagtcactggcattgcccaggtaaaaatccaggggcagaacaaggagatgttggcggccgcctgtcagatgttcctggggaagacggaggctgagattgcccacattgccctggagacgttagagggccaccagagggccatcatggcccacatgactgtggaggagatctataaggacaggcagaaattctcagaacaggttttcaaagtggcctcctcagacctggtcaacatgggcatcagtgtggttagctacactctgaaggacattcacgatgaccaggactatttgcactctttggggaaggctcgaacagctcaagtccaaaaagatgcacggattggagaagcagaggccaagagagatgctgggatccgggaagctaaagccaagcaggaaaaggtgtctgctcagtacctgagtgagatcgagatggccaaggcacagagagattacgaactgaagaaggccgcctatgacatcgaggtcaacacccgccgagcacaggctgac

SEQ ID NO: 159397 - DNA, 629 bp, Artificial Sequence
  derived and/or modified sequence
gagtgggggaggggagatggagcctggggctgccgagaagcagggagagaggggaaagctccagcctgaaccatgtttttcacttgtggcccaaatgaggccatggtggtctccgggttctgccgaagccccccagtcatggtggctggagggcgtgtctttgtcctgccctgcatccaacagatccagaggatctctctcaacacactgaccctcaatgtcaagagtgaaaaggtttacactcgccatggggtccccatctcagtcactggcattgcccaggtaaaaatccaggggcagaacaaggagatgttggcggccgcctgtcagatgttcctggggaagacggaggctgagattgcccacattgccctggagacgttagagggccaccagagggccatcatggcccacatgactgtggaggagatctataaggacaggcagaaattctcagaacaggttttcaaagtggcctcctcagacctggtcaacatgggcatcagtgtggttagctacactctgaaggacattcacgatgaccaggactatttgcactctttggggaaggctcgaacagctcaagtccaaaaagatgcacggattggagaagcagaggccaagagaga

SEQ ID NO: 159398 - DNA, 717 bp, Artificial Sequence
  derived and/or modified sequence
gaaaggatgggcccctgtggacgccacagcgcgccttccccatccgcaaaggctttccctccctctcctccagctccagcctgaaccatgtttttcacttgtggcccaaatgaggccatggtggtctccgggttctgccgaagccccccagtcatggtggctggagggcgtgtctttgtcctgccctgcatccaacagatccagaggatctctctcaacacactgaccctcaatgtcaagagtgaaaaggtttacactcgccatggggtccccatctcagtcactggcattgcccaggtaaaaatccaggggcagaacaaggagatgttggcggccgcctgtcagatgttcctggggaagacggaggctgagattgcccacattgccctggagacgttagagggccaccagagggccatcatggcccacatgactgtggaggagatctataaggacaggcagaaattctcagaacaggttttcaaagtggcctcctcagacctggtcaacatgggcatcagtgtggttagctacactctgaaggacattcacgatgaccaggactatttgcactctttggggaaggctcgaacagctcaagtccaaaaagatgcacggattggagaagcagaggccaagagagatgctgggatccgggaagctaaagccaagcaggaaaaggtgtctgctcagtacctgagtgagatcgagatggcc

SEQ ID NO: 159399 - DNA, 851 bp, Artificial Sequence
  derived and/or modified sequence
ggcggggcgaagtgggggtgcttagtccgttgcggggggcggggtcgcgtctgccgcagcaacggggtgcggcagggtggggaacgcgggagcggggccagctcccaggaaagctggtctgcgagcggcccctgcccggctcccaggtccctgcgcgaccccgcccttcccgagaccccagccgggctgccgcccgcgtcccggaagctccagcctgaaccatgtttttcacttgtggcccaaatgaggccatggtggtctccgggttctgccgaagccccccagtcatggtggctggagggcgtgtctttgtcctgccctgcatccaacagatccagaggatctctctcaacacactgaccctcaatgtcaagagtgaaaaggtttacactcgccatggggtccccatctcagtcactggcattgcccaggtaaaaatccaggggcagaacaaggagatgttggcggccgcctgtcagatgttcctggggaagacggaggctgagattgcccacattgccctggagacgttagagggccaccagagggccatcatggcccacatgactgtggaggagatctataaggacaggcagaaattctcagaacaggttttcaaagtggcctcctcagacctggtcaacatgggcatcagtgtggttagctacactctgaaggacattcacgatgaccaggactatttgcactctttggggaaggctcgaacagctcaagtccaaaaagatgcacggattggagaagcagaggccaagagagatgctgggatccgggaagctaaagccaagcaggaaaaggtgtctgctcagtacctgagtgagatcgagatggcc

SEQ ID NO: 159400 - DNA, 888 bp, Artificial Sequence
  derived and/or modified sequence
tggggctgccgagaagcagggagagaggggaaaggtctgcaggcctctgggcgcgggggacctttatcaaagggagcggcgaggggaagggagggaccatacgcaggcggagaagagctccagcctgaaccatgtttttcacttgtggcccaaatgaggccatggtggtctccgggttctgccgaagccccccagtcatggtggctggagggcgtgtctttgtcctgccctgcatccaacagatccagaggatctctctcaacacactgaccctcaatgtcaagagtgaaaaggtttacactcgccatggggtccccatctcagtcactggcattgcccaggtaaaaatccaggggcagaacaaggagatgttggcggccgcctgtcagatgttcctggggaagacggaggctgagattgcccacattgccctggagacgttagagggccaccagagggccatcatggcccacatgactgtggaggagatctataaggacaggcagaaattctcagaacaggttttcaaagtggcctcctcagacctggtcaacatgggcatcagtgtggttagctacactctgaaggacattcacgatgaccaggactatttgcactctttggggaaggctcgaacagctcaagtccaaaaagatgcacggattggagaagcagaggccaagagagatgctgggatccgggaagctaaagccaagcaggaaaaggtgtctgctcagtacctgagtgagatcgagatggccaaggcacagagagattacgaactgaagaaggccgcctatgacatcgaggtcaacacccgccgagcacaggctgacctggcctatcagcttcaggtggccaagactaagcagcagattgaggagcagc

SEQ ID NO: 159401 - DNA, 34 bp, Artificial Sequence
  derived and/or modified sequence
gtggccaagactaagcagcagattgaggagcagc

SEQ ID NO: 159402 - DNA, 761 bp, Artificial Sequence
  derived and/or modified sequence
tggggctgccgagaagcagggagagaggggaaaggtctgcaggcctctgggcgcgggggacctttatcaaagggagcggcgaggggaagggagggaccatacgcaggcggagaagagctccagcctgaaccatgtttttcacttgtggcccaaatgaggccatggtggtctccgggttctgccgaagccccccagtcatggtggctggagggcgtgtctttgtcctgccctgcatccaacagatccagaggatctctctcaacacactgaccctcaatgtcaagagtgaaaaggtttacactcgccatggggtccccatctcagtcactggcattgcccaggtaaaaatccaggggcagaacaaggagatgttggcggccgcctgtcagatgttcctggggaagacggaggctgagattgcccacattgccctggagacgttagagggccaccagagggccatcatggcccacatgactgtggaggagatctataaggacaggcagaaattctcagaacaggttttcaaagtggcctcctcagacctggtcaacatgggcatcagtgtggttagctacactctgaaggacattcacgatgaccaggactatttgcactctttggggaaggctcgaacagctcaagtccaaaaagatgcacggattggagaagcagaggccaagagagatgctgggatccgggaagctaaagccaagcaggaaaaggtgtctgctcagtacctgagtgagatcgagatggcc

SEQ ID NO: 159403 - DNA, 1284 bp, Artificial Sequence
  derived and/or modified sequence
atgttttttacatgtgggccaaatgaggcgatggttgtctcagggttttgccggagtccgcccgttatggtggcgggaggacgagtgtttgtgctgccctgtattcagcagatacagaggatatcactgaataccttaactctgaatgtgaaatctgagaaagtgtacaccagacatggtgtaccaatctcagtgactggtattgctcaggttaagattcaaggacagaacaaggaaatgctggccgctgcctgccagatgttcctcggaaagaccgaggcagagattgcacacatcgcattggaaaccctggaaggccaccaacgggccatcatggcacacatgaccgtggaagagatctacaaggaccgacagaaattcagcgagcaagtcttcaaagtcgctagcagcgaccttgtgaatatgggtatatcggtggtgtcatatactctgaaggatatacacgacgaccaggattaccttcattcgcttggcaaagccaggacagcccaggtccagaaagatgctcgtatcggggaagcggaggcaaagcgggacgccggcatacgggaggctaaggcaaaacaggagaaggtgtcggcccagtatctgtcagaaatcgagatggccaaggctcagcgagattatgagttaaagaaagctgcatatgatatagaagtcaatactcgcagagcccaagctgatttggcatatcagctgcaggtcgcgaaaaccaagcaacagatagaggaacaaagagtgcaggttcaggtcgtggaacgtgctcagcaagtcgccgtgcaggaacaggagattgctaggcgggaaaaggaacttgaagccagggttagaaaacctgcagaggcggaacgttacaagctggagcggctggctgaggcggagaagtcacagctgataatgcaggcagaagctgaggcggccagcgtgaggatgcggggagaagcagaagccttcgcaatcggggcccgggcccgggccgaggccgaacagatggctaagaaggcagaagcctttcagttgtatcaggaggccgcacagctagacatgctgcttgaaaaactcccccaggtagccgaagagatttcaggtcccctcactagcgccaataaaatcacccttgtaagctctggatcagggacgatgggagcagcaaaagtgacaggggaggtgttggatatcctaacccgactgccagagtcagtcgagagactgaccggggtgagcatcagccaggtcaaccacaagccactgaggactgcttag

SEQ ID NO: 159404 - DNA, 1284 bp, Artificial Sequence
  derived and/or modified sequence
atgttctttacatgtggtcccaacgaggctatggtcgtgagcggcttctgtagatctccacctgtgatggtcgctggagggcgcgtcttcgtgctaccgtgcattcagcagatccagagaatttctctcaacacactgaccctcaatgtgaagtctgagaaggtgtatactcgccatggtgtgcctatcagtgttaccggaatagctcaagtcaagattcagggacaaaataaggaaatgttggctgccgcttgccagatgtttctgggtaaaacagaagccgaaattgcacacatagccctggagacactggaagggcatcagcgagcgatcatggcccacatgaccgtggaagagatctacaaggacaggcagaagttttctgaacaagtctttaaggtcgcgagctccgatttggtcaatatgggcattagcgttgtgtcttacacgctgaaggacattcatgatgaccaggactacctgcacagcctggggaaggctcgcaccgcgcaggtgcagaaggatgccagaatcggcgaggccgaagctaaacgggacgcaggtataagagaggccaaggctaaacaagagaaagtctctgctcagtatctgtccgaaattgaaatggctaaggctcagagggattacgaactgaagaaggcagcatatgacatagaagtgaacacaagaagggcacaggcagacctggcctatcagctgcaggtggcaaagacaaaacagcagattgaagagcagagagttcaggtccaggttgtcgaaagggctcagcaagtggcagttcaagaacaggaaatcgctcgtagagagaaagaacttgaggccagggtgagaaagcctgcggaagccgagaggtataaactggagagactcgcggaggcagagaagtcacaactgatcatgcaggctgaggcagaagcagcatcagttaggatgcgcggagaagcagaggcttttgctatcggtgcaagggcgagagctgaagcagagcagatggccaagaaggccgaagccttccagctgtaccaggaagctgctcaactcgacatgttgctggagaagcttccccaggttgccgaggagatttctggccccctcacctcagctaacaaaatcactctggtgagcagtggttccgggacaatgggtgctgccaaggtgaccggggaggttcttgatatcttaaccaggctgcccgagtccgtggagcgtctgacaggcgttagcatctcacaggtcaaccataagcctctgcgcaccgcctag

SEQ ID NO: 159405 - DNA, 1284 bp, Artificial Sequence
  derived and/or modified sequence
atgttcttcacatgtgggcccaatgaggcaatggtcgtgagcggtttctgtagatcaccacccgtgatggttgctgggggaagggtctttgtgctgccttgcatccagcagattcagcgtatctccctcaacacattgacacttaacgttaaaagcgaaaaagtctatacacgccacggcgtgcccatcagcgttacgggcatcgcccaagtaaaaatccaggggcagaacaaggaaatgttagccgcagcttgtcagatgtttcttggcaagacagaagctgagatcgcacacattgccctggagacgctggaaggccaccagagggccattatggcccacatgacagttgaggaaatctataaggacaggcagaaattctccgaacaggtctttaaggtggcttcctctgatctggtcaatatggggattagcgtagtgtcctatactctgaaggatattcacgacgaccaggactacctgcacagtctgggcaaggcccgcaccgcacaagtccagaaggacgcgcgcattggggaggcagaggccaaacgcgatgccggtataagagaagcaaaggcgaagcaggaaaaagttagcgcacagtatcttagcgagatcgagatggcaaaagcacagcgcgactacgagctgaagaaagcagcttatgacatcgaggtgaacacacgccgggcgcaagctgaccttgcataccaattgcaggttgcaaagacgaagcagcaaattgaggaacaacgggtgcaggtgcaagtggttgaaagggcccagcaggtcgccgtgcaggaacaggaaatagcgcgccgcgaaaaagagcttgaggccagggtgcgaaaacctgctgaagctgaaagatataaactggagaggcttgctgaagcagaaaaaagccaattgattatgcaggccgaggcagaggcagcatccgtgcgcatgcgaggagaagcggaagcttttgccatcggtgcccgggctcgcgccgaggcagagcagatggcaaaaaaggctgaggcttttcaactgtaccaggaagcagcgcagctggatatgctccttgagaagctgcctcaggtggcagaggagatctcaggccctctgactagcgcaaacaagatcacgctggtatccagtggctccggcactatgggtgctgctaaggtcaccggcgaagtgctagacatcctcacccgcctgccagagtctgtcgaacggttgactggagtgtctatttcccaggtcaaccacaagccactccgcacagcctag

SEQ ID NO: 159406 - DNA, 579 bp, Artificial Sequence
  derived and/or modified sequence
atgttctttacctgcggccctaacgaagcaatggttgtctccggattttgcagaagcccgccggtaatggttgctgggggccgcgtgttcgtgctaccctgcatccagcagatccagcgtatcagcctcaacaccttgacccttaatgtcaaaagtgaaaaggtgaagatccagggccagaacaaagaaatgctggctgctgcttgccagatgttcctcggtaaaacagaagctgagatcgcccatatagcactggagacattagagggacaccaaagggccatcatggctcatatgaccgtggaggagatttataaagacagacagaaattttcagagcaggtattcaaagtggcctcatctgatctggtgaatatgggcatctcagtggtgagctacaccctgaaggacatccatgacgaccaggattatttacacagcctggggaaagccaggactgcacaggttcaaaaagatgcccgaatcggcgaagcagaagccaaaagggacgccggcattagagaggcaaaagccaagcaggagaaggtgtccgcccagtatctatcagagattgagtag

SEQ ID NO: 159407 - DNA, 579 bp, Artificial Sequence
  derived and/or modified sequence
atgttctttacctgtggtccgaacgaagcaatggtcgtgtctggtttttgtcgctcaccccccgtgatggtagctgggggtcgcgtatttgtgctgccctgcatccagcagatacaacggatcagtctcaacaccctcaccctgaatgttaagagtgagaaggtaaaaattcaaggccagaacaaagagatgctggccgccgcttgccagatgtttctaggcaagaccgaagctgaaatcgctcacatcgctttagagactcttgaaggacatcagagggccatcatggctcacatgactgtggaagagatttataaggacagacagaaattttccgagcaggtgtttaaagtggcctcttcagacctagtgaacatggggatctctgtggtttcgtacacgctcaaggacattcacgacgatcaggactacctccattctttaggcaaagccaggaccgcccaggtgcaaaaggatgcccgaattggcgaggccgaggccaagcgggacgccggtattcgggaggccaaggcgaagcaagagaaagtgtcggctcaatacctgagtgagattgaatag

SEQ ID NO: 159408 - DNA, 579 bp, Artificial Sequence
  derived and/or modified sequence
atgttcttcacctgcggaccaaacgaggccatggtggtctccggcttctgccggtctccgcccgtgatggttgcaggggggcgcgtcttcgtcctcccatgcattcagcagatacagcgaataagcctgaataccctcaccctgaatgtgaagtccgagaaagtgaagatccagggtcaaaacaaggaaatgcttgccgctgcctgtcagatgtttctgggcaaaaccgaggctgagatagctcacattgccctggagactctggaagggcaccagcgtgctatcatggcgcatatgaccgtcgaggagatctacaaggaccgccagaagttctccgaacaggtcttcaaagtggcatccagtgatctcgttaacatgggaatcagtgtggtgagctatactttaaaagacattcacgacgaccaggattatcttcactctctcgggaaggccagaactgcgcaggtacagaaggacgccagaatcggagaggccgaagcaaagcgtgacgcggggatacgtgaggcaaaggcaaagcaggaaaaagttagtgcacagtacctcagtgaaatcgagtag

SEQ ID NO: 159409 - DNA, 579 bp, Artificial Sequence
  derived and/or modified sequence
atgttctttacatgcgggcctaacgaggctatggtggtcagcgggttctgtagatcaccaccggttatggtagcaggaggtcgcgtctttgtgctgccttgtattcagcagatccagcgaatttctctcaacactcttactctgaacgtgaagtcagaaaaagttaagatccagggacagaacaaagaaatgctcgccgccgcatgccagatgtttctggggaagactgaagccgaaattgctcacattgccctggaaaccctcgaagggcatcagagggctatcatggcccatatgactgttgaggagatctacaaagatagacagaaattttcagagcaggtctttaaggtcgcctcctcagatctcgtaaatatggggatctctgttgtcagctacacactgaaggatatccacgatgaccaggattacctccattcacttgggaaggcaaggactgcccaagtccaaaaagatgcccgaattggggaggctgaagccaagcgagatgcaggcatcagggaagccaaggccaagcaggagaaggtgagcgcacagtatttatctgagatagagtag

SEQ ID NO: 159410 - DNA, 708 bp, Artificial Sequence
  derived and/or modified sequence
atgttcttcacttgtggtcccaacgaagcaatggttgtgtccggtttttgccggtccccccccgtaatggtcgctggaggcagagtattcgtgctgccttgcatccagcagatccagcgcatcagtttgaatactctgacactgaatgtgaagtcagagaaggtgtataccagacacggtgtaccgatttctgtcacaggcatagcccaggtgaaaatccagggacagaataaggaaatgttagcggccgcatgccagatgttcttgggaaagaccgaagcagaaattgcccatattgctctggagactctggagggtcaccagcgcgctataatggcccatatgacagtggaggaaatttataaggaccgccagaaattttctgagcaggtgtttaaagtggctagcagcgacctggtgaatatgggcatatctgtggtatcctacacattgaaggacatccatgatgatcaagactacttgcactccctgggcaaggctcggactgcacaggtgcagaaagatgcacgcatcggcgaagcagaggcaaaaagagacgccgggatcagagaggcaaaagcgaaacaggaaaaagtttccgcacaatacctgagcgaaatagagatggccaaagcacaaagggattatgagttgaaaaaagccgcgtatgacattgaggtgaatactagaagggcccaagctgactag

SEQ ID NO: 159411 - DNA, 558 bp, Artificial Sequence
  derived and/or modified sequence
atgttctttacctgcgggcccaatgaggccatggtggtgagcggattctgtcgcagcccacccgtgatggtggctggaggtagagtgttcgtcctcccgtgcatacagcagatccagcgaatttcactgaatacgttgacactgaacgtgaagtccgagaaggtgtacacacgacacggcgttcctatctcagtaactgggattgcccaagtcaagatccagggccagaacaaggaaatgctggccgcggcatgtcaaatgttcctgggaaaaacagaagctgagatcgcccacattgctctcgagacactggagggacaccagcgggccataatggcacacatgactgtggaggagatttacaaggataggcagaaatttagtgaacaggtattcaaagtcgcgagcagcgatctggtgaacatgggaatctccgtggtctcgtatacgctgaaggatattcatgacgaccaggactatcttcacagccttgggaaagcacgtactgcgcaagtgcagaaggatgcacgaattggggaagctgaagccaagcggtag

SEQ ID NO: 159412 - DNA, 558 bp, Artificial Sequence
  derived and/or modified sequence
atgttcttcacatgcgggcccaatgaggcaatggtagtgagtggcttttgtcgctctcctcccgtcatggttgcaggaggacgggtctttgtgcttccttgcatccagcagattcaaagaatttctctgaataccctgaccctgaacgtgaagtctgaaaaagtatacacccggcacggcgtccccatatccgtcaccggcatcgcccaggtgaagatccaaggacagaacaaggagatgctagcagctgcatgtcagatgttcctgggtaagacagaggcagaaatagcgcatatcgcacttgaaactctggaaggccaccagcgggctatcatggctcatatgactgtggaggaaatatataaggatcggcaaaagttttccgaacaggtcttcaaggttgccagctccgatctagttaatatgggtatttcggtagtaagttacaccctaaaggatatccacgatgaccaggactacctgcacagcctgggcaaggccagaacggcgcaggtccagaaggatgcaaggatcggagaggctgaggccaagcgatag

SEQ ID NO: 159413 - DNA, 633 bp, Artificial Sequence
  derived and/or modified sequence
atgttctttacctgcgggcctaacgaggccatggtcgtgagtgggttctgccgctcaccccctgtcatggtggcggggggtcgcgtctttgtgctgccctgcattcaacagatccagagaatttcactgaacactttaacgctaaatgtcaagagtgaaaaggtgtacacccgacatggagtgcccatatcagtcaccggcatcgcccaagtgaaaattcaggggcagaataaggaaatgttggcggcggcatgccaaatgtttttaggcaagacagaagcagaaatcgcccatatcgccctcgagacacttgaaggtcaccaacgcgctataatggcccatatgaccgtcgaggagatatacaaagaccgccagaagtttagtgagcaggtgtttaaagtggcgtcctctgatcttgtgaacatgggaatctctgttgtaagctacacactgaaagacatacatgatgatcaggactatctccactctctcggcaaagcgcgtacggcacaggtgcagaaagatgctagaattggggaagctgaggccaagcgggatgcaggaattcgggaggcaaaagctaagcaggagaaggtcagcgcccagtatctgagcgaaatcgaaatggcctag

SEQ ID NO: 159414 - DNA, 633 bp, Artificial Sequence
  derived and/or modified sequence
atgtttttcacttgtggccctaacgaggcaatggtggttagcgggttctgccgctcccccccagttatggtggctgggggacgcgtgtttgtactcccttgcatccagcagattcagagaatctccctcaacacacttacgctcaacgttaagagcgagaaagtttacaccagacacggtgtacctatcagtgttacaggaatagcccaggtaaagatccaaggtcaaaacaaagaaatgctcgcagccgcatgtcaaatgttcctgggcaaaactgaggcagagatcgcccatattgcactggagactctggaggggcaccaacgagcgataatggcacatatgacagtggaagaaatttacaaggataggcaaaagttttctgaacaggtttttaaggttgctagctccgacctggtgaatatgggaatcagtgtggtgtcatatacactcaaagatattcacgacgaccaggattacttacactcgcttggcaaggccagaacagcccaggtccagaaagacgcacggatcggggaagccgaagccaaacgggatgctggtataagggaagcgaaagccaaacaagaaaaggtgagtgcccagtatctctccgaaatcgagatggcatag

SEQ ID NO: 159415 - DNA, 759 bp, Artificial Sequence
  derived and/or modified sequence
atgttcttcacttgcggacctaatgaagccatggtcgtttccggcttctgccggtccccacccgtgatggtagccggcggacgggtgttcgtactcccttgtattcagcagattcaacggatttccttgaacactcttactcttaacgttaagtcagaaaaggtttataccagacacggcgtgcccatctctgtgacaggcatcgcccaagtcaagatccaaggccaaaacaaggaaatgcttgctgctgcttgccagatgttcctcggtaaaaccgaagctgaaattgctcatatagctttagaaacccttgaaggtcatcaaagagctattatggcgcatatgaccgtggaggagatctataaggatagacagaaattttccgagcaagtcttcaaggtcgcgagctccgacttagtgaacatgggcatttccgtggtgagctacaccttgaaggacatccatgatgatcaggattatctgcattccctggggaaggcccggactgcgcaggtgcagaaggacgcccgaataggcgaggccgaggctaagcgggatgctggcatcagagaggcaaaagccaagcaggagaaagtgtccgcccaatatctttcagagattgaaatggccaaagctcaaagggactacgagctgaagaaggccgcttacgatatcgaagttaatacacgcagagcccaggctgatctggcttatcagctgcaggtagccaagacaaagcaacaaattgaggagcagtag

SEQ ID NO: 159416 - DNA, 708 bp, Artificial Sequence
  derived and/or modified sequence
atgttcttcacatgtgggcctaacgaggccatggttgtctccggattttgtaggtccccacctgtaatggtggccggagggcgcgtgtttgttctcccatgcattcaacagatccaaagaatatcactgaacacattgactttgaatgtgaaatccgaaaaagtttacactcgtcacggagtccccattagcgtgaccggcatcgcacaagtcaagattcaaggtcagaataaagagatgctggcagctgcctgccagatgtttctgggcaaaacagaagctgagatcgctcatatagcactggaaacattagaaggacaccagagagctattatggcccacatgacagtcgaggagatctacaaggataggcaaaaatttagcgaacaggtattcaaggttgcgtctagtgacttggttaatatgggcatttccgttgtgagctatacgctcaaagacatacatgatgatcaagactacttgcactctttgggcaaggctagaactgctcaggtgcaaaaggatgctaggatcggcgaggccgaagcgaaaagggatgccggaattagggaggccaaggcaaagcaagagaaggtgagtgctcagtacctttcagaaattgagatggcgaaagcccagcgggactacgaacttaagaaagccgcatatgacatcgaggtcaatactcgccgggcccaggcagactag

SEQ ID NO: 159417 - DNA, 1284 bp, Artificial Sequence
  derived and/or modified sequence
atgttctttacatgtggaccaaatgaagcgatggtggtcagtggattctgtcgcagcccccccgtgatggttgccggtggcagagtatttgtgctgccctgtattcagcagatacagagaatcagcctcaacactctgacgctcaacgtgaagagcgagaaggtgtacactcgtcacggggtaccgatcagcgtaacaggcattgcccaggtgaaaattcagggtcagaataaagagatgctagctgccgcctgtcagatgtttttgggcaagactgaagctgagatcgcccacatcgcactggaaactctggaagggcaccagcgggctataatggctcatatgactgtggaagagatctacaaagaccggcagaagttctccgaacaggtgtttaaggttgctagctctgacctcgtcaacatgggcatatctgtcgtttcctacacactcaaagacatacatgacgatcaagactatcttcattcacttggcaaggcgagaacagctcaggtgcagaaagatgctaggattggtgaagcagaggcaaagcgagacgcgggtattcgggaagctaaagccaaacaggaaaaagtgtccgcccaatacctgtcagaaatcgagatggcaaaggctcagagggactacgaacttaaaaaggccgcctacgacatagaggtgaatacacgacgtgcgcaagcagacttggcgtaccaactccaggtcgccaagaccaagcagcaaatcgaagagcagagagtgcaagtccaggtcgttgaacgcgcccaacaggtggctgtgcaggaacaggagatcgccaggcgggaaaaagagcttgaagcacgggtccgtaagccggctgaggcagaaaggtacaagctggagcggctggccgaagccgagaagtctcagctgattatgcaagctgaagccgaggctgcgtctgtgagaatgcggggcgaggctgaggccttcgcaattggagctagggccagggcagaagccgagcaaatggcaaagaaagccgaagcattccagttataccaggaggccgctcagttagatatgctcttggaaaagctgccccaagtggctgaggagatttctggccccttaacgtcagctaataaaatcacacttgtttccagcggtagcggcactatgggagctgcgaaagtcacaggggaagtcctggacattttgacgaggctccctgagtccgtcgaacgcctaactggcgtgagtatttcacaggttaatcataaaccgctaagaaccgcctag

SEQ ID NO: 159418 - DNA, 759 bp, Artificial Sequence
  derived and/or modified sequence
atgtttttcacctgcggccctaacgaagccatggttgtgagcggcttttgtagatccccacccgttatggtggccggaggccgggtgtttgtcctgccatgtattcagcaaatccaaagaatatctctcaacacccttacccttaatgtgaagtcggagaaagtttacacacggcatggcgtgccaatctccgttacaggtattgctcaagtcaagattcagggtcagaataaagaaatgctggcggcagcctgccagatgttccttgggaagaccgaggccgagatcgctcatattgcgctcgagacgctggagggacaccaacgcgctattatggcacacatgactgttgaggaaatttacaaagaccgtcagaaattttctgaacaagtgttcaaagtggcctcctctgacctggtgaatatgggaatttcagtggtcagctatacccttaaggacatccatgacgaccaggactatctacactctttgggcaaagcaaggaccgcccaggtgcaaaaggatgcccggatcggagaggcggaagcaaagcgagacgccgggatccgggaggcaaaggcaaaacaggagaaggtgagcgcccagtacctcagtgagattgagatggctaaagcccaacgcgactacgaacttaaaaaggctgcctacgatatcgaggtgaatacaagaagggcacaagccgacctggcctaccagctacaggtagccaaaaccaagcagcaaattgaggagcaatag

SEQ ID NO: 159419 - DNA, 759 bp, Artificial Sequence
  derived and/or modified sequence
atgttctttacctgtgggccgaatgaagcaatggtcgtgagtggattctgccggtctccacctgtgatggtcgcgggaggtcgagtattcgtgctgccctgtattcagcaaattcagaggatatcattgaatactttaacactcaacgtcaagtctgaaaaggtctacacacggcatggcgtaccgatttctgtgacaggaatcgcccaagtcaaaatacaggggcagaacaaagagatgctcgccgccgcctgtcagatgtttcttggcaaaaccgaagcggagatagcgcatattgcccttgagacactggaaggccaccaacgtgctatcatggctcacatgaccgtggaagagatctacaaggataggcagaagttctcggagcaggttttcaaggtggcatccagtgatcttgtgaacatggggatcagtgtggtttcatacacactcaaggatatccacgacgaccaagactatctgcactcactgggaaaggcccgcacagcccaggtgcagaaggacgccagaatcggagaggctgaagccaaaagagatgctgggatccgcgaggccaaagctaagcaggaaaaagtcagcgcacagtatctgtccgagattgagatggccaaggctcaacgggactacgaactcaagaaggcggcgtatgatattgaggtgaacacacgccgggcacaggccgatctggcttaccagttacaggtggccaaaaccaagcagcaaatagaggagcagtag

SEQ ID NO: 159420 - DNA, 558 bp, Artificial Sequence
  derived and/or modified sequence
atgtttttcacgtgtggacccaacgaagccatggtagtcagcggtttctgtcgcagtccccccgtaatggtggctggaggcagggtctttgttcttccctgcattcagcagattcagagaatttcccttaatacacttacacttaatgtgaaaagcgaaaaggtgtacacaaggcatggtgttccaatcagtgttaccggaattgcgcaggtgaagattcagggtcagaacaaggagatgttggcagctgcctgccaaatgtttctaggaaagactgaggctgagattgcacacatcgctcttgagactctggaaggacaccagcgggcgatcatggctcatatgactgtggaagaaatttacaaggatcgccagaagttctcagagcaggtgtttaaggtggcatccagcgacctcgtcaacatgggaatatccgtggtaagttacaccctaaaagatattcatgatgatcaggactatctgcacagtctgggcaaagcaaggacagcccaggtccaaaaagacgccaggatcggagaagccgaggcaaagaggtag

SEQ ID NO: 159421 - DNA, 759 bp, Artificial Sequence
  derived and/or modified sequence
atgttctttacgtgtggtcctaatgaagccatggtcgtgagcggcttttgcaggagccctccggtcatggtagcaggaggccgcgtcttcgttcttccctgcattcagcagattcagcgtatctcacttaacacattaacattgaacgtcaagagcgagaaggtgtacaccaggcacggcgttcctatttccgtgactggcatcgcccaggtgaagatccagggacagaataaagaaatgctggccgctgcttgtcaaatgtttctcggcaagacagaagccgagatcgctcacatcgctctggaaactctcgaagggcatcagagagccataatggcccatatgacagtggaggagatctacaaggaccgccagaagttcagcgaacaagtatttaaagtggcctcctcagacttagtgaatatgggcatttctgtggtaagttacacactcaaagatatccacgacgaccaggattacttacattctctcggcaaggcgcggactgcccaagtgcaaaaggacgccaggattggggaagccgaagccaagagagatgctggaatcagggaagcaaaggccaagcaggaaaaggtatctgcacagtacctgagcgagattgagatggctaaagcccagagggactacgagttgaaaaaggcggcctatgatatagaagttaatacacgccgggcccaggccgatcttgcatatcagctccaggttgctaaaacaaagcagcagatcgaagagcaatag

SEQ ID NO: 159422 - DNA, 558 bp, Artificial Sequence
  derived and/or modified sequence
atgttttttacatgcgggcccaacgaggccatggtggtaagtggtttctgccgcagcccccccgtcatggtggctggcggcagggtgtttgtgctgccctgcattcaacagattcagcgaattagtcttaacacactgaccctgaatgtgaagtctgagaaggtgtatactcggcacggcgtccccataagtgttacgggcatcgcgcaggttaagatccaagggcagaacaaagaaatgttagccgctgcctgccagatgttcctgggcaagaccgaagccgaaattgcacatatagctctggagacactggaaggacaccagcgcgccattatggcccacatgaccgtcgaggaaatttacaaggacagacagaagttttctgagcaagtgttcaaggtcgcctcctcggatctggtgaatatggggatttctgtggtgtcatacacgctcaaggatatccacgatgaccaggattaccttcattctttaggaaaggccagaactgctcaagtccagaaggatgccagaatcggcgaggcggaagcgaaacgttag

SEQ ID NO: 159423 - DNA, 1284 bp, Artificial Sequence
  derived and/or modified sequence
atgttcttcacgtgtggcccaaatgaggccatggttgtgagtggattttgcagatcccctcctgtgatggttgccggcggtagagtgttcgttctcccatgcattcaacagatccaaaggatttctctcaacacattgaccctgaatgtgaaatctgagaaggtctatactcgccatggggttcccatctctgtcaccgggatagctcaggtgaaaatacagggacagaacaaagaaatgctggccgctgcctgtcaaatgttcttgggaaagacagaggctgagattgctcacattgcgctcgagacactggaaggacaccagagagctattatggcccatatgacagtggaagaaatatacaaggataggcaaaagttctctgagcaagtgttcaaggtggcaagctcagatcttgtgaatatgggaatcagcgtggtgtcatatacgcttaaagacatccatgatgatcaagactatctgcacagtttagggaaggcgcgaaccgcccaggtccaaaaggatgctcgtatcggggaggccgaagctaaaagggacgcaggtattcgggaagctaaggcaaaacaggagaaagtgagcgcccagtatcttagtgaaatagagatggccaaggcacagcgagattatgagctgaagaaggcagcatacgatatcgaagttaacacacggcgggcacaagccgaccttgcataccagctccaggtcgcgaagaccaaacagcagattgaggaacagcgcgtgcaagtgcaggtagtcgagagagcccagcaggtagctgtgcaggaacaggagattgccaggcgggagaaagaactggaggcgcgagtcagaaagcccgccgaggcagagagatataaactggaaaggctggccgaagcggagaagagtcaactgataatgcaggccgaggctgaggcagcatcagtgcgtatgcgaggagaggctgaagcgtttgctataggggcacgcgcccgagcagaggctgagcagatggccaagaaagctgaagcttttcagctgtatcaggaggccgcccaactcgacatgctactggaaaagctcccgcaagtggcagaggaaatcagcggccccctcacctctgcgaataaaatcacactggtgagttccggatcaggcacaatgggcgcggcgaaggtcacaggagaggttctcgatatcctgacgcgcctgcctgagtccgtcgagcgcctcaccggagtctctatttcccaagtaaatcataaacccctgaggaccgcatag

SEQ ID NO: 159424 - DNA, 579 bp, Artificial Sequence
  derived and/or modified sequence
atgttcttcacctgcggccccaatgaagctatggtggtgtctggcttctgtcgttctcctcccgtcatggttgctggaggtcgcgtcttcgtgctgccttgcattcagcagattcagcgcatttctctgaacaccctcactctgaatgtcaaatcggaaaaagtcaaaatccagggacaaaataaagagatgctcgcagcggcttgtcagatgtttcttggcaagacagaggctgagatagctcatattgcccttgaaaccttggaagggcaccagcgggcgatcatggcgcacatgacggttgaagaaatatacaaagacaggcagaagttctctgaacaagttttcaaagtagccagcagtgacctggtaaatatggggatcagcgtggttagttatactctgaaagacatccatgacgaccaagactatctgcactccttaggtaaggctcgtactgcacaggtacaaaaggatgcccggattggcgaggccgaggccaagcgggacgccggaatcagagaggcaaaggccaaacaggaaaaggtaagcgcccagtatttgagtgagatcgaatag

SEQ ID NO: 159425 - DNA, 708 bp, Artificial Sequence
  derived and/or modified sequence
atgttcttcacctgcggccctaacgaggctatggtggtgtcaggattttgtcggtcgcctccagtcatggtggccggcggtagggtcttcgtcttgccatgtatccagcaaattcagcgcatttcacttaatacgctcacgttaaatgtgaaaagcgaaaaggtctacactcgccatggggtgcctatttccgttacagggatagctcaggtaaaaattcaaggacagaataaagaaatgctggcagccgcttgccaaatgttcttagggaagaccgaggcagagatcgcgcacatagctctggagaccctcgagggacaccagagagcgatcatggctcatatgaccgtcgaggagatttacaaagaccggcaaaagttctccgagcaggtcttcaaggtggcgagctccgacctcgtgaatatgggcatcagcgtggtgtcgtacacactgaaagacatacatgatgaccaggactacctgcactcactgggaaaagctcggacagcccaggtccagaaagacgcacggatcggtgaggccgaagctaagcgggatgcggggataagagaggctaaagctaagcaggaaaaggtgtctgcacagtacctgtctgagatcgagatggctaaggcccagagggactacgagctaaaaaaggccgcttatgatatagaggttaacactcgtagggcgcaagccgattag

SEQ ID NO: 159426 - DNA, 708 bp, Artificial Sequence
  derived and/or modified sequence
atgttctttacatgcggccccaacgaggcaatggtagtgtccggcttctgcaggtccccccccgtaatggtggcagggggccgggtgtttgtcctgccctgtattcaacaaattcagcgcatctctctcaacacccttactctcaacgtgaagagcgagaaagtctatacgcggcacggcgtacccatttccgtgaccggtatagcgcaggtcaagatacaaggccagaacaaggagatgctcgcagccgcatgccagatgttcttgggtaaaactgaggccgagatcgcacatatcgcactcgagactcttgagggtcaccaaagagccattatggcgcatatgaccgtggaggaaatttacaaggatagacagaagttctctgagcaggtgttcaaagtcgccagctcggacctcgtgaatatgggcatcagcgttgtatcatatactctaaaagatattcatgacgatcaagactacctgcactccttagggaaggcccgcaccgcacaggtgcagaaggatgccaggatcggcgaggccgaggcaaaacgtgacgccggaatcagggaggctaaggccaagcaggaaaaagtgagtgctcagtacctgagcgaaattgaaatggccaaggcccagcgggactacgagctcaaaaaggcagcctacgatatcgaggttaacactaggcgcgcccaggccgactag

SEQ ID NO: 159427 - DNA, 36 bp, Artificial Sequence
  derived and/or modified sequence
gtggccaagaccaagcagcagatagaggaacagtag

SEQ ID NO: 159428 - DNA, 759 bp, Artificial Sequence
  derived and/or modified sequence
atgtttttcacttgcggacctaacgaagcaatggttgtgtccggattttgcagatctcctccagtgatggtggctggtggccgagtgttcgtcctgccctgtattcagcagatacaaaggatcagcctgaatacgttgactttaaacgtgaagtcggagaaagtgtacacgcgtcacggcgtgcccattagtgtgacgggaatcgcacaggtaaagatacaggggcagaataaggagatgttggcagctgcttgccagatgttcctgggtaaaacagaagccgaaattgcacacattgccttagagacattggagggccaccagcgtgccataatggcacacatgacagtggaggagatatataaggacagacagaagttcagcgaacaggtttttaaagtggcttcatcagatctggtgaacatgggcatttcagtggtgtcatacactttgaaagacatccacgatgaccaggactatctccacagcctgggtaaagcgcgtacagctcaagttcagaaggacgcccgtataggcgaggccgaggccaaaagagacgccggtataagagaggcgaaagctaagcaggagaaggtctccgcgcagtacctctcagagatcgagatggctaaagcccagagagattatgaactgaagaaggctgcatacgacattgaggtgaacacaagaagggcccaggctgatctggcataccagcttcaagtcgcaaaaacaaaacagcagattgaagagcaatag

SEQ ID NO: 159429 - DNA, 708 bp, Artificial Sequence
  derived and/or modified sequence
atgttcttcacatgtggaccaaacgaagctatggttgtaagcggcttttgtcggtctcctcccgtgatggttgccggggggagagtatttgtgctgccatgcattcagcagatccagagaatttcgctcaatactctcacgcttaatgtcaagagcgaaaaagtctacacgaggcatggcgtgccaatctctgttacagggatcgcgcaagtcaaaatccaggggcagaacaaagagatgctagcggcggcctgccaaatgtttctggggaagaccgaggctgagatagctcatattgccttagagactctggagggacatcaaagggctattatggcccatatgacggtcgaggagatctacaaagatcgccaaaagttcagcgaacaggtcttcaaagtagcctcttcagatctggtgaacatggggatctctgttgtatcatacactttaaaagatatccacgatgatcaggactatcttcattctctaggaaaagccaggaccgcacaggtccaaaaagacgcacgtatcggggaagccgaagcaaagagagacgccggcatccgcgaagctaaggcgaaacaggaaaaagttagtgctcagtatctgagcgaaattgaaatggccaaggctcagcgagattatgagcttaaaaaggcagcatacgatatcgaagtaaatacacggagggcacaagctgactag

SEQ ID NO: 159430 - DNA, 558 bp, Artificial Sequence
  derived and/or modified sequence
atgttctttacttgcgggcccaatgaagcaatggtcgtgtccggcttctgccggtcaccaccagtcatggttgccggcggcagagtatttgtccttccatgcatccagcagatacaaagaatttcgctcaatactctgaccctgaatgtcaagagcgagaaggtttatacacgacatggcgtccctatctcagtaaccggaatagcccaagtgaagattcagggacagaacaaagagatgcttgcagcggcctgtcagatgttcctgggaaagaccgaggctgaaattgcgcatatcgctcttgaaacgttggaagggcaccagcgagccatcatggctcacatgacagtggaggagatctacaaggaccgacaaaaattttccgaacaagtattcaaagttgcttccagcgacctggtgaacatggggatcagcgtagtgtcttacacccttaaggatatccacgacgaccaggactatctacattctttggggaaggccaggactgcccaggtgcagaaagatgccagaatcggtgaagctgaggccaagagatag

SEQ ID NO: 159431 - DNA, 558 bp, Artificial Sequence
  derived and/or modified sequence
atgttcttcacctgcggtcccaatgaggccatggtggtgagcggcttctgccgctccccccctgtgatggtcgctgggggtcgagtctttgtgttgccttgcattcagcagatacagcgtatctcattgaacaccctcacgcttaacgtcaaatctgagaaagtgtataccagacatggtgtcccaatttcagttacagggatcgctcaggtcaagattcaagggcagaataaggagatgttagccgccgcatgtcagatgttcttgggcaaaacagaggccgagatcgcccacatcgccctggagactctggaggggcaccagagggctattatggcccacatgactgtagaagaaatttacaaagaccgtcagaaatttagtgaacaggtgttcaaggtggcctcatctgacctcgtcaatatgggaataagcgtggtcagctacactctcaaagacattcatgacgatcaggattaccttcactctctcgggaaagcccggactgcccaggtccaaaaagacgcccgtatcggtgaagctgaagctaaaagatag

SEQ ID NO: 159432 - DNA, 633 bp, Artificial Sequence
  derived and/or modified sequence
atgttttttacctgtggacccaatgaggcaatggtcgtttccggtttttgtagatctccaccagttatggtcgctggtggacgagtattcgtgctgccttgtatccagcagattcagagaatttccctcaacactctgaccctgaacgtaaaatctgaaaaagtttacaccagacacggtgtccccatttccgtcactgggatcgctcaggtgaaaatccagggccagaataaggagatgttagccgccgcctgccagatgtttctgggtaaaactgaagccgagatcgcccatatcgccctggaaacactcgagggccaccaaagagcgatcatggctcatatgacggtcgaagagatttacaaagaccggcaaaaattctccgagcaggtgttcaaagtagcctctagcgatctggtgaacatggggatctccgtggtgtcgtatacgcttaaggacatccacgatgaccaggactatctacacagcctcggtaaggcacgcactgcacaggtacaaaaagacgctagaataggtgaagctgaggccaagagagatgctgggatcagagaggccaaggccaagcaggaaaaagtgtccgcccagtatctgagtgaaattgagatggcctag

SEQ ID NO: 159433 - DNA, 579 bp, Artificial Sequence
  derived and/or modified sequence
atgtttttcacatgcgggcctaacgaagcaatggtagtaagtggtttttgtaggtccccgcctgtgatggtggctggtgggagagtattcgtccttccatgcatccagcagatccaacgaattagcttaaatacactaaccttgaatgtgaagagcgagaaagttaagatccaagggcagaacaaggagatgctagcagccgcatgccagatgttcctgggcaagaccgaggcagaaatagcacacatcgccttggaaaccttagagggccatcagcgggcaatcatggctcatatgaccgtggaagagatctataaggatcgacaaaaattcagcgagcaggtgttcaaggtggctagttctgatttggtgaatatgggaatttcagtggtgtcttatactctcaaagacattcatgatgaccaggattacctgcatagtctgggaaaagcgcgaaccgcacaggttcagaaggacgccagaataggggaagcggaagcaaagcgcgacgcgggcattcgcgaagctaaggcaaaacaggagaaagtgtccgcgcagtacctgtccgagattgaatag

SEQ ID NO: 159434 - DNA, 1284 bp, Artificial Sequence
  derived and/or modified sequence
atgttcttcacctgtggccccaatgaggccatggtggtgtctggcttctgccgcagcccccctgtgatggtggccggcggccgggtgtttgtgctgccctgcatccagcagatccagaggatcagcctgaacaccctgaccctgaatgtgaagtctgagaaggtgtacaccaggcatggagtgcccatctctgtgacaggcatcgcccaggtgaagatccagggccagaacaaggagatgctggccgccgcctgccagatgttcctgggcaagacagaggccgagatcgcccacatcgccctggagaccctggagggccaccagagggccatcatggcccacatgacagtggaggagatctacaaggaccggcagaagttcagcgagcaggtgttcaaggtggccagcagtgacctggtgaacatgggcatctctgtggtgtcctacaccctgaaggacatccatgatgaccaggactacctgcacagcctgggcaaggccaggacagcccaggtgcagaaggatgcccgcatcggggaggccgaggccaagagagatgctggcatccgggaggccaaggccaagcaggagaaggtgtctgcccagtacctgtctgaaattgagatggccaaggcccagagggactatgagctgaagaaggccgcctatgacatcgaggtgaacacccggcgggcccaggccgacctggcctaccagctgcaggtggccaagaccaagcagcagatcgaggagcagagggtgcaggtgcaggtggtggagcgggcccagcaggtggccgtgcaggagcaggagatcgcccggcgggagaaggagctggaggcccgggtgaggaagccagctgaggccgagcgctacaagctggagcggctggccgaggccgagaagagccagctgatcatgcaggccgaggccgaggccgcctctgtgaggatgagaggagaggccgaggcctttgccatcggggcccgggcccgggcagaggccgagcagatggccaagaaggccgaggccttccagctgtaccaggaggccgcccagctggacatgctgctggagaagctgccccaggtggccgaggagatcagcggccccctgaccagcgccaacaagatcaccctggtgagcagcggcagcggcaccatgggcgccgccaaggtgactggagaggtgctggacatcctgacccggctgcctgagagcgtggagcggctgactggagtgtccatcagccaggtgaaccacaagcccctgaggacagcctag

SEQ ID NO: 159435 - DNA, 579 bp, Artificial Sequence
  derived and/or modified sequence
atgttcttcacctgtggccccaatgaggccatggtggtgtctggcttctgccgcagcccccctgtgatggtggccggcggccgggtgtttgtgctgccctgcatccagcagatccagaggatcagcctgaacaccctgaccctgaatgtgaagtctgagaaggtgaagatccagggccagaacaaggagatgctggccgccgcctgccagatgttcctgggcaagacagaggccgagatcgcccacatcgccctggagaccctggagggccaccagagggccatcatggcccacatgacagtggaggagatctacaaggaccggcagaagttcagcgagcaggtgttcaaggtggccagcagtgacctggtgaacatgggcatctctgtggtgtcctacaccctgaaggacatccatgatgaccaggactacctgcacagcctgggcaaggccaggacagcccaggtgcagaaggatgcccgcatcggggaggccgaggccaagagagatgctggcatccgggaggccaaggccaagcaggagaaggtgtctgcccagtacctgtctgaaattgaatag

SEQ ID NO: 159436 - DNA, 708 bp, Artificial Sequence
  derived and/or modified sequence
atgttcttcacctgtggccccaatgaggccatggtggtgtctggcttctgccgcagcccccctgtgatggtggccggcggccgggtgtttgtgctgccctgcatccagcagatccagaggatcagcctgaacaccctgaccctgaatgtgaagtctgagaaggtgtacaccaggcatggagtgcccatctctgtgacaggcatcgcccaggtgaagatccagggccagaacaaggagatgctggccgccgcctgccagatgttcctgggcaagacagaggccgagatcgcccacatcgccctggagaccctggagggccaccagagggccatcatggcccacatgacagtggaggagatctacaaggaccggcagaagttcagcgagcaggtgttcaaggtggccagcagtgacctggtgaacatgggcatctctgtggtgtcctacaccctgaaggacatccatgatgaccaggactacctgcacagcctgggcaaggccaggacagcccaggtgcagaaggatgcccgcatcggggaggccgaggccaagagagatgctggcatccgggaggccaaggccaagcaggagaaggtgtctgcccagtacctgtctgaaattgagatggccaaggcccagagggactatgagctgaagaaggccgcctatgacatcgaggtgaacacccggcgggcccaggccgactag

SEQ ID NO: 159437 - DNA, 558 bp, Artificial Sequence
  derived and/or modified sequence
atgttcttcacctgtggccccaatgaggccatggtggtgtctggcttctgccgcagcccccctgtgatggtggccggcggccgggtgtttgtgctgccctgcatccagcagatccagaggatcagcctgaacaccctgaccctgaatgtgaagtctgagaaggtgtacaccaggcatggagtgcccatctctgtgacaggcatcgcccaggtgaagatccagggccagaacaaggagatgctggccgccgcctgccagatgttcctgggcaagacagaggccgagatcgcccacatcgccctggagaccctggagggccaccagagggccatcatggcccacatgacagtggaggagatctacaaggaccggcagaagttcagcgagcaggtgttcaaggtggccagcagtgacctggtgaacatgggcatctctgtggtgtcctacaccctgaaggacatccatgatgaccaggactacctgcacagcctgggcaaggccaggacagcccaggtgcagaaggatgcccgcatcggggaggccgaggccaagaggtag

SEQ ID NO: 159438 - DNA, 633 bp, Artificial Sequence
  derived and/or modified sequence
atgttcttcacctgtggccccaatgaggccatggtggtgtctggcttctgccgcagcccccctgtgatggtggccggcggccgggtgtttgtgctgccctgcatccagcagatccagaggatcagcctgaacaccctgaccctgaatgtgaagtctgagaaggtgtacaccaggcatggagtgcccatctctgtgacaggcatcgcccaggtgaagatccagggccagaacaaggagatgctggccgccgcctgccagatgttcctgggcaagacagaggccgagatcgcccacatcgccctggagaccctggagggccaccagagggccatcatggcccacatgacagtggaggagatctacaaggaccggcagaagttcagcgagcaggtgttcaaggtggccagcagtgacctggtgaacatgggcatctctgtggtgtcctacaccctgaaggacatccatgatgaccaggactacctgcacagcctgggcaaggccaggacagcccaggtgcagaaggatgcccgcatcggggaggccgaggccaagagagatgctggcatccgggaggccaaggccaagcaggagaaggtgtctgcccagtacctgtctgaaattgagatggcctag

SEQ ID NO: 159439 - DNA, 759 bp, Artificial Sequence
  derived and/or modified sequence
atgttcttcacctgtggccccaatgaggccatggtggtgtctggcttctgccgcagcccccctgtgatggtggccggcggccgggtgtttgtgctgccctgcatccagcagatccagaggatcagcctgaacaccctgaccctgaatgtgaagtctgagaaggtgtacaccaggcatggagtgcccatctctgtgacaggcatcgcccaggtgaagatccagggccagaacaaggagatgctggccgccgcctgccagatgttcctgggcaagacagaggccgagatcgcccacatcgccctggagaccctggagggccaccagagggccatcatggcccacatgacagtggaggagatctacaaggaccggcagaagttcagcgagcaggtgttcaaggtggccagcagtgacctggtgaacatgggcatctctgtggtgtcctacaccctgaaggacatccatgatgaccaggactacctgcacagcctgggcaaggccaggacagcccaggtgcagaaggatgcccgcatcggggaggccgaggccaagagagatgctggcatccgggaggccaaggccaagcaggagaaggtgtctgcccagtacctgtctgaaattgagatggccaaggcccagagggactatgagctgaagaaggccgcctatgacatcgaggtgaacacccggcgggcccaggccgacctggcctaccagctgcaggtggccaagaccaagcagcagatcgaggagcagtag

SEQ ID NO: 159440 - DNA, 1284 bp, Artificial Sequence
  derived and/or modified sequence
atgttcttcacctgcggccccaacgaggccatggtggtgagcggcttctgccggtctccccccgtgatggtggccggtggacgagtgttcgttctgccatgcatccagcagatacaaaggatctccctgaatacactcaccttgaacgtcaagagcgagaaggtgtacacacgccacggcgtcccgataagtgtcacaggcatcgcccaggtgaaaatacagggtcagaacaaggaaatgttagccgctgcatgccagatgttcctcggcaaaaccgaggccgaaatcgctcacatagccctggaaacactcgaaggccatcaaagagccataatggcccacatgacagtggaagaaatatataaggatcgccaaaaattctctgagcaggtcttcaaggttgcatcctcagacctggtgaacatgggcattagcgtcgtgtcctacacccttaaagatatacatgatgaccaggactatctgcactctttagggaaggccagaaccgcgcaggttcaaaaagatgcgaggattggcgaagctgaggccaagcgcgacgctggtataagggaggcaaaggccaaacaggaaaaagtgtctgctcagtacctttctgaaatagagatggctaaggctcaacgcgattacgagctgaaaaaagctgcatatgacatcgaagtgaataccagaagggcacaggctgacctggcctaccagcttcaggtcgcgaagactaagcagcagatcgaagaacagcgggtgcaggtccaagtcgtagaacgagcccaacaggtggcagtgcaggagcaagagattgccagacgtgagaaagaactggaagcccgtgtgcgaaagcccgccgaagcagaaagatataaactggaacgcttagccgaggccgagaaaagccaattaattatgcaggccgaggcagaggccgcctcggttaggatgcgcggggaggccgaggcattcgccatcggtgcacgggctcgggccgaagcggaacagatggcaaagaaggccgaagcattccaattgtatcaagaagccgcgcagctggacatgttgcttgaaaaactgccacaggtggctgaggagatcagcggacccctcacctccgcaaataagattactctggtctcaagtggctctggtaccatgggagcggccaaggtcacaggtgaagtgctcgatatcctaaccagactacctgaaagcgtcgagagactcaccggtgtgtccatcagtcaagtaaatcataagcctctgcggactgcctag

SEQ ID NO: 159441 - DNA, 1284 bp, Artificial Sequence
  derived and/or modified sequence
atgttcttcacctgcggccccaacgaggccatggtggtgagcggcttctgccgcagccccccagtcatggttgctgggggccgggtttttgtgctaccttgcattcagcagattcagaggatttctctgaacaccctgacattgaacgtcaagtcagagaaagtttatacaagacacggggtgccgatttcagtgacgggcattgctcaagttaaaatccaggggcagaacaaagaaatgttggccgcagcctgccagatgtttctgggcaaaaccgaagccgaaatcgcccacatcgcattggagaccctcgagggacaccagcgagccattatggcccacatgaccgtggaagagatttacaaagaccgccagaagttctcagagcaggtgtttaaggtggcctctagcgacctagtcaacatggggatctcagtagtgtcctataccctgaaagatatccacgatgaccaggactacctgcacagcctagggaaggccagaacggctcaggtgcagaaggacgcccgcatcggtgaagcagaggcgaagagggacgctgggatccgagaagctaaggctaaacaggaaaaagtttccgctcagtacctcagtgaaatcgaaatggccaaggctcagagagattatgagctaaagaaggccgcgtacgatattgaggtgaacaccagacgagcgcaggccgatctcgcctatcagcttcaggtagcaaaaaccaagcaacaaattgaagagcaaagagtgcaagtacaggttgtggaacgtgcccagcaggtcgcagtacaggagcaggaaatagccaggcgggaaaaggagctcgaggctagggtacggaagcccgctgaagccgagcgctataagctggaacgcctggccgaagcggagaaatcgcaactaattatgcaggccgaggctgaggcagcctccgtgcgcatgcgcggtgaggctgaggcgtttgctatcggcgcacgcgccagggctgaagcagagcaaatggccaagaaagcggaagccttccagttgtaccaggaggcagctcagctggacatgctgctggaaaaactgcctcaggtggcggaggagatttcagggcccttaacctctgctaataagattacactcgtgagcagtggtagcgggacaatgggcgccgctaaggtcacaggagaagttctagatatactgactcgtttacccgaatctgtcgagagactgacaggtgtatccatcagtcaggtgaaccataaaccactgcgtaccgcctag

SEQ ID NO: 159442 - DNA, 1284 bp, Artificial Sequence
  derived and/or modified sequence
atgttcttcacctgcggccccaacgaggccatggtggtgagcggcttttgcagatcacccccagtgatggtggcgggcggacgcgtgttcgtgctcccctgcattcagcaaatccaacgcatatctttgaatactctgacactaaacgttaagagtgagaaggtctacacgagacacggtgtccctattagcgtcaccggaattgcacaggtcaaaattcaggggcagaataaagagatgctggccgccgcgtgccagatgtttctgggcaaaacagaggctgaaatcgcccacattgctctggagacactggagggccaccagcgcgccattatggctcatatgactgtcgaagagatctataaagaccgacagaagttttccgagcaggtttttaaggttgcctctagcgatctagtcaacatgggaatctcggtggtgtcttatactctgaaagacatacacgatgaccaagattacttacacagtctgggaaaggcccggacagcccaggtgcagaaagacgcacggatcggagaagcggaagctaagcgggatgctggtatacgagaggctaaggctaaacaggagaaagtatcagcgcagtacctgagcgagattgaaatggctaaggcccagcgcgattacgagctgaaaaaagcagcttacgatattgaggtgaatacccggcgcgcacaggcagatctcgcatatcaactgcaggtggcaaaaaccaagcagcaaatcgaggagcagagagtgcaagtgcaagtggtggagcgcgcccagcaggtcgcggtacaggaacaggagattgcccggcgggagaaagagctggaagccagggtgcgtaagcccgccgaggccgaaaggtataaattggagcgcctcgccgaagctgaaaagtcacagctgataatgcaagctgaagcagaggctgcctcagtccgaatgagaggagaagctgaagcatttgcaattggagcaagagcccgagccgaagctgaacagatggccaagaaggcagaggccttccagctgtaccaagaagctgcccagctagacatgctcctggaaaagctgcctcaggtggcagaggagatttcaggtcctctgacatccgcgaacaaaattactctcgtttcttctggttctgggaccatgggggcagcaaaagtcacaggggaagtcctggacattcttactcggctcccggagtcagttgagaggctgactggagtgagcatctcacaggtcaaccacaaaccattaagaaccgcatag

SEQ ID NO: 159443 - DNA, 579 bp, Artificial Sequence
  derived and/or modified sequence
atgttcttcacctgcggccccaacgaggccatggtggtgagcggcttctgccgtagccccccagtgatggtggctggaggccgtgtgtttgtcttaccatgtattcagcaaattcagaggatctcgctcaacaccttgactctgaacgtcaagtcagagaaagtgaagatacagggacagaacaaggaaatgctggctgccgcttgtcaaatgttcctggggaagactgaagctgagatcgcccatattgctctggagactctggagggacatcagagggcaataatggctcatatgacagtggaggagatttacaaggatcgccagaagttctctgagcaggtatttaaggttgcttcaagtgatttagtaaacatggggatttccgtggtaagttacacactcaaggacattcatgatgaccaagactacctgcattccttgggcaaggcaagaacggcgcaggtgcagaaggatgcaaggatcggagaagcggaggccaaacgggatgccgggatccgtgaagctaaagcaaaacaagagaaggtatctgctcagtatctatctgaaatcgaatag

SEQ ID NO: 159444 - DNA, 579 bp, Artificial Sequence
  derived and/or modified sequence
atgttcttcacctgcggccccaacgaggccatggtggtgagcggcttttgccgaagcccacctgtaatggttgcagggggccgggtctttgtcctgccgtgtattcagcagatccagaggatctcgctcaacacattaactctgaacgttaagtcagagaaggtcaaaattcagggacagaataaagagatgcttgctgctgcgtgtcagatgttcttaggaaagactgaggcggagatcgctcatatcgcactggaaactctcgagggacaccaacgcgcaattatggcccatatgaccgtggaggagatttacaaagaccggcagaaattcagtgagcaggtcttcaaggtggcaagcagtgaccttgtcaatatgggcatttccgtcgtgtcctatactttgaaggacatccacgacgaccaggattacctccacagcttgggcaaagcccgaacggcccaggttcagaaagatgctcggataggtgaggcggaggcgaaacgggatgctggaatacgcgaggcaaaagctaagcaggagaaggtgtctgctcaatacttatccgagattgagtag

SEQ ID NO: 159445 - DNA, 579 bp, Artificial Sequence
  derived and/or modified sequence
atgttcttcacctgcggccccaacgaggccatggtggtgagcggcttttgcagatcacctccagtaatggtcgcagggggtcgtgtgtttgtactgccgtgcattcagcagattcaacggatctcccttaatacccttacccttaacgtaaaaagcgaaaaggtaaaaattcaaggacagaataaggagatgttggcagctgcctgccagatgttcctgggaaagacagaggctgagattgcacatatcgcactcgagaccctagaaggacaccagagagccattatggcacacatgacggtggaagaaatatacaaagaccgccagaaattcagcgagcaagtcttcaaagtcgcctcctccgatctcgtgaatatgggaattagcgttgtgagctacactctcaaggatatacatgatgaccaagattaccttcactccctgggtaaagcgcgcacagctcaggtgcaaaaggacgctcgcattggcgaggccgaagcgaaacgcgatgcagggatcagagaagccaaggcaaaacaagagaaagtgtctgcgcaatatttaagcgaaattgagtag

SEQ ID NO: 159446 - DNA, 579 bp, Artificial Sequence
  derived and/or modified sequence
atgttcttcacctgcggccccaacgaggccatggtggtgagcggcttctgtcgatccccacccgtcatggtcgcagggggaagggtcttcgtgttgccatgcatacagcaaatccagaggattagcctaaacacactcactctcaatgtgaagtctgagaaggtgaagatccagggtcagaacaaagaaatgctggccgccgcttgccagatgttcttgggaaagacagaagctgaaattgcccacatcgccctggaaacgctggaggggcaccaaagagcaatcatggcccacatgactgttgaagaaatttataaggacagacagaaattttctgagcaggtattcaaggtggccagttccgatctggtgaatatgggaataagcgtcgtgagttataccttaaaggacattcacgacgatcaagactatctgcactcactcggtaaggcaagaaccgcacaggtccagaaggacgctagaattggggaggccgaagctaaacgagatgcggggataagggaggctaaggccaaacaagaaaaagtctctgcacagtatctcagtgagatcgaatag

SEQ ID NO: 159447 - DNA, 708 bp, Artificial Sequence
  derived and/or modified sequence
atgttcttcacctgcggccccaacgaggccatggtggtgagcggcttctgccggagcccgcccgtaatggtggcaggaggacgtgttttcgttctgccttgcattcagcagatccagcgcattagtctcaatacattgaccctgaacgtgaagtcggaaaaggtgtacacgagacacggagtcccgatcagcgttaccggaatcgcccaagtgaagatccagggccaaaacaaagagatgctggccgccgcgtgtcaaatgtttctgggtaaaaccgaggctgagatagctcacatcgccttagagacactggaaggccaccaaagagcgattatggctcatatgacagtggaggagatctacaaagaccgtcaaaagtttagcgaacaggtgttcaaggtcgcgagctcagacctggttaacatggggatatcagtcgtcagctacaccctgaaggacatccacgacgaccaggattacttacacagcctgggaaaggcaagaaccgcgcaggtacagaaagacgctcgcatcggtgaggctgaagcaaaaagggacgctggcataagggaggcaaaagcaaaacaagaaaaggttagtgctcagtacctatctgaaatcgagatggcaaaggcgcagagggactatgaactgaaaaaggctgcctacgatattgaagtgaacactcgacgtgcccaggctgactag

SEQ ID NO: 159448 - DNA, 558 bp, Artificial Sequence
  derived and/or modified sequence
atgttcttcacctgcggccccaacgaggccatggtggtgagcggcttctgcaggagccctccagtaatggtcgctggcggcagggtgtttgtcttgccttgcattcagcagattcagcggatatctctgaacaccttgaccttaaacgtaaaatctgaaaaggtgtacacccggcacggagtacctatctcagtgactggaatcgcccaagtgaagattcaaggccagaacaaggagatgttggcggccgcctgccaaatgttcctgggaaagaccgaagccgagatagcgcatattgccctcgaaacgttagaaggacatcagcgcgccatcatggcacatatgaccgtggaggaaatttacaaagaccggcagaagttttccgaacaagtgtttaaggtggcctcatccgacctggttaatatggggatttccgtagtctcctataccttgaaggacattcatgacgaccaagactacctgcatagcttgggaaaggcacggacagcccaggtgcagaaggatgcgcgaatcggtgaagccgaggctaaacgctag

SEQ ID NO: 159449 - DNA, 558 bp, Artificial Sequence
  derived and/or modified sequence
atgttcttcacctgcggccccaacgaggccatggtggtgagcggcttttgccggtcacccccagttatggtagcaggaggcagggtgtttgtgctgccgtgcatccagcaaatccagaggattagtttaaataccctgacactgaacgtgaaatcagagaaagtctacacacggcatggtgtgcctatcagtgtgacaggaatcgcccaggtcaaaattcaggggcagaataaggaaatgcttgccgccgcttgtcagatgttcttgggaaaaaccgaggccgaaatcgcccatatcgcccttgagactctagaagggcatcagcgggccattatggctcacatgaccgtagaagagatctacaaggacaggcagaagttttccgaacaggtcttcaaggtcgcttccagcgatctggtgaacatgggaatcagcgtggtaagctatacactcaaagatattcatgatgatcaggattacttacattccttgggaaaggcccggactgctcaggtgcagaaggatgcccgcatcggtgaggccgaagcgaaacgttag

SEQ ID NO: 159450 - DNA, 633 bp, Artificial Sequence
  derived and/or modified sequence
atgttcttcacctgcggccccaacgaggccatggtggtgagcggcttttgtcggtccccaccagtgatggtggcgggaggacgggtctttgttctgccatgcattcagcagatccaaaggatctcccttaacactctgaccctcaacgttaagtcagaaaaagtgtacacacgccatggcgtgccaatttcggtcaccggaatcgctcaagtgaagatacaggggcagaacaaagagatgcttgctgctgcctgccaaatgttcctgggaaagaccgaagccgagatcgctcatattgcactggagaccctagagggacatcagagagccatcatggcacatatgaccgttgaagagatctataaagaccgtcagaaattttcagagcaggtgttcaaggtcgcttcatctgatctagtcaatatggggatcagcgtggtcagctatacactaaaagacattcacgacgatcaggattacctgcattccctggggaaagcacgcaccgctcaggtgcaaaaggacgcccgtataggagaggcagaggccaagcgcgacgcagggattagagaggcaaaagccaagcaggagaaggtgagcgcacaatacctttcagagatcgagatggcatag

SEQ ID NO: 159451 - DNA, 633 bp, Artificial Sequence
  derived and/or modified sequence
atgttcttcacctgcggccccaacgaggccatggtggtgagcggcttttgtagaagcccaccggtcatggtggccgggggtcgtgtctttgtgctcccatgcattcaacagatacagcggataagcttgaacactctcaccttaaacgtgaaaagcgagaaggtatatacacggcatggcgtccctattagcgtgacaggaatcgcgcaagtaaagattcaggggcagaataaagagatgttggctgctgcctgtcagatgtttcttggtaagacagaggcggagatcgctcacatcgccctcgaaaccctggaaggacatcagagagccatcatggcccatatgaccgtggaggaaatctataaggaccgccagaaattctccgaacaggtgtttaaggtcgcgagtagtgatctggtgaacatggggatttcagtggtgagctacacattgaaagacattcacgatgatcaagattacttacacagcctgggcaaggccaggaccgcacaagtgcagaaagacgcccgcatcggggaggccgaggcgaaacgggatgccggcatacgcgaagccaaggccaagcaagagaaggtttccgctcagtatctgagtgaaattgaaatggcgtag

SEQ ID NO: 159452 - DNA, 759 bp, Artificial Sequence
  derived and/or modified sequence
atgttcttcacctgcggccccaacgaggccatggtggtgagcggcttctgtagatcaccccctgtgatggtggccggtgggcgtgttttcgtgctgccctgtatacagcagatccaacggatatcgctgaatacccttacgctgaacgtgaagtcagaaaaagtttatactcgacacggcgtgcctattagtgtcactggcattgcccaggttaaaatccaggggcagaataaggagatgcttgccgccgcctgtcagatgtttctggggaagactgaagccgaaatagctcacatagccttggagaccctggaaggccatcagcgcgctattatggctcacatgacagtggaagaaatctacaaagatagacagaaattctccgagcaagtgtttaaggtcgccagctccgatcttgttaatatgggcatcagcgtggtgagctatacgctgaaagacatccacgatgaccaagattacctccatagtctgggcaaggccaggacagcacaggtgcaaaaggacgcccgaatcggagaagccgaagcgaagcgggatgccggcatacgcgaggccaaggccaaacaggagaaggtttctgcacagtatctgtccgaaatcgagatggctaaggcccagcgcgactacgaactgaaaaaggccgcatacgacattgaagtcaacacacggcgcgcacaagccgatcttgcttatcagctgcaggtggccaagacaaagcaacaaattgaagagcagtag

SEQ ID NO: 159453 - DNA, 708 bp, Artificial Sequence
  derived and/or modified sequence
atgttcttcacctgcggccccaacgaggccatggtggtgagcggcttttgtcgaagccccccagtgatggtggctggtggacgcgtgttcgtccttccttgtatccagcagattcaacggatctcactgaacactctgaccctgaatgtgaaatctgagaaagtgtacacacgtcacggagtaccgattagcgtgacaggtatcgcccaggtgaagatccagggacaaaataaggaaatgctggccgcggcctgtcaaatgtttttaggcaagaccgaagccgagatcgcacatattgctctggagactctggaaggccatcagcgagctatcatggcccatatgaccgtagaggagatttacaaggataggcagaagttctccgagcaggtgtttaaggtagcgagcagcgaccttgttaacatgggtatatcagtggtgtcttacacgcttaaagacatccatgatgaccaagattatctgcactccttggggaaggcacggacagcgcaggtgcagaaagatgccaggattggagaagccgaggcgaaaagagatgcaggtatcagggaggccaaagcaaaacaagaaaaagtgtccgcgcagtatctgagtgagatcgagatggcaaaggcccagagggactacgagctgaagaaggctgcttacgacatcgaggttaacactcgacgggctcaggcggattag

SEQ ID NO: 159454 - DNA, 1284 bp, Artificial Sequence
  derived and/or modified sequence
atgttcttcacctgcggccccaacgaggccatggtggtgagcggcttttgtaggtcaccacctgtgatggtagctggcggacgggtcttcgttctcccgtgcatacagcagattcagagaatctctctgaacaccttaacgttaaacgtcaagagcgaaaaagtatacacccggcatggcgtgcctatatctgtaactgggatcgcgcaagtcaaaatccaggggcagaataaagagatgcttgccgccgcttgccaaatgttcctcgggaaaaccgaagctgaaatcgcccatattgctcttgagacactcgaaggacatcagcgcgccataatggcgcatatgactgtcgaggaaatttacaaggaccggcagaaatttagcgaacaggtgtttaaggtggccagtagtgacctcgtgaacatgggtataagtgtggtgagctatactctcaaagatatccacgatgatcaagactacctccattccctggggaaagcaagaaccgctcaggtgcagaaggacgcacgcattggcgaggctgaggcgaagcgagacgcaggcatcagagaggcaaaggccaagcaggaaaaagtctctgctcagtatctgagcgagatcgagatggccaaagcacaaagggattacgagcttaaaaaagcagcgtatgacatagaagtcaatacccgccgggcccaggcagaccttgcctaccagttacaggtagctaagacaaagcagcaaattgaagaacaaagggtgcaggttcaggtcgtggagcgggctcaacaggttgcggtgcaggaacaggagattgctagaagggaaaaggagctggaagcacgcgtgcggaagccagccgaggctgagagatataagttggagagactggccgaagctgaaaaatctcagcttatcatgcaggctgaagccgaagccgcctcagtccgcatgcgtggggaggctgaggctttcgcgatcggcgcaagggctcgggccgaagccgaacagatggcaaagaaggctgaggccttccaactgtaccaggaggctgcccagctggatatgctgcttgagaagctcccccaggtggcggaggagatctcaggtcctttaacgagcgccaataagatcaccctcgtgagttccggaagcggcacaatgggggcagcaaaagttactggtgaagtgctggacatcctgactcgactgccagagtctgtagagaggttaaccggggtgtcaatttcccaggtgaaccacaagccactgcgaacggcttag

SEQ ID NO: 159455 - DNA, 759 bp, Artificial Sequence
  derived and/or modified sequence
atgttcttcacctgcggccccaacgaggccatggtggtgagcggcttctgcaggagtccaccagtgatggtggccggagggagagtctttgtcttgccgtgcatacagcaaatccagcgcatcagcctcaacactctgaccctgaacgtcaaatcagagaaagtatacacacgccatggggtgcctataagcgtgacaggcattgcccaggtaaaaatccaaggacagaacaaagaaatgctggctgccgcctgtcagatgtttctgggcaaaaccgaagctgaaatcgcgcacatagccctcgagaccctggagggccaccagcgcgccataatggcgcatatgaccgtagaggagatttataaagaccggcagaagttctctgagcaggtgtttaaagtagccagcagcgatctcgttaatatgggcatatccgtggtcagctatacactcaaggacatacatgacgatcaggattatctacactctttgggtaaggccaggacggcgcaggttcaaaaggatgcgagaataggcgaggccgaagctaagagagatgctggcattagggaggccaaggccaaacaagagaaggtgtccgcgcagtatctcagtgagattgaaatggcgaaggctcagcgagattatgagttgaagaaggccgcttatgacatcgaagtcaatacccgacgcgcacaggcggatctggcttaccagttacaggtcgccaagacaaaacagcagattgaagagcagtag

SEQ ID NO: 159456 - DNA, 759 bp, Artificial Sequence
  derived and/or modified sequence
atgttcttcacctgcggccccaacgaggccatggtggtgagcggcttctgtcgaagtcccccagtgatggtcgcggggggccgcgtgttcgtactgccctgcatccagcagattcaaagaatcagcttgaacacactgacactgaatgtaaaaagcgagaaagtatacacccgacatggcgtaccaatcagcgtgaccgggatcgcacaagtgaaaattcagggccagaacaaggaaatgctcgctgccgcttgtcaaatgttcctaggaaagacagaagctgagatagctcacatcgcgctcgaaactctggaggggcaccaaagagctattatggctcacatgacagtggaggagatttataaggaccgacagaagtttagcgagcaggtcttcaaggtggccagtagtgacttggtgaatatgggcatatccgtggtctcatatactctgaaggacattcacgacgaccaagactacctgcacagtctggggaaagccaggaccgcccaggtccagaaagatgctcgaataggcgaggcagaggctaaaagggacgctgggattcgcgaggctaaggctaagcaagaaaaagtctccgcacagtacctgtccgagatcgagatggccaaggcccagagagactatgaacttaagaaggcagcatacgacattgaagtgaacacccgccgggctcaggctgatctggcctatcagctacaggttgcaaagacaaagcaacagatcgaagaacagtag

SEQ ID NO: 159457 - DNA, 558 bp, Artificial Sequence
  derived and/or modified sequence
atgttcttcacctgcggccccaacgaggccatggtggtgagcggcttctgtcggagtcccccagtcatggttgcgggaggccgtgttttcgtgctgccttgtatccagcaaattcagcggattagccttaacacgttgacattgaatgtgaaaagcgagaaagtgtatacacgccacggggtgcccattagcgttactggtatcgcccaggtgaagattcaggggcagaacaaggagatgctggcagccgcctgccagatgtttctagggaaaaccgaagctgagatcgcacacatcgctttagaaacactggaaggccaccagcgggcaataatggcccacatgaccgtcgaggagatctataaggatagacagaagttctctgaacaggtcttcaaagtagcctcctcagacttggtgaacatgggtatttccgtcgtttcatacacccttaaggatattcacgatgaccaggattatcttcactccctcggcaaggctcgaacagctcaggtgcagaaggacgccaggatcggcgaagcagaagccaagaggtag

SEQ ID NO: 159458 - DNA, 759 bp, Artificial Sequence
  derived and/or modified sequence
atgttcttcacctgcggccccaacgaggccatggtggtgagcggcttctgccggagtccacctgtaatggtggccggagggcgcgtgtttgtgctgccttgtattcaacagattcagaggatatcactgaacaccctcactcttaacgtcaaatctgagaaggtgtatactaggcatggcgtgccgatctcagtcactgggatagcccaggtgaaaattcaagggcagaacaaggaaatgctggcggctgcttgtcagatgttcctcggcaagaccgaggccgagatcgcacacattgccctggagacactcgaaggccaccagcgggctattatggcacacatgacggtggaggagatatataaagacaggcaaaaattcagcgagcaggtgttcaaggtggcttccagtgacctggttaacatggggatttcagtagtttcctatacattaaaggacattcatgatgatcaagattatttgcactccctgggcaaagcgagaactgcccaagtacagaaggatgcccggattggtgaagccgaggctaaaagagatgcgggcatcagggaggcaaaagcgaagcaagagaaggtgtcagcccaatatctgtctgagattgagatggccaaggcacaacgggattatgagctcaaaaaagcagcgtacgatattgaggtcaatacaagacgggcccaggccgacctcgcctaccagctgcaggtcgccaaaacaaaacagcaaatcgaagaacagtag

SEQ ID NO: 159459 - DNA, 558 bp, Artificial Sequence
  derived and/or modified sequence
atgttcttcacctgcggccccaacgaggccatggtggtgagcggcttctgccgttctccacctgtgatggtcgcgggagggcgcgtatttgttctgccatgcatccaacagattcaacgcatctcgctcaatactctgactctgaatgtcaagagcgaaaaggtgtacacgagacatggcgtaccaatatctgtcacgggcatcgcccaggtgaagatccagggccagaacaaggagatgttggccgccgcgtgtcaaatgtttctgggcaaaaccgaggccgagatcgctcatatcgccctcgaaaccctcgaaggccaccagagagccatcatggcacacatgactgttgaagaaatttacaaagacagacaaaaattctccgaacaggtattcaaagtggcctcatcggatcttgtgaacatgggaatcagcgtggtctcctatacactgaaagatatccatgacgaccaggactatctgcatagtttgggaaaagctaggacagcacaggttcagaaggatgcaagaataggggaggctgaagccaaaagatag

SEQ ID NO: 159460 - DNA, 1284 bp, Artificial Sequence
  derived and/or modified sequence
atgttcttcacctgcggccccaacgaggccatggtggtgagcggcttttgccggtctcctcccgtgatggtggctggagggcgagtctttgtcttaccttgcatacaacaaatccagaggatctccctgaacacactgacactgaatgtgaaaagtgaaaaagtctatacccggcatggcgtgcccatctccgttacaggtatcgctcaagtaaagatccagggccagaacaaagaaatgttggcagctgcctgtcagatgtttctgggcaagaccgaagctgagattgcccatatcgctctagagaccttagaaggtcatcaacgcgccattatggctcatatgacggtggaggagatttataaggaccggcagaagtttagcgagcaggtcttcaaggtcgcatcttccgatctagtaaacatggggatatctgtcgtctcgtacaccctgaaggatattcacgatgaccaagattacctgcatagcttgggcaaagctcgcactgcgcaagttcaaaaagatgcaagaataggcgaggctgaagccaagcgggacgccggcataagggaagctaaagccaaacaggaaaaagtatctgcccagtatttatccgagattgagatggccaaggcccagcgcgactacgaattgaaaaaggccgcatacgacatcgaagtgaatacccgtagggcgcaggctgacctggcgtaccagctgcaggtggccaagactaaacaacagattgaagagcaacgggtccaagttcaggtcgttgagagagcccagcaagtggccgtacaggagcaggagatagccaggcgagaaaaggaactggaagcaagggttcggaagcccgctgaagccgagcgatacaaactagagaggttggctgaagcagaaaagagtcagttaatcatgcaggccgaagccgaagcagcatcagtgcgtatgagaggcgaagctgaggcttttgccataggggctagggctcgggctgaagccgaacagatggcaaagaaggccgaggcgtttcagctgtaccaggaggccgcacagctggatatgctgctggaaaaactcccccaggtggcggaggagatttccggtccacttacctccgctaataaaatcactttggtatccagcggcagcggaacaatgggcgccgccaaggtgacaggggaagtactggacattctgaccaggctaccagagtctgttgaacgcctgactggggttagcatctcacaggtaaatcacaagccacttaggacggcctag

SEQ ID NO: 159461 - DNA, 579 bp, Artificial Sequence
  derived and/or modified sequence
atgttcttcacctgcggccccaacgaggccatggtggtgagcggcttctgtaggtcccccccagtcatggtagccgggggtcgggttttcgtgctgccgtgtatccagcagattcaaaggatttctctgaatacccttaccctcaatgtaaaatctgagaaggtcaagatccagggccagaataaagagatgctagctgcagcctgccaaatgtttttgggcaagactgaagctgagattgctcatatcgcattggaaaccctcgagggccatcagcgggccattatggcacacatgaccgtggaagagatctacaaggatcgtcagaaattttctgaacaggtgttcaaggtggcatctagtgacctggtgaatatgggtatctccgttgttagctataccctcaaggatatacatgatgatcaggattatttgcactccttggggaaggccaggactgctcaggtccagaaagacgcccgcataggagaggccgaggctaaaagggatgccggcattagggaggccaaggctaaacaggagaaagtaagtgcccagtacctgtccgagatcgagtag

SEQ ID NO: 159462 - DNA, 708 bp, Artificial Sequence
  derived and/or modified sequence
atgttcttcacctgcggccccaacgaggccatggtggtgagcggcttctgccgcagcccccccgtcatggtggctggcgggagagtcttcgtactgccttgcatccaacagatccagcgcatcagcttgaataccttaaccctaaatgttaaaagcgaaaaagtgtacaccagacacggcgtgccaattagcgtgactggtatcgctcaagtcaaaatccagggtcagaacaaggaaatgttagcggcggcatgtcagatgtttctcgggaagaccgaggctgagatagcccacatagcccttgagaccttggaggggcaccaaagagcaatcatggctcacatgacagtggaggagatctataaagatcgtcagaagttttccgagcaagtgtttaaggtggcgtcctcggatctggtgaatatgggaatatcagttgtgagttacaccttgaaggacatccatgacgaccaagactatttacactccctcggaaaagctcgcaccgctcaggtgcagaaggatgcgcggattggagaggccgaagcgaagagggatgccggcattagagaggctaaggccaaacaagagaaggtgtctgcccagtatctctccgagatcgagatggcaaaagctcaacgggactacgaattgaaaaaagccgcttacgacatcgaggtgaatacaaggcgggctcaggccgattag

SEQ ID NO: 159463 - DNA, 708 bp, Artificial Sequence
  derived and/or modified sequence
atgttcttcacctgcggccccaacgaggccatggtggtgagcggcttttgccgtagccctcccgtcatggtggcgggcgggagagtgttcgttcttccttgcatccagcaaatacagcgcatctcccttaacacactgaccctgaacgtgaagtccgaaaaggtgtacacacggcatggtgtgcccatctccgtgactggaatcgcccaggtcaaaatccaaggccagaataaagagatgttggcggccgcctgtcaaatgttcttagggaagactgaggcagagattgctcatatcgccttagagacattagaggggcaccagagagcgattatggcccacatgaccgtcgaggaaatctataaggacaggcagaaattctcagagcaggtgttcaaggtggccagctctgacttggtcaatatggggattagtgtcgtgtcttacactctcaaagatatccacgatgaccaggactatctgcatagcttggggaaagccagaaccgcccaggtgcagaaagacgccagaataggagaggccgaagccaagcgcgacgcgggcataagggaggccaaggccaagcaggaaaaagtgtctgctcaatacctgtctgagatagaaatggctaaggcacaaagagattacgagctgaagaaggccgcctacgatatagaagtgaacacgcgtcgggcgcaggcagattag

SEQ ID NO: 159464 - DNA, 759 bp, Artificial Sequence
  derived and/or modified sequence
atgttcttcacctgcggccccaacgaggccatggtggtgagcggcttctgccggagtccacctgtgatggtggccggagggcgggtgtttgtgctgccgtgcattcagcagatacagaggatatccctgaacactctgactctgaatgtgaagtctgagaaggtttacaccagacacggagtccccatctccgtcactggcatagcccaggtaaagatacagggccaaaataaggagatgctggccgctgcatgccagatgttcctgggaaagactgaggccgaaatcgcccacattgccctcgagacactggagggacatcagagggctatcatggcccatatgaccgtggaggaaatctacaaggaccgccaaaaattttcggagcaggtcttcaaagtcgcttccagcgacctagtgaacatggggatctccgtggtttcttacactttaaaggatattcacgacgaccaagattaccttcactccctcgggaaggctcgcacggcccaggtgcagaaggacgctcggatcggcgaggcggaggccaagagagatgccggtattcgagaagcaaaggcgaaacaagagaaggtgtccgcgcagtacttgtccgaaatagagatggccaaggcacagagagactacgagttgaaaaaagctgcttacgatatagaagtaaacactcggcgggcacaagccgacttggcataccagctgcaagtcgcaaagactaagcagcagatagaagaacaatag

SEQ ID NO: 159465 - DNA, 708 bp, Artificial Sequence
  derived and/or modified sequence
atgttcttcacctgcggccccaacgaggccatggtggtgagcggcttctgccgcagcccaccagtaatggtcgctggcggcagagtttttgtgctgccttgcattcagcagatacaaagaattagtttgaacacactgacgctgaatgttaagtctgagaaggtgtatacacgccacggcgtgccaatcagcgtcactggaattgcccaggtgaagatccagggccaaaacaaggagatgctggctgcggcctgccagatgtttctcggtaaaacagaagccgagatagctcatattgccctcgaaacgctcgagggccaccaaagggccatcatggcacacatgaccgtggaggagatctacaaagaccgccagaagttttcagagcaggtgtttaaggtggcctctagtgacctggtgaatatgggcatttccgtggtatcgtatacgcttaaggacatccatgacgatcaagactacctccacagtctaggcaaggctcgaactgcccaggtacagaaggacgcacgcatcggtgaggcagaggccaagcgcgacgccggaatccgagaagcaaaagccaagcaggaaaaagtctccgcccaatacctgtccgagatagaaatggccaaagcccagcgcgattacgaactgaaaaaagccgcctacgatattgaagtcaatacccgccgcgcccaagccgattag

SEQ ID NO: 159466 - DNA, 558 bp, Artificial Sequence
  derived and/or modified sequence
atgttcttcacctgcggccccaacgaggccatggtggtgagcggcttctgtcgctcgccccccgtgatggtcgccggaggacgagttttcgtgcttccttgtattcaacaaatccaacgtattagcttaaacacgctcactctgaatgtcaagtctgaaaaggtgtacacaagacatggcgttcccatatccgtgaccgggattgcccaagtcaaaattcagggacagaataaggaaatgttagccgccgcctgccagatgttccttggaaagacggaagctgagatcgctcacatcgctcttgaaaccctggaggggcaccagagagctatcatggctcacatgacagtcgaggaaatctataaggaccgacagaagttctctgaacaagtatttaaggttgcatctagcgatctggttaacatgggtatatccgtggtgagttacaccctcaaggatatacacgacgaccaggattatctgcactcacttgggaaagcaaggacagcccaggtccagaaggatgcccgaatcggtgaagccgaagccaagagatag

SEQ ID NO: 159467 - DNA, 558 bp, Artificial Sequence
  derived and/or modified sequence
atgttcttcacctgcggccccaacgaggccatggtggtgagcggcttttgcaggagccctcctgtcatggtcgccggggggcgagtcttcgtcctgccctgcatccagcagatccagagaatctctctcaacaccttgaccttgaacgtgaagagcgagaaggtctatacacgccacggggtgccaatttctgtcacgggtattgcacaggtcaagattcaggggcagaataaagagatgttagctgcagcctgtcagatgtttctcggcaagaccgaagcagaaattgcccacatcgccttggagaccctggagggtcaccaaagagcgatcatggcccacatgaccgtcgaagaaatctacaaggatagacagaagttttcagagcaggtgttcaaagtagcatcctctgacctcgtaaatatgggcatttccgtcgtctcttacaccttgaaggacatccatgacgatcaggactaccttcacagcttagggaaggccagaacagctcaagtgcagaaagacgcacgcatcggtgaggcagaggcaaaacggtag

SEQ ID NO: 159468 - DNA, 633 bp, Artificial Sequence
  derived and/or modified sequence
atgttcttcacctgcggccccaacgaggccatggtggtgagcggcttctgcagatctccgccagttatggtggcagggggacgggtcttcgttctgccttgcatccagcaaatacagcggatttccctcaataccctgacactgaacgtcaaaagtgagaaggtctataccagacacggcgtgcccatctcggttactggaatcgcccaggtgaagatccagggccaaaacaaagaaatgttagcggctgcatgtcagatgttcctgggaaagaccgaggcggagattgcccacatcgccctggaaacgcttgaaggccaccaacgtgcaatcatggcacacatgacagtggaggaaatttataaggacaggcagaagttctccgaacaggtttttaaggtagcttccagcgaccttgtgaatatgggcatttcggtagtctcctatacactgaaggacattcacgacgatcaggattacctgcattctctgggaaaggcaaggaccgcccaggtgcagaaagacgctcggatcggcgaagccgaggccaagagggatgcgggcattcgggaggcaaaagccaaacaggagaaagtgagcgctcagtacctctccgagattgagatggcttag

SEQ ID NO: 159469 - DNA, 579 bp, Artificial Sequence
  derived and/or modified sequence
atgttcttcacctgcggccccaacgaggccatggtggtgagcggcttctgtcgcagtccacctgtgatggtggccggcggaagggtattcgttcttccttgcattcagcagattcaacgaattagcctcaatacgctcaccctcaacgtcaaaagcgaaaaggtgaaaatccaggggcaaaacaaagaaatgctcgctgccgcatgtcaaatgtttctcggcaaaacagaagccgagattgctcatatcgcgctcgaaaccttggaggggcaccaacgtgcaattatggcccatatgacagtggaggaaatttacaaggacagacagaagttctcagagcaggtcttcaaagtagcttcctctgatctcgttaatatgggtatttctgtggtatcttatacgcttaaggatatccacgatgatcaagattacctgcatagtctgggcaaagccaggaccgcccaggtacagaaagatgccaggatcggcgaggccgaggccaagcgggacgccggtatccgcgaagccaaagccaaacaggaaaaggtcagtgctcaatacctgtctgagatagaatag

SEQ ID NO: 159470 - DNA, 1284 bp, Artificial Sequence
  derived and/or modified sequence
atgttctttacctgtggacctaatgaagctatggtggtaagcggcttttgccggtcaccacccgtcatggtggcgggtggccgagtgtttgtgctgccctgcattcagcagattcagcgtatcagcctgaacaccctcactctgaacgttaaaagcgagaaagtgtatacccgccacggcgtcccgatctccgtcacaggcattgcacaggtgaaaatccaagggcaaaataaggagatgttagccgctgcctgtcaaatgtttttaggtaagactgaggcagaaatcgcccacatcgcccttgagacactggaaggacaccaaagagccataatggctcatatgacagtcgaagagatctacaaggatcggcagaaattcagcgaacaggttttcaaggtagccagcagcgatctggtgaatatgggcatcagcgtggtcagctatacacttaaagatatccacgatgaccaggactacctacactccctgggtaaggcacggacagctcaggtgcaaaaggatgcccgaattggcgaagctgaggcaaaaagggatgccggaatccgcgaggccaaggctaaacaggaaaaggtgtcagctcagtacctgtccgagatcgaaatggccaaggcacagagggattatgagctgaaaaaagccgcatatgatatcgaggtgaacacacggagagcgcaggccgatctcgcttatcagctgcaagtcgccaagaccaagcagcagattgaagagcagcgggtgcaggtacaggtggtagagagggcccagcaagtcgcagtgcaggagcaggaaatagctcgccgagagaaggaactggaggcccgagttcgcaaacccgctgaggccgaacggtacaagcttgaaagactcgctgaagccgagaagtcccaacttattatgcaggccgaggccgaagcggcttctgtacgcatgaggggcgaagccgaagcattcgccataggagccagagccagagccgaggccgagcaaatggccaagaaggcggaagcgttccagctgtaccaggaggccgcacaattagacatgctgcttgagaagttgccccaggtggctgaagaaatctcaggacccctgaccagtgctaacaaaatcactctcgtgtcctcaggatcaggtacgatgggggctgccaaggtgactggcgaggtgctcgacatcctaacgaggctgcctgagtccgtcgagagactgactggagtctctatttctcaggtgaaccataagccattgagaactgcctag

SEQ ID NO: 159471 - DNA, 1284 bp, Artificial Sequence
  derived and/or modified sequence
atgttctttacatgtggtcctaatgaggccatggtggtgtctggtttttgtaggtcacccccagtcatggtggcagggggaagagtctttgttttaccttgtatccagcagatccaaagaatcagtctcaacactctcaccctcaacgtgaaatccgagaaagtctacaccaggcatggggttcctatttctgtgacaggtatcgcacaggtgaagatccaaggacaaaacaaggagatgcttgcggcagcctgtcagatgttcctggggaaaactgaagccgaaatagcgcatattgcccttgaaacccttgaggggcaccagcgggcaatcatggcacatatgacagtggaggagatttacaaagaccgccagaaattttcagaacaggtttttaaagtagcaagcagtgacctggtgaacatgggaatttcagtggtttcatacactctgaaggacatccatgatgaccaggactacttgcatagcctaggcaaggctcggactgcgcaggtgcaaaaagatgcccgaatcggagaggccgaggccaagagagatgcaggcatacgcgaagctaaggccaaacaggagaaggtctccgctcaatatttgtccgaaatagagatggccaaagcccagagagattacgaactgaagaaagctgcgtatgacattgaagtcaacacccggcgagctcaggcggatcttgcctatcagctgcaggtagctaagacaaaacagcaaattgaagaacagagagtacaggtccaggtcgtggaacgggctcagcaggtggctgtgcaggagcaggaaatcgcccgaagagagaaagaactcgaagcgagggtcagaaagcctgcagaagccgaacgctacaagctggaaaggctggccgaagcagagaagtcccagctgataatgcaggctgaagcggaggcagctagcgtgcgcatgagaggagaggccgaggcatttgctataggtgctagagcccgagctgaggccgagcaaatggctaagaaggccgaggcatttcagttatatcaggaggccgctcagcttgacatgctgctggaaaagctgccccaggtggccgaggaaatctcaggcccattgaccagcgccaataaaatcacactggtttcgtcggggagcgggacaatgggggcagccaaggtaaccggagaagtgctggacatcctaaccagactgcccgagagtgtcgagcgcctcaccggtgtgagtatttctcaagtcaaccacaagccactgcggacagcttag

SEQ ID NO: 159472 - DNA, 1284 bp, Artificial Sequence
  derived and/or modified sequence
atgttctttacttgtggaccaaacgaggccatggtcgtttccggcttctgccggtcaccacctgtaatggtggcagggggtcgagtcttcgtactgccctgtattcagcaaatccagagaatctcactgaacactctcactctcaatgttaaatcggaaaaagtgtacacccgtcacggagtacctatttctgtaaccggaatcgctcaggtcaagattcagggacagaataaagagatgttagctgcggcatgccagatgtttctgggtaagaccgaggccgaaattgcccatatcgcgctggagaccttggagggtcatcagagagctattatggcccacatgacagtggaagagatctacaaggacaggcagaagttctctgaacaggtatttaaagtggcctcttctgacttagtgaatatggggatctcagtggtttcgtacaccttgaaagacattcacgatgaccaggactacctgcactcactgggcaaagctcgaactgcacaagttcagaaagatgctaggatcggagaggcagaagccaaaagggacgctggtatccgcgaggccaaggccaaacaagagaaggtaagcgcccagtacctgtcagaaattgagatggctaaagctcagcgcgactatgaactcaagaaggccgcttatgatattgaggtgaacactcgcagggcccaggccgatctggcataccagcttcaagtcgcgaagacaaagcagcagattgaggagcaaagagtgcaggttcaggtcgtggagagagctcaacaagtcgctgtgcaagaacaggaaatcgccaggcgggagaaggagctggaagctcgcgtgcggaagccggcagaggccgagagatataagctcgagcggctggccgaagctgaaaaatcccagctgatcatgcaggccgaggccgaggcggcttccgttcggatgaggggcgaagctgaagcttttgctattggggcacgcgctcgagcggaggcagagcagatggccaaaaaggcagaagcttttcagctctaccaggaagccgcacagctggacatgctcctggaaaaattgccacaagtggcggaagaaattagcggccctcttacaagcgctaataaaattactctggtgtcctccggtagtggcaccatgggggcagctaaggtgacgggggaagttttggacatactgacgcggctccccgagagcgttgaacgactgacaggcgtgtcaatcagtcaggtaaaccacaagcccctaaggacggcatag

SEQ ID NO: 159473 - DNA, 579 bp, Artificial Sequence
  derived and/or modified sequence
atgttttttacctgtggtccaaatgaagccatggtggtgagtggattctgcaggtccccccctgtgatggttgcaggcggacgggtcttcgtactgccttgtatccaacagatccagagaatctcactgaataccctgactctcaacgttaaatccgaaaaggtgaaaatacaggggcaaaataaggaaatgctggcagcagcgtgtcaaatgttcttaggaaagaccgaggccgagatcgcccatattgcgctcgaaactctggaagggcaccagcgcgcaattatggcccacatgacagtcgaagagatctataaggatcgtcagaaattttctgagcaggtgttcaaggtcgctagttcagatctggtgaatatgggtattagcgttgtcagctataccctgaaagacatccatgacgaccaggactatctgcacagcttgggcaaggccagaaccgcccaggttcaaaaggacgccaggatcggggaggctgaggccaagcgcgatgcaggcatacgagaggctaaggctaagcaagagaaggtgtctgctcaataccttagcgaaattgaatag

SEQ ID NO: 159474 - DNA, 579 bp, Artificial Sequence
  derived and/or modified sequence
atgtttttcacgtgtggccctaatgaagctatggtagttagcgggttttgccggtctccccctgttatggtagccggtggacgcgtgttcgtgttaccctgcatccaacagatccagcgcatcagcctgaacactcttacactcaacgtcaaaagcgagaaggtgaagattcaaggccaaaacaaagagatgctggcagccgcttgtcaaatgttcctcggcaagaccgaggctgagattgcgcatatcgcccttgaaacgttggagggacaccagcgggctataatggctcacatgactgtcgaagaaatctacaaggaccgacagaagttcagcgaacaagtgttcaaggtggcttccagtgatctcgttaacatggggataagcgtagtctcttacacactcaaagacattcatgatgaccaggactacttacactctctcggtaaggcccgaaccgctcaggtgcagaaggatgctcggattggcgaggccgaggccaaaagggatgctgggattcgggaggctaaggctaagcaggagaaggttagtgcccagtacctgagcgagattgagtag

SEQ ID NO: 159475 - DNA, 579 bp, Artificial Sequence
  derived and/or modified sequence
atgttttttacctgcggccctaacgaggctatggtcgtgtcgggtttctgtcggtccccgcctgtgatggtagccggaggaagggtcttcgtgctcccctgcatacaacagattcagcgcatcagcttgaacaccctgactttgaatgtgaaaagcgaaaaagtgaagattcaaggacagaacaaagagatgcttgctgctgcttgtcagatgtttttggggaagacggaggctgagatcgcccatatcgctctggaaactttggagggacatcagcgcgcaatcatggcccacatgacagtggaggaaatttacaaagacaggcaaaaattttcagagcaggtcttcaaggtcgccagcagcgacctggtgaatatggggatttccgttgtctcttataccctgaaggacatccacgacgaccaggattatttacactcactgggaaaggcacgcacagctcaggtacagaaagatgccagaatcggggaggccgaggccaaacgcgacgctggaatcagagaggccaaagcgaagcaggagaaggtgagcgctcaatatctgtcggagatcgagtag

SEQ ID NO: 159476 - DNA, 579 bp, Artificial Sequence
  derived and/or modified sequence
atgttctttacatgtggacctaacgaggccatggtcgtcagtggtttttgcaggtcacctcctgtgatggtagctggtggcagagtcttcgtcctgccatgtattcagcagattcaacgaatctcactgaacacacttaccctaaacgtaaagtctgaaaaggtgaagattcaagggcagaacaaagagatgttagccgctgcatgtcagatgttccttgggaagactgaggctgagatcgcgcatattgccctggaaacgctcgaaggacaccaacgagctataatggcacatatgacagtggaggagatttataaggaccgccaaaaattctctgaacaggtctttaaagttgccagttccgacctagtgaacatgggcattagcgtggtcagttataccttgaaggacatccatgacgaccaggattatctccacagcttgggcaaggcacgcacggcccaggtccagaaggatgcgagaatcggcgaagctgaggccaaaagggacgcaggcataagggaagcaaaggccaaacaagagaaagtgtcggctcaatacctgtcagagattgaatag

SEQ ID NO: 159477 - DNA, 708 bp, Artificial Sequence
  derived and/or modified sequence
atgttttttacctgcggaccaaatgaagctatggtggtctccggtttctgccggtccccaccagtcatggtcgcagggggaagagtgtttgtgctaccgtgcatccaacagatacagcgcatctctctgaacactctaacgctcaacgtcaaatcagagaaggtgtacacccgtcatggcgtccctatcagcgtgaccgggatcgctcaggtgaagatccaagggcagaacaaagaaatgctggccgcagcctgtcagatgtttctgggaaagacggaggcagagattgcacacatcgctctggagacgctggagggtcatcagcgcgctattatggctcacatgacagttgaagagatttataaagaccgccagaagttctctgagcaggtgtttaaggttgcttctagtgacctggtaaacatgggcatcagcgtcgtgagctacaccttgaaggatatacacgacgaccaagattatttacactctttggggaaggctcggacggcacaggtccagaaggacgcccgtattggagaagcagaggcaaaacgtgatgccggaattagagaagcaaaggccaagcaggagaaagtgtcggcacagtacctgtccgagatcgagatggccaaggcccagagagattacgagttgaaaaaggctgcctatgacatcgaggtgaacacgagaagagctcaggcggactag

SEQ ID NO: 159478 - DNA, 558 bp, Artificial Sequence
  derived and/or modified sequence
atgttctttacttgtggacccaacgaggccatggtagtctccggcttctgtcgatcaccaccggtgatggttgctggcggacgggtctttgtcctaccatgcattcagcagatacaacgtataagcctgaatacattgacactgaatgtgaagtctgagaaggtgtataccagacatggagtccccataagcgtcacaggcattgcgcaagtgaaaattcaggggcaaaacaaagagatgctggctgctgcatgccagatgttcctaggcaaaaccgaggccgagatcgcccatattgcactggaaaccctcgaaggacatcagagggccatcatggcccatatgaccgtggaagagatctataaggatcgacagaagttttcggaacaggtcttcaaggttgcaagctcagacttagtgaacatgggtatctcagtcgtgtcatatacgctgaaggatatccacgatgatcaggattacctccactcgctgggtaaggccagaacggcccaggtccagaaggatgcaagaatcggcgaggcggaggccaaacgctag

SEQ ID NO: 159479 - DNA, 558 bp, Artificial Sequence
  derived and/or modified sequence
atgttctttacgtgcgggccaaatgaagctatggttgtatctgggttttgtagatcccccccagtgatggtcgctggtgggcgagttttcgtcctgccttgcattcagcagattcagagaatttccctcaatacattgacactcaacgtcaagtccgagaaggtgtatacaaggcacggtgtgccaatctcagttacaggcatcgcccaagtcaagattcagggccaaaataaggaaatgttagccgctgcctgtcagatgtttttgggcaaaaccgaagccgagattgcccacattgccttggagaccctcgaggggcaccagcgcgcaattatggcccacatgaccgtcgaagagatatacaaggatcggcagaagtttagcgagcaagtgttcaaggtcgcgagctcagatctggtgaacatggggatcagcgttgtttcatacacgctcaaggacattcatgacgaccaggattacttacactctctgggtaaggctcggaccgcccaagtacaaaaggacgcaagaatcggagaggctgaagccaagcgatag

SEQ ID NO: 159480 - DNA, 633 bp, Artificial Sequence
  derived and/or modified sequence
atgttctttacttgcggccctaatgaggccatggtcgtgagcggattctgccgctcacctccagttatggtcgcaggtggacgcgtgttcgtcctcccgtgcatccagcagatacagcgtattagcctgaatactctgactctaaatgtgaaatcggagaaggtgtacacgcgacatggagtaccaatttccgtgaccgggattgctcaggttaaaattcaaggacaaaataaggaaatgcttgctgccgcttgccagatgttcttgggtaaaaccgaagcagagatagctcacatagccctggaaacccttgagggccaccagcgggctatcatggcgcatatgacagtcgaggagatttataaagatagacagaaattttctgagcaggtgtttaaggtggcctccagtgaccttgttaacatgggcatcagcgttgtgtcatatacattgaaggacatccacgacgaccaagactacttgcacagtttggggaaggcacgcacagcccaagtccagaaagacgcgagaatcggggaggccgaagctaagcgggatgctggcatccgtgaggccaaagccaaacaagaaaaagtgagtgctcagtacctcagtgaaatcgagatggcttag

SEQ ID NO: 159481 - DNA, 633 bp, Artificial Sequence
  derived and/or modified sequence
atgttttttacctgtggccctaatgaagcaatggtggtgagcggtttttgtagaagccctccagtcatggtggctggcggaagagtgtttgtgctgccgtgcatacagcaaattcagaggatcagtctgaacacattaacactgaacgtaaagagtgagaaggtgtacaccaggcacggcgtgcccatcagcgtgaccggaatcgcccaggtcaagattcagggacagaacaaagaaatgctcgctgccgcttgtcagatgttcttgggtaaaaccgaggccgagatcgctcatattgcgttggaaactttagaggggcaccaacgtgccataatggcccacatgacagtggaagagatttacaaggacaggcagaagtttagcgaacaggtgtttaaagtcgcttccagtgacctggtcaatatggggatttccgtggtaagctatactctcaaggatatccacgacgatcaagattacttacacagcctgggtaaagcccgaaccgcacaggtccagaaagacgcccgtatcggagaagctgaagccaagagagacgcaggcatacgggaggccaaagccaagcaggaaaaggtgagcgcccagtacctgtccgaaatcgagatggcgtag

SEQ ID NO: 159482 - DNA, 759 bp, Artificial Sequence
  derived and/or modified sequence
atgttctttacatgtggccctaacgaggccatggtggtatctggattctgtcggtcccctccggttatggtcgcaggcggaagggtctttgtgctcccgtgtatccagcaaattcagcgcatctcactgaacacacttactcttaatgtgaagtctgagaaggtttacacccgacatggagtgcctatctcggttactggcattgcccaagttaagatccaaggccagaacaaggagatgctcgctgccgcttgtcaaatgttcttgggtaaaactgaggccgagatagctcacatcgccctggaaactctggaggggcatcagagagccataatggcccacatgacagtcgaggaaatctacaaggacaggcagaaatttagcgagcaggtgttcaaggtggctagctccgatctggtgaatatggggatttctgtcgtatcttatactctcaaagacatccacgacgaccaggattatttgcatagcctgggcaaagcacggacggcacaggtgcagaaagatgctagaataggtgaagccgaggctaaacgcgacgcaggtattcgtgaggcaaaagccaaacaagagaaggtgtccgcacagtatctctccgagattgaaatggcgaaagcgcagcgagattatgaactgaagaaagccgcatatgatatcgaagtgaacaccaggagagctcaggccgacctcgcctaccagttgcaggtggccaaaacaaagcagcagatcgaggaacagtag

SEQ ID NO: 159483 - DNA, 708 bp, Artificial Sequence
  derived and/or modified sequence
atgttctttacctgcggaccaaacgaggcaatggtagtgtctggcttttgtcgctccccgcctgtgatggtggcaggcggacgcgtttttgttttaccatgcatccagcagattcagcgcatcagcttaaatactcttaccctgaatgtcaagagcgagaaggtgtatacgcgccatggagtgcctatctcagttaccggcatcgctcaagtgaagatacaggggcagaacaaggagatgctggccgcagcctgccagatgttcctgggtaaaaccgaggccgagatcgcccacatcgccctcgaaacgctcgaaggccatcagcgcgctataatggcccacatgaccgttgaagaaatctataaagacaggcagaaattcagcgaacaggtgttcaaggtcgcctctagtgatcttgtcaacatgggtatttcagtcgtttcatataccctgaaggacatacatgatgatcaggattatcttcacagtctggggaaagcaaggaccgcacaagtccagaaggatgccaggataggtgaagccgaagccaagagagatgcaggcattagggaagcgaaggctaaacaggagaaagtgagtgctcaatacctgtcagagattgaaatggccaaggctcagcgggactatgagctgaaaaaggctgcctatgatatcgaggtcaacacaaggcgtgcgcaagctgattag

SEQ ID NO: 159484 - DNA, 1284 bp, Artificial Sequence
  derived and/or modified sequence
atgtttttcacctgtggccctaacgaggcaatggtggtgagcggtttttgcagaagccctccagtcatggttgctgggggtagagtttttgtgctaccttgtatccagcagattcagcggatttctctgaacaccctcacactgaatgtgaaatctgagaaagtatacaccaggcatggagtacccatctccgtgacaggcatcgcccaggtaaagatacaaggacagaacaaggagatgctcgccgcagcctgccaaatgttcctaggcaagaccgaggcagagatagcacacatagcactcgagactctggagggccaccagcgcgcaatcatggcccacatgaccgtcgaagagatctacaaagacaggcagaagttctcagaacaagtttttaaagtagcgtcaagcgacttagttaacatgggcatcagcgtagtgtcttataccctgaaggacatccatgacgaccaagactatctgcattctctgggaaaggcccgaaccgcgcaggtgcaaaaggacgcacggattggggaggccgaagcaaaacgtgacgcgggaatccgcgaagcaaaggccaagcaggaaaaagttagtgctcagtatctgtccgaaatcgaaatggccaaggcgcagcgagactacgagttaaaaaaagctgcgtatgatattgaagtgaatacccgtagggctcaggctgatctagcatatcagctgcaggtggctaaaacaaagcagcagatcgaggagcagagagtgcaggtacaggtcgtggagagggcacagcaggtggccgtgcaggaacaggagatcgcgagacgggaaaaagagttggaagccagagttcggaagccagcagaagccgagcgatacaaacttgaacgtcttgcggaggctgaaaagtcccagctgatcatgcaggccgaagctgaggctgcaagtgtgcgaatgaggggcgaggcggaagcttttgctatcggcgctagggccagagcggaagcagaacaaatggcaaagaaagccgaggccttccagctgtatcaggaggccgcacagctggacatgttgctcgagaagctaccacaagtcgccgaagagatttctggaccactgacatcagctaataagatcaccctagtcagtagcgggtccggcacgatgggcgctgccaaagtcaccggcgaggtcctggacattctcacaaggttacccgagagcgtagagaggctgactggagtcagtatttcacaggtgaatcacaagccactgagaacagcgtag

SEQ ID NO: 159485 - DNA, 759 bp, Artificial Sequence
  derived and/or modified sequence
atgttctttacttgtgggcctaatgaagccatggtggtgagcgggttttgcaggtcacctccagtcatggtcgctggcggacgagtgtttgtccttccgtgcatccaacagattcagcggatatctctgaatactctcactctgaacgtgaagtccgagaaggtctatacccgacatggagtgccaatctcggtgactgggatagcacaggtaaagatacagggccaaaacaaggaaatgctagcggcagcatgtcaaatgtttttaggcaaaaccgaagccgaaattgctcatatcgccctggaaaccctcgaagggcatcagcgggcaattatggcccatatgaccgtggaagagatttacaaggatcggcagaagttttcagaacaagtgttcaaagtggcatcctctgacctggtgaatatgggaatttctgttgtcagttacaccctgaaggacatccatgatgatcaagattacctgcatagcctcggtaaagcaagaacagcacaagttcaaaaggacgccaggatcggtgaagcagaggccaaacgggacgccggaattagagaagccaaggcaaaacaggaaaaggttagcgcccagtatctttctgagatcgaaatggcaaaagcccaacgggactacgagttaaagaaggcagcctatgacatcgaggtgaacaccaggcgagcacaggctgacctggcctaccagctgcaggtggctaaaactaagcagcaaatcgaagagcagtag

SEQ ID NO: 159486 - DNA, 759 bp, Artificial Sequence
  derived and/or modified sequence
atgtttttcacatgtgggccaaacgaagcaatggtagttagcgggttttgccggtctccaccagtcatggtggctggaggccgagtcttcgtgctaccctgcattcagcagatccagcgaatatccctaaataccctaaccctgaacgtgaagagcgagaaggtatacactcgccacggagtgcctataagtgttacgggtatcgctcaggttaaaatccagggccagaacaaggagatgttggcagcagcctgtcaaatgttcctcggcaaaacggaggctgaaatagctcacatcgccttggaaacactggagggccaccagcgagctattatggcccatatgaccgttgaggagatctacaaagatcggcaaaaattcagtgaacaggtcttcaaagtggccagtagcgacctggtcaatatgggcatctctgtcgtcagttataccttaaaagatatacatgatgaccaggactatctgcattcgttgggtaaagcccgaacggcgcaggtgcaaaaagacgccaggatcggcgaggctgaggctaaacgcgacgcaggcatccgagaagctaaggccaaacaagaaaaggtgagtgcccagtacctgtcggaaattgagatggccaaggctcaaagagactatgagctgaagaaggccgcttatgacatagaggtcaacacgcggagggcccaggcagatctggcgtatcagctccaagtggccaagaccaaacaacagatagaagagcagtag

SEQ ID NO: 159487 - DNA, 558 bp, Artificial Sequence
  derived and/or modified sequence
atgtttttcacctgcggacctaacgaagccatggtcgtgtccgggttttgccggagtccccctgtgatggtcgccggagggagggtcttcgtcctgccatgcattcaacaaattcagcgaatcagcctcaataccctcaccttgaatgtgaagagtgagaaagtctataccagacacggcgttcccatcagtgtgacagggattgcccaggtaaagattcagggacagaacaaggagatgctagctgcagcttgccagatgtttctggggaagactgaagccgagatcgctcatattgccctggagacgctcgaggggcatcagcgcgctatcatggcccatatgacggtggaggaaatttacaaagacagacagaagtttagtgaacaggtcttcaaggtggccagttccgatctcgtgaatatgggaatcagcgtcgtatcctatactctcaaggatattcatgacgatcaggattacctgcattctttgggcaaagccaggacggctcaggtccaaaaagacgctcggatcggtgaagctgaggcgaagaggtag

SEQ ID NO: 159488 - DNA, 759 bp, Artificial Sequence
  derived and/or modified sequence
atgtttttcacatgcggacctaacgaggcaatggtagtgagtgggttttgccggagtccaccagttatggtggccggaggaagagtgttcgttttaccttgcatccagcagatccaacggatcagcttgaatactttaaccctgaatgtgaagagtgaaaaagtatatacgagacacggcgtgcccataagtgtgactggaatcgcccaggtcaaaattcagggacaaaacaaggagatgttggctgccgcttgccaaatgtttttgggtaagacagaggccgaaattgcacacatcgcactggagacactggaaggccatcagcgagccattatggcacatatgacagtcgaggagatttataaggatcggcagaaattttcagagcaggtatttaaggtggcctcttctgacctggtaaatatgggaatctccgtagtcagctacactttgaaggacattcacgacgaccaagactacttgcactctttaggcaaggcacgcaccgcccaggtgcaaaaggatgctagaattggggaagccgaagcaaagcgtgatgctggcattagggaggctaaggcaaaacaggaaaaggtctccgcccaatatttatccgagatcgaaatggccaaggcccaacgggactacgaactcaagaaggctgcatatgatatcgaagtgaacacccggagagcacaggccgatctggcgtatcagctgcaggtggcaaagactaagcagcagatcgaagagcagtag

SEQ ID NO: 159489 - DNA, 558 bp, Artificial Sequence
  derived and/or modified sequence
atgttctttacatgcggtcccaatgaggctatggtggtgtccggtttttgtaggtccccaccggtgatggtcgccggaggaagagtgttcgtcctcccgtgcattcagcaaatccagcgcatatcattgaacactctcaccctgaatgtaaagagcgagaaagtctatacccggcatggtgtcccaattagtgtaactgggatcgctcaggtcaaaattcagggccaaaacaaagaaatgctagctgctgcatgccaaatgttcctgggtaaaaccgaggctgagatcgcccatatcgcgctagagaccctggagggtcatcagcgggcaataatggcacacatgacagttgaagaaatctataaagaccggcagaaattcagcgagcaggtattcaaagttgcctcctctgacttggtcaacatgggaatctctgttgtatcatacacactgaaagatatccatgacgaccaggattacttgcactcgctcgggaaggcaaggactgcccaggttcaaaaagatgcccgtattggtgaggccgaggccaaaagatag

SEQ ID NO: 159490 - DNA, 1284 bp, Artificial Sequence
  derived and/or modified sequence
atgttttttacatgcgggcctaacgaagctatggttgtaagtggcttctgcaggtcccctccagtgatggtggcagggggaagggtgtttgtcttgccatgcattcagcaaattcagcgcatctcgctgaatacccttaccctcaacgttaaaagtgagaaagtttatactcggcatggtgtccccatctccgttacagggattgcccaagtgaaaattcaggggcagaacaaggaaatgcttgccgctgcatgccagatgttcctaggcaagacagaagcagagattgcccacattgccttagaaacactcgaggggcatcagcgggctattatggctcacatgacagttgaagaaatttacaaggaccggcaaaagttctctgaacaggtatttaaggtggcttcgagcgacttggtcaacatgggtatttccgtcgttagttataccttgaaagatattcacgacgaccaggactatttacactccctcggaaaagcccgtactgctcaagtgcagaaggatgcccgaattggcgaggctgaagcaaaacgcgatgccggaattagagaggctaaagccaagcaggaaaaagtttctgcccagtatttgtccgaaatcgagatggccaaagcccagcgggactatgagttgaagaaagctgcttacgatatcgaggttaatacacgccgagcccaagcagatttagcatatcagctccaggtagcaaaaaccaaacaacagattgaggagcagcgtgtgcaggtgcaggtcgtcgaacgagcccagcaggtggcagtccaggaacaggaaattgcacgaagagaaaaggagctcgaagccagagtcagaaagccagccgaagccgaacgctataagctggagcggctggccgaggctgagaagtcccaacttattatgcaggctgaagccgaggctgcgtctgtccggatgagaggtgaagccgaagcgttcgccatcggagctagagcaagggctgaggcggaacagatggcaaagaaagccgaagccttccagctgtatcaagaggcagcacagttggatatgctgctggagaagcttccacaggtagctgaggaaattagcggacctctcacgagtgccaataaaattacattggtatcttctgggtcagggactatgggggctgcgaaagtgaccggagaagtactggacatcctgactcgactgccggagagcgtggaaagactgactggcgtttctatatctcaagtcaaccacaaacctctgaggacagcctag

SEQ ID NO: 159491 - DNA, 579 bp, Artificial Sequence
  derived and/or modified sequence
atgtttttcacttgcggccctaatgaagcaatggttgtctctggcttctgtaggtctccacccgtcatggtggcagggggacgggtatttgtattaccatgcattcagcaaatccagcggatttcactaaacacactgacccttaacgttaagagtgagaaagtcaaaattcagggtcaaaataaggagatgctggccgctgcttgtcaaatgttccttggtaaaacagaagcggagatagcgcatatcgccttagaaacactggagggacatcaacgcgctatcatggctcacatgaccgtagaagagatctacaaagaccgccagaagttctcggaacaagtttttaaggtggcatcatctgatcttgtgaatatgggaatatctgtggtgtcttataccttgaaggatattcacgatgatcaagattacctccactcactcgggaaggccaggacagcccaggtacagaaggatgccagaattggggaagctgaggccaaaagagatgcaggcattagagaagccaaggctaaacaggaaaaggtgtccgcacaatatcttagcgaaattgaatag

SEQ ID NO: 159492 - DNA, 708 bp, Artificial Sequence
  derived and/or modified sequence
atgttttttacatgtgggccaaatgaagcgatggtggtgtccggattttgtcgctcgcctcccgtcatggtggccggtgggagagtgttcgtgttgccctgcatccaacaaatacagcgcataagtctaaatacactcaccttgaatgttaaatccgagaaggtatacaccagacacggtgtgccaatttctgttactggcatcgcccaggtgaaaattcaggggcagaataaggaaatgctggctgccgcttgccagatgttcttaggcaagacagaagcagaaatcgcccacattgccttggaaaccttagaagggcaccaacgcgctatcatggcccacatgaccgtcgaagagatctacaaggaccggcaaaagttctccgaacaggtgttcaaagtcgcatcatcggatcttgttaacatgggaatttcagtcgtcagctatacactgaaggatatacacgacgatcaagactacctccactcccttgggaaagcgagaaccgctcaagtccagaaggacgctagaatcggggaagccgaagctaagagagacgccggaattagagaagccaaggccaagcaggagaaggtgagcgcccagtacttgtctgagattgaaatggccaaggcccagcgcgattatgaattaaagaaggctgcctacgatatcgaggttaacacgcgtagggcccaggcggattag

SEQ ID NO: 159493 - DNA, 708 bp, Artificial Sequence
  derived and/or modified sequence
atgtttttcacatgtggccctaatgaagctatggtcgtctcaggattctgcagatccccaccagtgatggttgccggagggagggtcttcgtgctcccttgcattcagcagattcaaaggatctccctcaacaccctgactcttaacgtgaagtcagagaaagtctatacaaggcacggagttcccatcagcgtcacgggcattgctcaggtaaagatccaaggacagaataaggagatgctggccgctgcatgtcagatgttcttagggaaaacagaggccgaaattgcgcacattgcactggaaactctggagggccaccagcgcgctatcatggcacacatgactgtggaggagatatataaggaccgtcaaaagttctctgagcaagttttcaaagtcgcttcttctgatctggtgaatatgggaatctccgtggtctcatacacactgaaagacatacatgatgaccaggactatctgcatagcctggggaaagccagaaccgcccaggtgcagaaagacgcaaggataggcgaggctgaagcgaagagagacgcaggcatccgggaggctaaggcaaaacaagagaaagtaagtgcacagtatttatcagagatcgagatggcaaaagcacagcgtgattacgaactgaagaaggctgcttacgacatcgaggtgaatacacggagggcccaggccgattag

SEQ ID NO: 159494 - DNA, 36 bp, Artificial Sequence
  derived and/or modified sequence
gttgccaagacaaagcagcagatcgaggagcagtag

SEQ ID NO: 159495 - DNA, 759 bp, Artificial Sequence
  derived and/or modified sequence
atgttttttacctgcggacccaatgaagccatggtcgtaagcgggttctgtagaagtcccccagtgatggtggccggaggccgtgtctttgtgctaccttgcatccaacaaatccaaaggatctctttgaacactctgacccttaacgtcaaatcagaaaaggtatacacaaggcacggcgtgccaattagtgtaactgggattgcacaggttaagattcaaggacagaataaagagatgctcgccgcagcttgtcagatgtttctggggaagacagaggcagagatcgcacacatagcactcgagacactcgagggacaccagcgggcaatcatggcccacatgacagtggaagaaatttataaagaccggcagaagttctctgagcaggtgttcaaagtagcgtcctccgatttagtgaatatgggaatatctgtcgtaagttatacactgaaggatatacatgatgaccaggactacttacactcacttggcaaagccaggaccgctcaggttcagaaggacgcacgtattggggaagctgaagccaagcgcgatgccggtatcagggaagcaaaggcgaaacaggagaaagtgtccgctcagtacctctctgagatagaaatggctaaagcacagagggactatgaacttaaaaaagccgcatatgacatcgaagtgaacacacggagagctcaggccgatttggcatatcaactccaagtggccaaaaccaagcaacagatagaagagcagtag

SEQ ID NO: 159496 - DNA, 708 bp, Artificial Sequence
  derived and/or modified sequence
atgtttttcacgtgcggaccaaatgaggccatggtcgttagtggcttttgtcggagcccgccagtgatggtggctggaggtcgggtgtttgtgctcccctgtatacagcagattcagcgaattagtctgaatactctcacactcaatgtgaaaagcgagaaggtatacacaaggcacggcgtaccaataagcgtcaccggaattgcacaggttaagattcagggacaaaataaagagatgcttgccgcagcgtgtcagatgttcctcggcaagaccgaagccgagattgcccatatcgctcttgaaacgctggaaggacatcaacgcgcaatcatggcccatatgacagtggaggaaatatacaaggatcggcaaaaattctccgaacaggtgttcaaggtcgcatctagtgatcttgttaatatgggtatttccgtcgtaagctacactcttaaagatattcatgatgaccaggactacctccatagtctgggaaaagccagaactgcgcaggtgcagaaggacgcccgtatcggcgaggctgaagccaaaagggacgccggaattagagaagcaaaggccaagcaagaaaaggtgagtgctcagtatctgtctgaaattgagatggccaaggcacagcgggactacgagttgaagaaagcggcatatgatatcgaggtcaacactaggcgggcacaggccgattag

SEQ ID NO: 159497 - DNA, 558 bp, Artificial Sequence
  derived and/or modified sequence
atgtttttcacttgtggcccaaatgaagctatggtcgttagcgggttctgccgctcacctcccgtaatggtggcgggtggacgtgtttttgttctgccttgtattcagcaaattcaaagaataagcttgaacaccttaacactcaacgtcaaatccgagaaagtctacacccggcatggcgtgcccatttccgtaactgggatcgcccaggttaagattcagggacagaataaagagatgctggccgctgcctgtcaaatgtttctcggcaagacagaagccgagatcgcccacatcgcacttgagacattagagggccatcagcgagctatcatggcccacatgaccgtcgaggagatttacaaggacaggcaaaaatttagtgaacaggtctttaaggttgcgtcatcagacctcgtgaatatgggtattagcgtggttagttatacactgaaagacattcacgatgatcaggactatcttcattccctaggcaaagcacgcaccgcacaggtacagaaagacgccaggattggcgaggcagaagcaaaacggtag

SEQ ID NO: 159498 - DNA, 558 bp, Artificial Sequence
  derived and/or modified sequence
atgtttttcacttgcggtccaaatgaggctatggtcgtgagcggtttctgtagatccccgcctgtgatggtcgctggaggaagggtttttgtactgccttgtatccagcagattcagcgtatcagcctaaacacattaaccctgaatgttaagtctgagaaagtgtatactcgccatggcgtgccaatctcggtcaccggcatagcccaagtgaagatccagggccagaacaaggagatgctcgccgctgcatgccagatgttcctcggaaaaactgaggccgaaatcgcccatattgcactcgagaccctcgagggccaccagagggctattatggctcatatgacggttgaggaaatctacaaggacaggcaaaagttcagcgagcaagtgttcaaggtggcttcatccgatcttgtaaacatggggatttctgttgtctcatataccctcaaagacattcatgacgaccaggactatctccactcattggggaaggcccgtaccgcgcaagtacagaaggatgccagaatcggggaggcagaagctaaacgctag

SEQ ID NO: 159499 - DNA, 633 bp, Artificial Sequence
  derived and/or modified sequence
atgtttttcacatgcggaccaaatgaagccatggtggtgagcgggttctgtagatcacctccagtcatggtggctgggggacgggtcttcgtattaccatgcattcaacagattcagcggatttctcttaataccctgacactgaatgttaagtctgagaaggtatacaccaggcatggggttccaattagcgttactgggatagctcaggtgaaaatacagggccagaataaggaaatgttagcagctgcctgccaaatgttcttggggaagacagaggcagagattgcccatatcgctctggagaccctcgagggacaccagcgcgctatcatggcacatatgacagttgaggaaatttacaaagatcgtcaaaaatttagtgaacaggtgttcaaggtcgctagcagcgatttggtgaacatgggtatatctgtcgtgtcatataccctgaaagatatccacgacgaccaggactatctgcactctctgggcaaagcgaggactgcccaggtgcagaaagacgctaggattggggaagctgaggctaagcgggatgccggaattagagaagcaaaagctaaacaggaaaaggtttcggctcagtacttgagcgagatcgaaatggcgtag

SEQ ID NO: 159500 - DNA, 579 bp, Artificial Sequence
  derived and/or modified sequence
atgtttttcacgtgcggccctaacgaagcgatggtcgtgtccggcttttgccgatctcccccagttatggttgctgggggtagagtgtttgtcctgccatgtatccagcagatacagcgaatcagcctcaatactctcactttgaatgtaaaaagtgagaaagtgaaaatccagggacagaataaagagatgctggcagccgcttgccagatgttcttgggtaagaccgaggctgagatcgctcacatagccttggagacactcgagggccatcagagggccatcatggcccacatgaccgtcgaagaaatctacaaggataggcagaagtttagcgaacaggtatttaaggtcgcctccagcgatctcgtaaacatgggcatttccgtcgtgagttatactctgaaggacattcacgacgaccaggactatctgcattctctaggaaaagctagaactgcacaagtgcaaaaggacgctcgtattggagaagccgaggctaagcgtgatgccggtatccgagaagcaaaggctaagcaggaaaaggtcagcgcccagtatctctccgagattgagtag

SEQ ID NO: 159501 - DNA, 1284 bp, Artificial Sequence
  derived and/or modified sequence
atgttcttcacctgcggccccaacgaggccatggtggtgagcggcttctgcagaagcccccccgtgatggtggccggcggcagagtgttcgtgctgccctgcatccagcagatccagagaatcagcctgaacaccctgaccctgaacgtgaagagcgagaaggtgtacaccagacacggcgtgcccatcagcgtgaccggcatcgcccaggtgaagatccagggccagaacaaggagatgctggccgccgcctgccagatgttcctgggcaagaccgaggccgagatcgcccacatcgccctggagaccctggagggccaccagagagccatcatggcccacatgaccgtggaggagatctacaaggacagacagaagttcagcgagcaggtgttcaaggtggccagcagcgacctggtgaacatgggcatcagcgtggtgagctacaccctgaaggacatccacgacgaccaggactacctgcacagcctgggcaaggccagaaccgcccaggtgcagaaggacgccagaatcggcgaggccgaggccaagagagacgccggcatcagagaggccaaggccaagcaggagaaggtgagcgcccagtacctgagcgagatcgagatggccaaggcccagagagactacgagctgaagaaggccgcctacgacatcgaggtgaacaccagaagagcccaggccgacctggcctaccagctgcaggtggccaagaccaagcagcagatcgaggagcagagagtgcaggtgcaggtggtggagagagcccagcaggtggccgtgcaggagcaggagatcgccagaagagagaaggagctggaggccagagtgagaaagcccgccgaggccgagagatacaagctggagagactggccgaggccgagaagagccagctgatcatgcaggccgaggccgaggccgccagcgtgagaatgagaggcgaggccgaggccttcgccatcggcgccagagccagagccgaggccgagcagatggccaagaaggccgaggccttccagctgtaccaggaggccgcccagctggacatgctgctggagaagctgccccaggtggccgaggagatcagcggccccctgaccagcgccaacaagatcaccctggtgagcagcggcagcggcaccatgggcgccgccaaggtgaccggcgaggtgctggacatcctgaccagactgcccgagagcgtggagagactgaccggcgtgagcatcagccaggtgaaccacaagcccctgagaaccgcctag

SEQ ID NO: 159502 - DNA, 579 bp, Artificial Sequence
  derived and/or modified sequence
atgttcttcacctgcggccccaacgaggccatggtggtgagcggcttctgcagaagcccccccgtgatggtggccggcggcagagtgttcgtgctgccctgcatccagcagatccagagaatcagcctgaacaccctgaccctgaacgtgaagagcgagaaggtgaagatccagggccagaacaaggagatgctggccgccgcctgccagatgttcctgggcaagaccgaggccgagatcgcccacatcgccctggagaccctggagggccaccagagagccatcatggcccacatgaccgtggaggagatctacaaggacagacagaagttcagcgagcaggtgttcaaggtggccagcagcgacctggtgaacatgggcatcagcgtggtgagctacaccctgaaggacatccacgacgaccaggactacctgcacagcctgggcaaggccagaaccgcccaggtgcagaaggacgccagaatcggcgaggccgaggccaagagagacgccggcatcagagaggccaaggccaagcaggagaaggtgagcgcccagtacctgagcgagatcgagtag

SEQ ID NO: 159503 - DNA, 708 bp, Artificial Sequence
  derived and/or modified sequence
atgttcttcacctgcggccccaacgaggccatggtggtgagcggcttctgcagaagcccccccgtgatggtggccggcggcagagtgttcgtgctgccctgcatccagcagatccagagaatcagcctgaacaccctgaccctgaacgtgaagagcgagaaggtgtacaccagacacggcgtgcccatcagcgtgaccggcatcgcccaggtgaagatccagggccagaacaaggagatgctggccgccgcctgccagatgttcctgggcaagaccgaggccgagatcgcccacatcgccctggagaccctggagggccaccagagagccatcatggcccacatgaccgtggaggagatctacaaggacagacagaagttcagcgagcaggtgttcaaggtggccagcagcgacctggtgaacatgggcatcagcgtggtgagctacaccctgaaggacatccacgacgaccaggactacctgcacagcctgggcaaggccagaaccgcccaggtgcagaaggacgccagaatcggcgaggccgaggccaagagagacgccggcatcagagaggccaaggccaagcaggagaaggtgagcgcccagtacctgagcgagatcgagatggccaaggcccagagagactacgagctgaagaaggccgcctacgacatcgaggtgaacaccagaagagcccaggccgactag

SEQ ID NO: 159504 - DNA, 558 bp, Artificial Sequence
  derived and/or modified sequence
atgttcttcacctgcggccccaacgaggccatggtggtgagcggcttctgcagaagcccccccgtgatggtggccggcggcagagtgttcgtgctgccctgcatccagcagatccagagaatcagcctgaacaccctgaccctgaacgtgaagagcgagaaggtgtacaccagacacggcgtgcccatcagcgtgaccggcatcgcccaggtgaagatccagggccagaacaaggagatgctggccgccgcctgccagatgttcctgggcaagaccgaggccgagatcgcccacatcgccctggagaccctggagggccaccagagagccatcatggcccacatgaccgtggaggagatctacaaggacagacagaagttcagcgagcaggtgttcaaggtggccagcagcgacctggtgaacatgggcatcagcgtggtgagctacaccctgaaggacatccacgacgaccaggactacctgcacagcctgggcaaggccagaaccgcccaggtgcagaaggacgccagaatcggcgaggccgaggccaagagatag

SEQ ID NO: 159505 - DNA, 633 bp, Artificial Sequence
  derived and/or modified sequence
atgttcttcacctgcggccccaacgaggccatggtggtgagcggcttctgcagaagcccccccgtgatggtggccggcggcagagtgttcgtgctgccctgcatccagcagatccagagaatcagcctgaacaccctgaccctgaacgtgaagagcgagaaggtgtacaccagacacggcgtgcccatcagcgtgaccggcatcgcccaggtgaagatccagggccagaacaaggagatgctggccgccgcctgccagatgttcctgggcaagaccgaggccgagatcgcccacatcgccctggagaccctggagggccaccagagagccatcatggcccacatgaccgtggaggagatctacaaggacagacagaagttcagcgagcaggtgttcaaggtggccagcagcgacctggtgaacatgggcatcagcgtggtgagctacaccctgaaggacatccacgacgaccaggactacctgcacagcctgggcaaggccagaaccgcccaggtgcagaaggacgccagaatcggcgaggccgaggccaagagagacgccggcatcagagaggccaaggccaagcaggagaaggtgagcgcccagtacctgagcgagatcgagatggcctag

SEQ ID NO: 159506 - DNA, 759 bp, Artificial Sequence
  derived and/or modified sequence
atgttcttcacctgcggccccaacgaggccatggtggtgagcggcttctgcagaagcccccccgtgatggtggccggcggcagagtgttcgtgctgccctgcatccagcagatccagagaatcagcctgaacaccctgaccctgaacgtgaagagcgagaaggtgtacaccagacacggcgtgcccatcagcgtgaccggcatcgcccaggtgaagatccagggccagaacaaggagatgctggccgccgcctgccagatgttcctgggcaagaccgaggccgagatcgcccacatcgccctggagaccctggagggccaccagagagccatcatggcccacatgaccgtggaggagatctacaaggacagacagaagttcagcgagcaggtgttcaaggtggccagcagcgacctggtgaacatgggcatcagcgtggtgagctacaccctgaaggacatccacgacgaccaggactacctgcacagcctgggcaaggccagaaccgcccaggtgcagaaggacgccagaatcggcgaggccgaggccaagagagacgccggcatcagagaggccaaggccaagcaggagaaggtgagcgcccagtacctgagcgagatcgagatggccaaggcccagagagactacgagctgaagaaggccgcctacgacatcgaggtgaacaccagaagagcccaggccgacctggcctaccagctgcaggtggccaagaccaagcagcagatcgaggagcagtag

SEQ ID NO: 159507 - DNA, 36 bp, Artificial Sequence
  derived and/or modified sequence
gtggccaagaccaagcagcagatcgaggagcagtag

SEQ ID NO: 159508 - protein, 427 aa, Artificial Sequence
  derived and/or modified sequence
MAEQDVENDLLDYDEEEEPQAPQESTPAPPKKDIKGSYVSIHSSGFRDFLLKPELLRAIVDCGFEHPSEVQHECIPQAILGMDVLCQAKSGMGKTAVFVLATLQQIEPVNGQVTVLVMCHTRELAFQISKEYERFSKYMPSVKVSVFFGGLSIKKDEEVLKKNCPHVVVGTPGRILALVRNRSFSLKNVKHFVLDECDKMLEQLDMRRDVQEIFRLTPHEKQCMMFSATLSKDIRPVCRKFMQDPMEVFVDDETKLTLHGLQQYYVKLKDSEKNRKLFDLLDVLEFNQVIIFVKSVQRCMALAQLLVEQNFPAIAIHRGMAQEERLSRYQQFKDFQRRILVATNLFGRGMDIERVNIVFNYDMPEDSDTYLHRVARAGRFGTKGLAITFVSDENDAKILNDVQDRFEVNVAELPEEIDISTYIEQSR

SEQ ID NO: 159509 - protein, 322 aa, Artificial Sequence
  derived and/or modified sequence
MAEQDVENDLLDYDEEEEPQAPQESTPAPPKKDIKGSYVSIHSSGFRDFLLKPELLRAIVDCGFEHPSEVQHECIPQAILGMDVLCQAKSGMGKTAVFVLATLQQIEPVNGQVTVLVMCHTRELAFQISKEYERFSKYMPSVKVSVFFGGLSIKKDEEVLKKNCPHVVVGTPGRILALVRNRSFSLKNVKHFVLDECDKMLEQLDMRRDVQEIFRLTPHEKQCMMFSATLSKDIRPVCRKFMQDPMEVFVDDETKLTLHGLQQYYVKLKDSEKNRKLFDLLDVLEFNQPVTLSAVQGFPAADPGGHQSVWPGDGHRASQHRL

SEQ ID NO: 159510 - protein, 470 aa, Artificial Sequence
  derived and/or modified sequence
MAYGAPSPTWSLSVRPNRPRGGLGPFGEVQVILLPPSSWDYSIMAEQDVENDLLDYDEEEEPQAPQESTPAPPKKDIKGSYVSIHSSGFRDFLLKPELLRAIVDCGFEHPSEVQHECIPQAILGMDVLCQAKSGMGKTAVFVLATLQQIEPVNGQVTVLVMCHTRELAFQISKEYERFSKYMPSVKVSVFFGGLSIKKDEEVLKKNCPHVVVGTPGRILALVRNRSFSLKNVKHFVLDECDKMLEQLDMRRDVQEIFRLTPHEKQCMMFSATLSKDIRPVCRKFMQDPMEVFVDDETKLTLHGLQQYYVKLKDSEKNRKLFDLLDVLEFNQVIIFVKSVQRCMALAQLLVEQNFPAIAIHRGMAQEERLSRYQQFKDFQRRILVATNLFGRGMDIERVNIVFNYDMPEDSDTYLHRVARAGRFGTKGLAITFVSDENDAKILNDVQDRFEVNVAELPEEIDISTYIEQSR

SEQ ID NO: 159511 - protein, 267 aa, Artificial Sequence
  derived and/or modified sequence
MAEQDVENDLLDYDEEEEPQAPQESTPAPPKKDIKGSYVSIHSSGFRDFLLKPELLRAIVDCGFEHPSEVQHECIPQAILGMDVLCQAKSGMGKTAVFVLATLQQIEPVNGQVTVLVMCHTRELAFQISKEYERFSKYMPSVKVSVFFGGLSIKKDEEVLKKNCPHVVVGTPGRILALVRNRSFSLKNVKHFVLDECDKMLEQLDMRRDVQEIFRLTPHEKQCMMFSATLSKDIRPVCRKFMQDVLWEVSHKGVAHWKVLGRRDAQR

SEQ ID NO: 159512 - DNA, 1284 bp, Artificial Sequence
  derived and/or modified sequence
atggctgagcaggacgtggaaaacgatttactggactacgacgaggaggaagaaccacaggctcctcaggaatcaacaccggccccacccaagaaggacattaaaggcagttacgtgagtattcacagtagcgggttcagagactttctgttgaaacctgaactcctcagggcaatcgtggactgtggatttgaacatcctagtgaagtgcagcacgaatgcataccccaggccattttgggcatggatgtactgtgtcaagccaagtctggtatggggaaaacggcagttttcgtcctcgctaccttgcagcaaatagaacccgtgaatggccaggtgaccgttctcgtcatgtgtcatacacgggaactggcctttcagatctctaaggaatacgaacggtttagtaagtatatgccctctgttaaagtcagtgtattttttggaggcctatcaattaagaaagatgaggaagtcctcaaaaagaattgtccccacgtcgtggtgggcacccctggtagaatcctggctctggtcagaaacaggagcttctcactcaaaaatgtgaagcactttgtgctggacgagtgtgacaaaatgctggaacagctcgacatgcgacgagacgtgcaggagatttttagactgactccacacgagaaacagtgcatgatgttcagcgccaccctttctaaggatattaggccggtgtgccggaagttcatgcaagatcctatggaggtgttcgttgatgacgaaacgaagctaacactccacgggttacagcagtactatgtgaagttgaaagatagtgaaaagaaccggaagctgtttgatctcctggacgtcttagaattcaaccaggtgatcatctttgtgaagagcgtacagcgctgcatggcgctggcacagctgctggtggaacagaacttcccggccattgccattcaccgcggaatggcccaggaagagagactgtcacggtaccagcagttcaaggactttcagcgtaggatcctggtggcaaccaatctattcggccgtgggatggacatcgagagggtgaatatcgtattcaactatgacatgcctgaggattcagacacatacttgcatcgtgtagcacgagccggccgatttggcaccaaagggctcgctattactttcgtgtctgatgaaaatgatgcaaaaattctgaatgatgtgcaggaccggttcgaggtgaatgttgcagagcttccggaagagatcgacatctccacatacatcgagcagagtcggtag

SEQ ID NO: 159513 - DNA, 969 bp, Artificial Sequence
  derived and/or modified sequence
atggccgagcaggatgttgagaatgatctcttggactatgacgaagaggaggagccccaagccccacaggaaagcactcctgccccaccaaagaaagacattaaagggagttatgtgagtatccacagcagcggctttcgggattttctgctgaaaccagaactgctgcgggcgatcgtggattgcggctttgaacacccttcagaggttcagcatgaatgtatcccgcaagccattctgggtatggatgtcctgtgtcaggcgaaaagtggtatggggaagacagcagtttttgtgctggcgacactgcagcagattgaacccgtcaacgggcaagtgacggtgctcgtgatgtgccataccagggaactggcattccaaatcagcaaagaatatgaacgtttttctaagtacatgccatctgtcaaagttagcgtcttttttggagggttgagcatcaaaaaggacgaggaggtcctgaaaaagaactgcccccacgtggtagtgggaacacctggtaggatcctcgcactcgttagaaaccggtctttttccttgaagaacgttaagcattttgtccttgatgagtgcgataagatgttagaacagttggatatgcgtcgagatgtccaggaaattttccgactgaccccacatgagaaacaatgtatgatgttctctgccacgctgtctaaagacatccgtccagtgtgccgcaaattcatgcaggatcccatggaagtttttgtggatgacgagaccaagctgacacttcatggccttcaacagtattacgtgaagctgaaagactcagagaaaaaccgcaaattgtttgacctgcttgatgtgttggagtttaaccaacccgtaactctctcggccgtgcaggggtttcccgccgcggatcctggtggtcatcagagcgtatggcccggcgatggccaccgcgcatctcaacatcgcctctag

SEQ ID NO: 159514 - DNA, 1413 bp, Artificial Sequence
  derived and/or modified sequence
atggcctacggggcgccctctcccacatggtctcttagcgtgcggccaaacagacctcgtggcgggttaggcccctttggtgaggtgcaggtcatactgctgcccccatcctcctgggactactcaatcatggcggagcaagacgtcgagaacgacctccttgactacgacgaagaggaagagcctcaagctccacaagagtctaccccggccccacccaaaaaggatattaagggctcatatgtctccatccactcttccggatttagggacttccttctgaagcctgaactactccgggccatcgtcgactgtgggttcgagcatccaagcgaggtacagcatgaatgtatcccacaggcgatattagggatggacgtgctttgtcaagcaaaatctggcatgggaaagaccgctgttttcgtgttggccacacttcaacagatagagccagtgaacggccaggtgacggtgcttgttatgtgtcatacccgggagctcgccttccagatctccaaggaatatgagcggttcagcaagtacatgccaagcgtgaaagtgtctgtctttttcggagggctatcgattaagaaagacgaggaagttctgaagaagaattgcccccacgtggtagtgggtacaccgggccgcattcttgctctggtgcgaaaccgctccttttctctgaaaaacgtgaagcactttgtgctcgacgagtgcgacaaaatgttagaacagctcgatatgcgtcgtgacgttcaggagatctttcggctgacaccccacgagaaacagtgcatgatgtttagcgcaaccttgtcaaaggatataaggccagtttgcagaaaatttatgcaggatccaatggaagtgtttgtggacgacgagaccaagctgactctgcacggactgcagcaatattacgtgaaacttaaagactctgagaagaacagaaaactcttcgatctcctggacgttctcgagtttaatcaggtgatcatcttcgtcaaaagtgtgcagcgctgcatggctctggcgcagttgctggtagaacagaatttcccagcgatcgcaatccaccgtggtatggctcaggaagaaaggttgtcacggtaccagcagttcaaggacttccaaaggaggatattagtagccaccaacctgtttgggagggggatggacatcgagagagtgaacattgttttcaattatgacatgccagaagactcagacacatacctgcaccgagtagcaagagctgggcggttcgggaccaagggtctggctattacctttgtttccgacgagaacgacgctaagattctgaacgacgtgcaggatagattcgaagtcaacgtggcagagctgcccgaagagatcgatatttctacatacatcgagcaatccagatag

SEQ ID NO: 159515 - DNA, 804 bp, Artificial Sequence
  derived and/or modified sequence
atggccgaacaagacgtggagaatgaccttctcgactacgacgaggaagaggaaccccaggctccccaagagtccacgccagcacccccaaagaaagatatcaaggggagttatgtctcaatccactcatctggcttcagagatttcctgttgaaacctgagctgctaagggctattgtagactgtggctttgaacacccatcagaggtgcagcacgagtgcattccacaggctatcctcggaatggatgtgttgtgtcaggccaaaagtgggatgggcaaaaccgccgttttcgtgcttgctacattgcagcagattgagcccgtcaacggccaggtaactgtcctggtgatgtgccatacccgagagctagccttccaaatcagcaaagaatacgagagattctcaaagtacatgccatccgtgaaggtctccgtcttcttcggtggactgagtatcaagaaagatgaagaggtgctgaaaaagaattgccctcacgtcgtcgtgggaactcctggaaggattctcgctttggttagaaacaggtcttttagtctcaagaacgtcaaacatttcgttctggatgaatgcgacaagatgctggagcaactcgacatgcggcgcgacgtccaagaaatattccgcttgacaccacacgaaaagcaatgtatgatgttctccgccaccctgtctaaggacatcagaccagtttgccgtaagttcatgcaagacgtgctctgggaggtgtctcacaaaggggtcgctcattggaaagtgctgggcagaagggatgcgcaacgatag

SEQ ID NO: 159516 - DNA, 1284 bp, Artificial Sequence
  derived and/or modified sequence
atggccgagcaggatgtggagaatgacctgctggactatgatgaggaggaggagccccaggccccccaggagagcaccccagccccacccaagaaggacatcaagggcagctatgtgtccatccacagcagcggcttccgggacttcctgctgaagccagagctgctgcgggccatcgtggactgtggctttgagcaccccagcgaggtgcagcacgagtgcatcccccaggccatcctgggcatggatgtgctgtgccaggccaagagcggcatgggcaagacagctgtgtttgtgctggccaccctgcagcagatcgagcctgtgaatggccaggtgacagtgctggtgatgtgccacacccgggagctggccttccagatcagcaaggagtatgagcgcttcagcaagtacatgcccagcgtgaaggtgtctgtgttcttcggcggcctgagcatcaagaaggatgaggaggtgctgaagaagaactgcccccacgtggtggtgggcaccccaggccgcatcctggccctggtgaggaacagaagcttcagcctgaagaatgtgaagcactttgtgctggatgaatgtgacaagatgctggagcagctggacatgagaagagatgtgcaggagatcttccggctgacccctcatgagaagcagtgcatgatgttttctgccaccctgagcaaggacatccggcctgtgtgcaggaagttcatgcaggaccccatggaggtgtttgtggatgatgagaccaagctgaccctgcacggcctgcagcagtactacgtgaagctgaaggacagcgagaagaacaggaagctgtttgacctgctggatgtgctggagttcaaccaggtgatcatctttgtgaagtctgtgcagcgctgcatggccctggcccagctgctggtggagcagaacttccctgccatcgccatccaccggggcatggcccaggaggagcggctgagccgctaccagcagttcaaggacttccagaggcgcatcctggtggccaccaacctgtttggccggggcatggacatcgagcgggtgaacatcgtgttcaactatgacatgccagaagattctgacacctacctgcaccgggtggcccgggccggccgcttcggcaccaagggcctggccatcacctttgtgtctgatgaaaatgatgccaagatcctgaatgatgtgcaggacagatttgaggtgaatgtggccgagctgcctgaggagattgacatcagcacctacatcgagcagagcaggtag

SEQ ID NO: 159517 - DNA, 969 bp, Artificial Sequence
  derived and/or modified sequence
atggccgagcaggatgtggagaatgacctgctggactatgatgaggaggaggagccccaggccccccaggagagcaccccagccccacccaagaaggacatcaagggcagctatgtgtccatccacagcagcggcttccgggacttcctgctgaagccagagctgctgcgggccatcgtggactgtggctttgagcaccccagcgaggtgcagcacgagtgcatcccccaggccatcctgggcatggatgtgctgtgccaggccaagagcggcatgggcaagacagctgtgtttgtgctggccaccctgcagcagatcgagcctgtgaatggccaggtgacagtgctggtgatgtgccacacccgggagctggccttccagatcagcaaggagtatgagcgcttcagcaagtacatgcccagcgtgaaggtgtctgtgttcttcggcggcctgagcatcaagaaggatgaggaggtgctgaagaagaactgcccccacgtggtggtgggcaccccaggccgcatcctggccctggtgaggaacagaagcttcagcctgaagaatgtgaagcactttgtgctggatgaatgtgacaagatgctggagcagctggacatgagaagagatgtgcaggagatcttccggctgacccctcatgagaagcagtgcatgatgttttctgccaccctgagcaaggacatccggcctgtgtgcaggaagttcatgcaggaccccatggaggtgtttgtggatgatgagaccaagctgaccctgcacggcctgcagcagtactacgtgaagctgaaggacagcgagaagaacaggaagctgtttgacctgctggatgtgctggagttcaaccagcctgtgaccctgtctgctgtgcagggcttccctgctgctgaccccggcggccaccagagcgtgtggccaggagatggccaccgggccagccagcaccggctgtag

SEQ ID NO: 159518 - DNA, 1413 bp, Artificial Sequence
  derived and/or modified sequence
atggcctatggagcccccagccccacctggagcctgtctgtgcggcccaaccggccccggggcggcctgggcccctttggagaggtgcaggtgatcctgctgccccccagctcctgggactacagcatcatggccgagcaggatgtggagaatgacctgctggactatgatgaggaggaggagccccaggccccccaggagagcaccccagccccacccaagaaggacatcaagggcagctatgtgtccatccacagcagcggcttccgggacttcctgctgaagccagagctgctgcgggccatcgtggactgtggctttgagcaccccagcgaggtgcagcacgagtgcatcccccaggccatcctgggcatggatgtgctgtgccaggccaagagcggcatgggcaagacagctgtgtttgtgctggccaccctgcagcagatcgagcctgtgaatggccaggtgacagtgctggtgatgtgccacacccgggagctggccttccagatcagcaaggagtatgagcgcttcagcaagtacatgcccagcgtgaaggtgtctgtgttctttggaggcctgagcatcaagaaggatgaggaggtgctgaagaagaactgcccccacgtggtggtgggcaccccaggccgcatcctggccctggtgaggaacagaagcttcagcctgaagaatgtgaagcactttgtgctggatgaatgtgacaagatgctggagcagctggacatgagaagagatgtgcaggagatcttccggctgacccctcatgagaagcagtgcatgatgttcagcgccaccctgagcaaggacatccggcctgtgtgcaggaagttcatgcaggaccccatggaggtgtttgtggatgatgagaccaagctgaccctgcacggcctgcagcagtactacgtgaagctgaaggacagcgagaagaacaggaagctgtttgacctgctggatgtgctggagttcaaccaggtgatcatctttgtgaagtctgtgcagcgctgcatggccctggcccagctgctggtggagcagaacttccctgccatcgccatccaccggggcatggcccaggaggagcggctgagccgctaccagcagttcaaggacttccagaggcgcatcctggtggccaccaacctgtttggccggggcatggacatcgagcgggtgaacatcgtgttcaactatgacatgcctgaggacagcgacacctacctgcaccgggtggcccgggccggccgcttcggcaccaagggcctggccatcacctttgtgtctgatgaaaatgatgccaagatcctgaatgatgtgcaggacagatttgaggtgaatgtggccgagctgcctgaggagattgacatcagcacctacatcgagcagagcaggtag

SEQ ID NO: 159519 - DNA, 804 bp, Artificial Sequence
  derived and/or modified sequence
atggccgagcaggatgtggagaatgacctgctggactatgatgaggaggaggagccccaggccccccaggagagcaccccagccccacccaagaaggacatcaagggcagctatgtgtccatccacagcagcggcttccgggacttcctgctgaagccagagctgctgcgggccatcgtggactgtggctttgagcaccccagcgaggtgcagcacgagtgcatcccccaggccatcctgggcatggatgtgctgtgccaggccaagagcggcatgggcaagacagctgtgtttgtgctggccaccctgcagcagatcgagcctgtgaatggccaggtgacagtgctggtgatgtgccacacccgggagctggccttccagatcagcaaggagtatgagcgcttcagcaagtacatgcccagcgtgaaggtgtctgtgttcttcggcggcctgagcatcaagaaggatgaggaggtgctgaagaagaactgcccccacgtggtggtgggcaccccaggccgcatcctggccctggtgaggaacagaagcttcagcctgaagaatgtgaagcactttgtgctggatgaatgtgacaagatgctggagcagctggacatgagaagagatgtgcaggagatcttccggctgacccctcatgagaagcagtgcatgatgttttctgccaccctgagcaaggacatccggcctgtgtgcaggaagttcatgcaggatgtgctgtgggaggtgagccacaagggcgtggcccactggaaggtgctgggcagaagagatgcccagaggtag

SEQ ID NO: 159520 - DNA, 1284 bp, Artificial Sequence
  derived and/or modified sequence
atggccgagcaggacgtggagaacgacctgctggactacgacgaggaagaagagccgcaggccccgcaggaaagcacgcccgcacccccgaagaaggatatcaaggggtcctacgtctctatccactcatcgggttttagggacttcctccttaaaccggagctgctccgcgccatcgtcgactgtggctttgagcacccttccgaggtgcaacatgagtgcattccgcaggcaatattgggcatggatgtgctgtgccaggccaagtcagggatgggcaaaaccgctgtctttgtcctagcaactttgcagcagattgagccggtgaatggacaggtgaccgtcctggtgatgtgtcacacccgagaactggcattccagatctcgaaggagtatgagcgcttctcaaagtatatgcccagtgtgaaagtctccgtgttttttgggggcctgtccatcaaaaaggacgaagaagtgttgaaaaagaattgcccgcacgtcgtagtgggtaccccgggccgaatactggccctcgtgagaaatcggagcttcagcctgaagaacgtcaagcatttcgtgctggatgagtgtgataagatgctggagcagcttgatatgcgtcgggacgtgcaggaaatttttagattaacgcctcatgaaaaacaatgcatgatgttctccgctaccctgagtaaggacattcgacccgtgtgtcggaaatttatgcaggaccccatggaggtcttcgtggacgacgaaaccaagttgacgctgcacgggttgcagcaatactatgtcaagctcaaggatagcgaaaaaaatcgtaagctcttcgacctactagatgtgcttgagttcaaccaggtcatcatctttgtcaaatctgtgcagcgttgtatggccctggcacagcttcttgtggagcagaacttccctgctatagccattcacagagggatggcacaagaggagcgactgagcaggtaccagcagttcaaggatttccagaggcgaatcctggtggcaaccaatctctttgggcgtggcatggatatcgagagggtcaatattgtatttaactatgacatgcccgaagattctgacacttacttacatcgggtagcccgagcaggcaggtttgggactaaaggactcgccatcaccttcgtgtctgacgagaacgacgcaaagatcctcaatgacgtccaggaccggttcgaggtgaacgtggccgagctcccggaagagatcgacatttctacgtatatagaacagtctagatag

SEQ ID NO: 159521 - DNA, 969 bp, Artificial Sequence
  derived and/or modified sequence
atggccgagcaggacgtggagaacgacctgctggactacgacgaggaggaggaacctcaggcacctcaagaaagtacccccgcccctcccaagaaggacatcaagggatcatatgtgtcaatccactcttctggatttagagatttccttctgaagcctgagctgctgcgggccatcgtagactgtggctttgagcaccccagtgaggtgcaacatgaatgtataccccaggccatcttgggaatggatgtgctgtgccaggctaagtctgggatgggcaaaaccgccgttttcgtgttggcgactctccaacagatcgagcctgtcaacggccaggtaaccgtcttagtgatgtgtcacactcgggagctggctttccaaataagtaaagaatatgagcgcttttccaagtacatgcccagcgtgaaggtgtctgtgttcttcggagggctatccattaagaaagatgaggaagtcctgaagaagaattgtcctcacgtggtggtcggcacccctggcaggatactggctcttgttagaaaccggtcatttagtctgaaaaatgtaaagcactttgtgctggacgagtgtgacaagatgctcgagcagcttgatatgcgccgagacgtccaggagattttcagattaactcctcacgaaaaacagtgtatgatgtttagcgccacgctcagcaaggatattaggccagtctgtaggaagttcatgcaggatccgatggaggtcttcgtcgacgacgaaaccaagctgacgctgcacgggctacagcagtactatgtcaagttaaaagatagtgaaaagaatagaaaactgttcgatttgcttgatgtcttagaatttaatcaacctgttactctgtctgcagttcagggttttccggccgccgaccccgggggacaccagagcgtgtggcctggcgacgggcaccgggcaagccaacaccgcctgtag

SEQ ID NO: 159522 - DNA, 1413 bp, Artificial Sequence
  derived and/or modified sequence
atggcctacggcgcccccagccccacctggagcctgagcgtgcggccaaaccgccctaggggaggtctgggaccttttggggaggtccaggtaatcttgttgcccccctcgagttgggactacagcataatggccgagcaagatgtggagaacgacctgctggactacgacgaggaggaggaaccccaggctccgcaagagtcaacccctgccccccccaaaaaagacatcaaaggctcttacgtgtctatacattcctccggattcagggactttctgctgaaaccagaactgctgagggcgattgtcgactgcggattcgaacatcccagcgaagtgcagcatgagtgtattccgcaggcgattctgggcatggacgtgctgtgtcaggccaaatccggaatgggcaaaaccgctgtgtttgtgctggccaccctccagcagattgagcctgtaaatggccaggttactgtcctcgttatgtgccacacccgggagctggcatttcagattagcaaggagtatgagcgcttcagtaagtatatgccatcagtaaaggtgtccgtgtttttcggcggcctgagtatcaaaaaggacgaggaagtactcaagaaaaattgtccccatgtggtggtggggactcctgggcgcatactggcgctggttagaaaccgttctttcagccttaaaaacgtgaaacactttgtgctggatgagtgcgacaagatgcttgaacagctggatatgcgccgcgatgtgcaggagatattccgactcacgcctcacgaaaagcagtgtatgatgtttagcgcaacactctctaaggacatccgccccgtgtgtagaaagttcatgcaggaccctatggaggtgttcgtggacgatgaaacaaagttgacattgcacggcctacaacaatactatgtgaaattgaaagacagtgagaagaacagaaaactgtttgatttgttagacgtgctggagtttaatcaggtgattatcttcgtcaaatccgttcagcggtgtatggctcttgcacaactgctagtggagcaaaacttccccgccatagccatacaccgcggcatggcacaagaggagcggctgtcacgctatcaacagttcaaagactttcagaggcggattctagtcgccacaaatcttttcggacggggcatggatattgagcgtgtgaacatcgtgttcaactacgatatgcccgaggattcggacacatacctgcaccgggttgccagggctgggcggtttgggactaagggcctggcaatcacatttgttagcgacgagaatgacgccaaaatcttgaatgacgtacaggaccggttcgaagtgaacgtggctgagctgcccgaggaaatcgacattagcacatacattgagcagtcccgctag

SEQ ID NO: 159523 - DNA, 804 bp, Artificial Sequence
  derived and/or modified sequence
atggccgagcaggacgtggagaacgacctgctggactacgacgaggaggaggaaccacaagctccgcaggagagcacccctgcccctccgaagaaggacatcaaaggctcttatgtgtctatccactcatcaggattccgtgacttcttattgaagcccgagcttctccgcgcgatcgtagactgtggttttgagcacccctcggaagttcagcacgagtgcataccccaggcaatactggggatggatgtactgtgtcaggctaaatccgggatggggaagacagctgtatttgttctagcgacactccagcagattgaaccagtgaatggccaggtcacagttcttgtcatgtgccacacgcgagaactcgcattccagatttccaaggaatacgaaaggttctccaagtacatgccttccgttaaggtgtccgttttttttggcggcttgtcaataaaaaaggacgaggaagtactcaagaagaattgccctcacgtcgtggtgggaacacctggtaggatcttggctctggtcagaaaccggtccttcagccttaaaaacgtcaaacattttgtcctcgatgagtgcgacaagatgttggagcagttagacatgagaagggatgtccaggaaatcttcagactgacaccacatgaaaagcagtgtatgatgtttagtgccactttaagcaaggatattagaccagtgtgcagaaaattcatgcaggatgtactgtgggaggtctctcacaagggagtcgcacactggaaagtcctcgggcgacgcgacgcgcagcgctag

SEQ ID NO: 159524 - DNA, 1284 bp, Artificial Sequence
  derived and/or modified sequence
atggctgaacaggatgttgagaacgacctactggactacgacgaggaggaagagcctcaggctccacaggagtcaactccagctccaccaaaaaaggacatcaaggggtcatacgttagtattcattcctccggcttcagggacttccttcttaagcccgaattactgagagctattgttgattgtggcttcgagcaccccagcgaggtacagcacgagtgtattccacaagccatactggggatggacgtcctatgtcaggccaaaagtgggatgggaaagacggccgtatttgttctggcaacactacaacagattgaacctgtaaacggacaagtgactgtgctcgttatgtgtcacaccagggaactggcctttcaaatctccaaagaatatgaaaggttcagtaagtacatgccgtccgttaaagtgagcgtgtttttcggcggactgtcaatcaagaaggacgaagaggtgctcaaaaagaattgtccccacgtggtcgtcggcaccccaggcaggatccttgcattagtaagaaatcggtcattttctctgaagaacgtcaagcactttgtgttggacgaatgtgacaaaatgctcgagcagcttgatatgagaagggatgtccaagaaatctttagactgaccccacatgagaagcagtgcatgatgttctcagccactctctcaaaagatatccggccagtttgtcggaaatttatgcaagaccccatggaagtttttgttgatgatgagacaaaacttacactacacgggcttcagcaatactacgtgaagcttaaagacagcgagaagaacaggaaactctttgacctgctcgacgtccttgaattcaaccaggtcataatcttcgtgaagtcggtgcagaggtgcatggccctcgcccagctgctggtcgagcaaaattttccagcaattgccatccatagaggcatggcccaagaagagcggctgtcacgctaccaacagtttaaagacttccagagacgtatcctggtggctactaacctgttcggtcgcggtatggatatagagagagtgaacatcgtctttaattacgatatgcctgaggactcggacacatacctgcaccgggtcgctagggcagggagatttggcaccaaggggctagctatcacattcgtgtctgatgagaatgatgcgaagattctgaatgatgtccaggaccgtttcgaagttaatgtggccgagctccctgaagaaattgatatcagtacttacatcgaacagagtaggtag

SEQ ID NO: 159525 - DNA, 969 bp, Artificial Sequence
  derived and/or modified sequence
atggccgagcaggacgtggagaatgacctgctggactacgacgaggaagaggagcctcaggccccacaggagagcacacccgcacctcctaaaaaggacatcaaaggctcttatgtgtcaatccactccagtggatttagggactttctgctgaagcctgagctcctgagagccatcgtcgactgtggcttcgagcaccccagtgaagtgcagcacgagtgtattcctcaggccattctgggcatggacgtgttgtgtcaagccaaatcggggatgggtaagacagcagtctttgtgctggcgactctgcagcagattgaacccgtgaacggacaggtaaccgtgttggtcatgtgtcatacacgggagctggcgttccaaattagcaaagagtatgaacggttcagcaagtatatgccttccgtgaaagtttccgtgttcttcggaggtctgtccatcaagaaagacgaagaagttctgaaaaagaactgcccccacgtggtggtcggaacccctggtcggatcctcgccctggtgcgaaatcgtagcttttctctgaaaaacgtaaaacattttgttctggatgagtgcgacaagatgctcgagcagctggatatgcgtagagacgtgcaggagatctttcggttaacaccccatgagaagcagtgcatgatgttctccgccacacttagtaaggacatcaggcctgtctgtaggaagttcatgcaggacccgatggaagtgttcgttgatgatgagacaaaactaaccctccatggtttgcagcagtattacgtgaaactgaaggattcagagaagaaccgaaagttgttcgaccttctggacgttttagaatttaatcagccagtgacattgagcgccgtccaaggcttccctgccgcagaccccggaggccaccaatccgtttggcctggggatggacatcgggcaagtcagcacaggctatag

SEQ ID NO: 159526 - DNA, 1413 bp, Artificial Sequence
  derived and/or modified sequence
atggcttatggcgcaccttccccaacctggtccctctccgttcgtcccaaccggcctagaggaggcttaggtccgttcggtgaagtgcaagtaatcctcctcccccctagtagctgggactactcaatcatggctgagcaggatgtggaaaacgatctacttgactatgacgaggaggaagaacctcaggcccctcaagagtccaccccagccccacctaaaaaagatataaagggttcgtacgtctccatccactcgtccggatttcgagatttcctcctgaaacctgaactgcttagggccatcgttgactgtggctttgagcaccccagcgaggtccagcatgagtgcataccacaagccatcctgggtatggatgtactctgccaggcaaagtccggcatgggaaaaacggcagtgtttgttctggcaacactccaacagatagagcccgtgaacgggcaggtcacagtcctggtcatgtgtcatacaagagaattggcctttcagatctcaaaggaatatgagaggttctctaagtacatgccctcagtcaaagtcagcgtgtttttcgggggactttccatcaagaaggatgaggaggtgttaaaaaaaaattgtcctcacgtggtcgtcggaacgccaggacggattctggcgctggtgcgaaacaggtcatttagcctcaagaacgtgaaacatttcgtccttgacgagtgcgacaaaatgcttgaacaactggacatgagaagggacgtgcaagagatttttcgcctgactccacatgaaaaacagtgtatgatgttttccgccacactgagtaaggacatccgaccagtatgcaggaagtttatgcaagaccccatggaggtctttgtcgatgatgagacaaagctgactctgcacggtttgcaacagtattacgtgaaactaaaagactctgaaaagaatagaaagcttttcgatcttttggacgtgctggaatttaaccaagttataatcttcgttaaaagcgtccagcgctgtatggcactggcgcaattactggttgagcagaattttcctgccattgccattcataggggaatggcccaggaagaaaggctgagccggtatcagcagttcaaagatttccaacgcagaatactcgttgctactaacctcttcgggaggggcatggacattgagagggttaatattgtcttcaattatgacatgccagaggactccgatacatacttacatagggtcgcaagggccggaaggttcggtacaaaaggtctggcgatcacattcgtttctgacgagaatgatgctaagatcttaaatgacgtgcaagacagattcgaggtgaacgtggcggaactccccgaggaaatcgacatttctacttacattgaacaatcacgatag

SEQ ID NO: 159527 - DNA, 804 bp, Artificial Sequence
  derived and/or modified sequence
atggccgaacaggacgtggaaaacgacttactggattatgatgaggaagaggagccccaggcccctcaggagtctaccccagcccctcccaagaaggacattaaaggttcatacgtctcgattcattcctccgggtttcgtgactttttactgaaaccagaactgttacgagctatagtggattgcgggttcgagcacccaagtgaggtgcagcatgaatgtatccctcaggcaatacttggtatggatgtgctctgtcaagcaaagagtggtatgggtaagactgctgtgttcgttttggcaacgcttcagcagatcgagcctgtaaacggccaggtgaccgttctggttatgtgtcacacgagagagctggccttccagatctccaaagaatacgaacgattttcaaagtacatgcctagtgtcaaggtttctgtgtttttcggcggactcagtatcaaaaaagacgaggaggtactgaagaaaaactgtcctcatgtcgtggtcggcactcccggtaggatccttgccttggtgagaaatagaagcttctctctgaagaatgttaaacactttgtgcttgatgagtgtgacaagatgctggaacagctggatatgcggagagacgtgcaggaaatttttaggctgactccccatgaaaaacagtgcatgatgttttctgccactctgagcaaggacattagaccagtctgtcggaagtttatgcaggatgtcctctgggaggtgtcccacaaaggcgttgctcattggaaagtcttggggaggcgcgatgcgcagagatag

SEQ ID NO: 159528 - DNA, 1493 bp, Artificial Sequence
  derived and/or modified sequence
ggaagcgcagcaactcgtgtctgagcgcccggcggaaaaccgaagttggaagtgtctcttagcagcgcgcggagaagaacggggagccagcatcatggcagaacaggatgtggaaaacgatcttttggattacgatgaagaggaagagccccaggctcctcaagagagcacaccagctccccctaagaaagacatcaagggatcctacgtttccatccacagctctggcttccgggactttctgctgaagccggagctcctgcgggccatcgtggactgtggctttgagcatccttctgaggtccagcatgagtgcattccccaggccatcctgggcatggacgtcctgtgccaggccaagtccgggatgggcaagacagcggtcttcgtgctggccaccctacagcagattgagcctgtcaacggacaggtgacggtcctggtcatgtgccacacgagggagctggccttccagatcagcaaggaatatgagcgcttttccaagtacatgcccagcgtcaaggtgtctgtgttcttcggtggtctctccatcaagaaggatgaagaagtgttgaagaagaactgtccccatgtcgtggtggggaccccgggccgcatcctggcgctcgtgcggaataggagcttcagcctaaagaatgtgaagcactttgtgctggacgagtgtgacaagatgctggagcagctggacatgcggcgggatgtgcaggagatcttccgcctgacaccacacgagaagcagtgcatgatgttcagcgccaccctgagcaaggacatccggcctgtgtgcaggaagttcatgcaggatcccatggaggtgtttgtggacgacgagaccaagctcacgctgcacggcctgcagcagtactacgtcaaactcaaagacagtgagaagaaccgcaagctctttgatctcttggatgtgctggagtttaaccaggtgataatcttcgtcaagtcagtgcagcgctgcatggccctggcccagctcctcgtggagcagaacttcccggccatcgccatccaccggggcatggcccaggaggagcgcctgtcacgctatcagcagttcaaggatttccagcggcggatcctggtggccaccaatctgtttggccgggggatggacatcgagcgagtcaacatcgtctttaactacgacatgcctgaggactcggacacctacctgcaccgggtggcccgggcgggtcgctttggcaccaaaggcctagccatcacttttgtgtctgacgagaatgatgccaaaatcctcaatgacgtccaggaccggtttgaagttaatgtggcagaacttccagaggaaatcgacatctccacatacatcgagcagagccggtaaccaccacgtgccagagccgcccacccggagccgcccgcatgcagcttcacctcccctttccaggcgccactgttgagaagctagagattgtatgagaataaacttgttattatgg

SEQ ID NO: 159529 - DNA, 1353 bp, Artificial Sequence
  derived and/or modified sequence
ggcggaaaaccgaagttggaagtgtctcttagcagcgcgcggagaagaacggggagccagcatcatggcagaacaggatgtggaaaacgatcttttggattacgatgaagaggaagagccccaggctcctcaagagagcacaccagctccccctaagaaagacatcaagggatcctacgtttccatccacagctctggcttccgggactttctgctgaagccggagctcctgcgggccatcgtggactgtggctttgagcatccttctgaggtccagcatgagtgcattccccaggccatcctgggcatggacgtcctgtgccaggccaagtccgggatgggcaagacagcggtcttcgtgctggccaccctacagcagattgagcctgtcaacggacaggtgacggtcctggtcatgtgccacacgagggagctggccttccagatcagcaaggaatatgagcgcttttccaagtacatgcccagcgtcaaggtgtctgtgttcttcggtggtctctccatcaagaaggatgaagaagtgttgaagaagaactgtccccatgtcgtggtggggaccccgggccgcatcctggcgctcgtgcggaataggagcttcagcctaaagaatgtgaagcactttgtgctggacgagtgtgacaagatgctggagcagctggacatgcggcgggatgtgcaggagatcttccgcctgacaccacacgagaagcagtgcatgatgttcagcgccaccctgagcaaggacatccggcctgtgtgcaggaagttcatgcaggatcccatggaggtgtttgtggacgacgagaccaagctcacgctgcacggcctgcagcagtactacgtcaaactcaaagacagtgagaagaaccgcaagctctttgatctcttggatgtgctggagtttaaccagcctgtcacgctatcagcagttcaaggatttccagcggcggatcctggtggccaccaatctgtttggccgggggatggacatcgagcgagtcaacatcgtctttaactacgacatgcctgaggactcggacacctacctgcaccgggtggcccgggcgggtcgctttggcaccaaaggcctagccatcacttttgtgtctgacgagaatgatgccaaaatcctcaatgacgtccaggaccggtttgaagttaatgtggcagaacttccagaggaaatcgacatctccacatacatcgagcagagccggtaaccaccacgtgccagagccgcccacccggagccgcccgcatgcagcttcacctcccctttccaggcgccactgttgagaagctagagattgtatgagaataaacttgttattatgg

SEQ ID NO: 159530 - DNA, 1600 bp, Artificial Sequence
  derived and/or modified sequence
atgcgctaggggtgggccagccgttggcgcgcggtgctcggggctcggggcccgcttctcggaggggctgtcatggcctacggcgctccgagccccacttggagtctgtcagttcgtccgaatagaccccgcggcggcctggggccatttggagaggttcaagtgattctcctgcctccaagtagctgggattacagcatcatggcagaacaggatgtggaaaacgatcttttggattacgatgaagaggaagagccccaggctcctcaagagagcacaccagctccccctaagaaagacatcaagggatcctacgtttccatccacagctctggcttccgggactttctgctgaagccggagctcctgcgggccatcgtggactgtggctttgagcatccttctgaggtccagcatgagtgcattccccaggccatcctgggcatggacgtcctgtgccaggccaagtccgggatgggcaagacagcggtcttcgtgctggccaccctacagcagattgagcctgtcaacggacaggtgacggtcctggtcatgtgccacacgagggagctggccttccagatcagcaaggaatatgagcgcttttccaagtacatgcccagcgtcaaggtgtctgtgttcttcggtggtctctccatcaagaaggatgaagaagtgttgaagaagaactgtccccatgtcgtggtggggaccccgggccgcatcctggcgctcgtgcggaataggagcttcagcctaaagaatgtgaagcactttgtgctggacgagtgtgacaagatgctggagcagctggacatgcggcgggatgtgcaggagatcttccgcctgacaccacacgagaagcagtgcatgatgttcagcgccaccctgagcaaggacatccggcctgtgtgcaggaagttcatgcaggatcccatggaggtgtttgtggacgacgagaccaagctcacgctgcacggcctgcagcagtactacgtcaaactcaaagacagtgagaagaaccgcaagctctttgatctcttggatgtgctggagtttaaccaggtgataatcttcgtcaagtcagtgcagcgctgcatggccctggcccagctcctcgtggagcagaacttcccggccatcgccatccaccggggcatggcccaggaggagcgcctgtcacgctatcagcagttcaaggatttccagcggcggatcctggtggccaccaatctgtttggccgggggatggacatcgagcgagtcaacatcgtctttaactacgacatgcctgaggactcggacacctacctgcaccgggtggcccgggcgggtcgctttggcaccaaaggcctagccatcacttttgtgtctgacgagaatgatgccaaaatcctcaatgacgtccaggaccggtttgaagttaatgtggcagaacttccagaggaaatcgacatctccacatacatcgagcagagccggtaaccaccacgtgccagagccgcccacccggagccgcccgcatgcagcttcacctcccctttccaggcgccactgttgagaagctagagattgtatgagaataaacttgttattatgg

SEQ ID NO: 159531 - DNA, 804 bp, Artificial Sequence
  derived and/or modified sequence
atggcagaacaggatgtggaaaacgatcttttggattacgatgaagaggaagagccccaggctcctcaagagagcacaccagctccccctaagaaagacatcaagggatcctacgtttccatccacagctctggcttccgggactttctgctgaagccggagctcctgcgggccatcgtggactgtggctttgagcatccttctgaggtccagcatgagtgcattccccaggccatcctgggcatggacgtcctgtgccaggccaagtccgggatgggcaagacagcggtcttcgtgctggccaccctacagcagattgagcctgtcaacggacaggtgacggtcctggtcatgtgccacacgagggagctggccttccagatcagcaaggaatatgagcgcttttccaagtacatgcccagcgtcaaggtgtctgtgttcttcggtggtctctccatcaagaaggatgaagaagtgttgaagaagaactgtccccatgtcgtggtggggaccccgggccgcatcctggcgctcgtgcggaataggagcttcagcctaaagaatgtgaagcactttgtgctggacgagtgtgacaagatgctggagcagctggacatgcggcgggatgtgcaggagatcttccgcctgacaccacacgagaagcagtgcatgatgttcagcgccaccctgagcaaggacatccggcctgtgtgcaggaagttcatgcaggatgtcctctgggaagtgtcgcacaaaggagtcgcccactggaaggttctgggcaggcgagatgcccagaggtga

SEQ ID NO: 159532 - DNA, 1284 bp, Artificial Sequence
  derived and/or modified sequence
atggccgagcaggacgtggagaacgacctgctggactacgacgaggaggaggagccccaggccccccaggagagcacccccgccccccccaagaaggacatcaagggcagctacgtgagcatccacagcagcggcttcagagacttcctgctgaagcccgagctgctgagagccatcgtggactgcggcttcgagcaccccagcgaggtgcagcacgagtgcatcccccaggccatcctgggcatggacgtgctgtgccaggccaagagcggcatgggcaagaccgccgtgttcgtgctggccaccctgcagcagatcgagcccgtgaacggccaggtgaccgtgctggtgatgtgccacaccagagagctggccttccagatcagcaaggagtacgagagattcagcaagtacatgcccagcgtgaaggtgagcgtgttcttcggcggcctgagcatcaagaaggacgaggaggtgctgaagaagaactgcccccacgtggtggtgggcacccccggcagaatcctggccctggtgagaaacagaagcttcagcctgaagaacgtgaagcacttcgtgctggacgagtgcgacaagatgctggagcagctggacatgagaagagacgtgcaggagatcttcagactgaccccccacgagaagcagtgcatgatgttcagcgccaccctgagcaaggacatcagacccgtgtgcagaaagttcatgcaggaccccatggaggtgttcgtggacgacgagaccaagctgaccctgcacggcctgcagcagtactacgtgaagctgaaggacagcgagaagaacagaaagctgttcgacctgctggacgtgctggagttcaaccaggtgatcatcttcgtgaagagcgtgcagagatgcatggccctggcccagctgctggtggagcagaacttccccgccatcgccatccacagaggcatggcccaggaggagagactgagcagataccagcagttcaaggacttccagagaagaatcctggtggccaccaacctgttcggcagaggcatggacatcgagagagtgaacatcgtgttcaactacgacatgcccgaggacagcgacacctacctgcacagagtggccagagccggcagattcggcaccaagggcctggccatcaccttcgtgagcgacgagaacgacgccaagatcctgaacgacgtgcaggacagattcgaggtgaacgtggccgagctgcccgaggagatcgacatcagcacctacatcgagcagagcagatag

SEQ ID NO: 159533 - DNA, 969 bp, Artificial Sequence
  derived and/or modified sequence
atggccgagcaggacgtggagaacgacctgctggactacgacgaggaggaggagccccaggccccccaggagagcacccccgccccccccaagaaggacatcaagggcagctacgtgagcatccacagcagcggcttcagagacttcctgctgaagcccgagctgctgagagccatcgtggactgcggcttcgagcaccccagcgaggtgcagcacgagtgcatcccccaggccatcctgggcatggacgtgctgtgccaggccaagagcggcatgggcaagaccgccgtgttcgtgctggccaccctgcagcagatcgagcccgtgaacggccaggtgaccgtgctggtgatgtgccacaccagagagctggccttccagatcagcaaggagtacgagagattcagcaagtacatgcccagcgtgaaggtgagcgtgttcttcggcggcctgagcatcaagaaggacgaggaggtgctgaagaagaactgcccccacgtggtggtgggcacccccggcagaatcctggccctggtgagaaacagaagcttcagcctgaagaacgtgaagcacttcgtgctggacgagtgcgacaagatgctggagcagctggacatgagaagagacgtgcaggagatcttcagactgaccccccacgagaagcagtgcatgatgttcagcgccaccctgagcaaggacatcagacccgtgtgcagaaagttcatgcaggaccccatggaggtgttcgtggacgacgagaccaagctgaccctgcacggcctgcagcagtactacgtgaagctgaaggacagcgagaagaacagaaagctgttcgacctgctggacgtgctggagttcaaccagcccgtgaccctgagcgccgtgcagggcttccccgccgccgaccccggcggccaccagagcgtgtggcccggcgacggccacagagccagccagcacagactgtag

SEQ ID NO: 159534 - DNA, 1413 bp, Artificial Sequence
  derived and/or modified sequence
atggcctacggcgcccccagccccacctggagcctgagcgtgagacccaacagacccagaggcggcctgggccccttcggcgaggtgcaggtgatcctgctgccccccagcagctgggactacagcatcatggccgagcaggacgtggagaacgacctgctggactacgacgaggaggaggagccccaggccccccaggagagcacccccgccccccccaagaaggacatcaagggcagctacgtgagcatccacagcagcggcttcagagacttcctgctgaagcccgagctgctgagagccatcgtggactgcggcttcgagcaccccagcgaggtgcagcacgagtgcatcccccaggccatcctgggcatggacgtgctgtgccaggccaagagcggcatgggcaagaccgccgtgttcgtgctggccaccctgcagcagatcgagcccgtgaacggccaggtgaccgtgctggtgatgtgccacaccagagagctggccttccagatcagcaaggagtacgagagattcagcaagtacatgcccagcgtgaaggtgagcgtgttcttcggcggcctgagcatcaagaaggacgaggaggtgctgaagaagaactgcccccacgtggtggtgggcacccccggcagaatcctggccctggtgagaaacagaagcttcagcctgaagaacgtgaagcacttcgtgctggacgagtgcgacaagatgctggagcagctggacatgagaagagacgtgcaggagatcttcagactgaccccccacgagaagcagtgcatgatgttcagcgccaccctgagcaaggacatcagacccgtgtgcagaaagttcatgcaggaccccatggaggtgttcgtggacgacgagaccaagctgaccctgcacggcctgcagcagtactacgtgaagctgaaggacagcgagaagaacagaaagctgttcgacctgctggacgtgctggagttcaaccaggtgatcatcttcgtgaagagcgtgcagagatgcatggccctggcccagctgctggtggagcagaacttccccgccatcgccatccacagaggcatggcccaggaggagagactgagcagataccagcagttcaaggacttccagagaagaatcctggtggccaccaacctgttcggcagaggcatggacatcgagagagtgaacatcgtgttcaactacgacatgcccgaggacagcgacacctacctgcacagagtggccagagccggcagattcggcaccaagggcctggccatcaccttcgtgagcgacgagaacgacgccaagatcctgaacgacgtgcaggacagattcgaggtgaacgtggccgagctgcccgaggagatcgacatcagcacctacatcgagcagagcagatag

SEQ ID NO: 159535 - DNA, 804 bp, Artificial Sequence
  derived and/or modified sequence
atggccgagcaggacgtggagaacgacctgctggactacgacgaggaggaggagccccaggccccccaggagagcacccccgccccccccaagaaggacatcaagggcagctacgtgagcatccacagcagcggcttcagagacttcctgctgaagcccgagctgctgagagccatcgtggactgcggcttcgagcaccccagcgaggtgcagcacgagtgcatcccccaggccatcctgggcatggacgtgctgtgccaggccaagagcggcatgggcaagaccgccgtgttcgtgctggccaccctgcagcagatcgagcccgtgaacggccaggtgaccgtgctggtgatgtgccacaccagagagctggccttccagatcagcaaggagtacgagagattcagcaagtacatgcccagcgtgaaggtgagcgtgttcttcggcggcctgagcatcaagaaggacgaggaggtgctgaagaagaactgcccccacgtggtggtgggcacccccggcagaatcctggccctggtgagaaacagaagcttcagcctgaagaacgtgaagcacttcgtgctggacgagtgcgacaagatgctggagcagctggacatgagaagagacgtgcaggagatcttcagactgaccccccacgagaagcagtgcatgatgttcagcgccaccctgagcaaggacatcagacccgtgtgcagaaagttcatgcaggacgtgctgtgggaggtgagccacaagggcgtggcccactggaaggtgctgggcagaagagacgcccagagatag

SEQ ID NO: 159536 - DNA, 1337 bp, Artificial Sequence
  derived and/or modified sequence
ttcgtcgctgttgctgccgccatacgcgctctccctgtttagctcttctgttagaaatagtatctttgttttcctttgctgttcctcaatcccctactcttcaccccttgttttcacctattttgcgagaacccatccagatcccccttcccttcttcccctgccggcccagttatggcagagaacgatgtggacaatgagctcttggactatgaagatgatgaggtggagacagcagctgggggagatggggctgaggcccctgccaagaaggatgtcaagggctcctatgtctccatccacagctctggctttcgtgacttcctgctcaagccagagttgctccgggccattgtcgactgtggctttgagcatccgtcagaaggtgtctgtactggtgatgtgtcacactcgggagttggcttttcagatcagcaaggaatatgagcgcttctctaaatacatgcccaatgtcaaggttgctgttttttttggtggtctgtctatcaagaaggatgaagaggtgctgaagaagaactgcccgcatatcgtcgtggggactccaggccgtatcctagccctggctcgaaataagagcctcaacctcaaacacattaaacactttattttggatgaatgtgataagatgcttgaacagctcgacatgcgtcgggatgtccaggaaatttttcgcatgaccccccacgagaagcaggtcatgatgttcagtgctaccttgagcaaagagatccgtccagtctgccgcaagttcatgcaagatgtaaatacccttctaccttctctccctccactccccgcccgctgcctcctccccttcctcgccctcttcctcagactcccttgtcattcaagtgccaagaaggcggcttgtgcccaactgggagtaatgactccttgaagagacatacagaagcagagacagctagtgttagggcctgcgcgggtgccagggaaactccggaagacttggtcgggttaatgtgagagcgggtagtgttcgactttttcataaatcacaacatttttgaacctcttctccctttgggggagggcaggatttttctgccctaccacccacccatccatcgtctcttacatgcaccctacagccacgcaccctcaaggtggcatcgagcgtacagctggagccttctgctcaccaaaactcctacttcccggtggcaggagagcaagagagggacagacagatggcagggcatgtccaaaagaagagcatcagcacaaatgaatcctccccttccccacctccaggggtgggggcctttggcacctcaatccccgataccctactcctt

SEQ ID NO: 159537 - DNA, 1337 bp, Artificial Sequence
  derived and/or modified sequence
ttcgtcgctgttgctgccgccatacgcgctctccctgtttagctcttctgttagaaatagtatctttgttttcctttgctgttcctcaatcccctactcttcaccccttgttttcacctattttgcgagaacccatccagatcccccttcccttcttcccctgccggcccagttatggcagagaacgatgtggacaatgagctcttggactatgaagatgatgaggtggagacagcagctgggggagatggggctgaggcccctgccaagaaggatgtcaagggctcctatgtctccatccacagctctggctttcgtgacttcctgctcaagccagagttgctccgggccattgtcgactgtggctttgagcatccgtcagaaggtgtctgtgctggtgatgtgtcacactcgggagttggcttttcagatcagcaaggaatatgagcgcttctctaaatacatgcccaatgtcaaggttgctgttttttttggtggtctgtctatcaagaaggatgaagaggtgctgaagaagaactgcccgcatatcgtcgtggggactccaggccgtatcctagccctggctcgaaataagagcctcaacctcaaacacattaaacactttattttggatgaatgtgataagatgcttgaacagctcgacatgcgtcgggatgtccaggaaatttttcgcatgaccccccacgagaagcaggtcatgatgttcagtgctaccttgagcaaagagatccgtccagtctgccgcaagttcatgcaagatgtaaatacccttctaccttctctccctccactccccgcccgctgcctcctccccttcctcgccctcttcctcagactcccttgtcattcaagtgccaagaaggcggcttgtgcccaactgggagtaatgactccttgaagagacatacagaagcagagacagctagtgttagggcctgcgcgggtgccagggaaactccggaagacttggtcgggttaatgtgagagcgggtagtgttcgactttttcataaatcacaacatttttgaacctcttctcccttcgggggagggcaggatttttctgccctaccacccacccatccatcgtctcttacatgcaccctacagccacgcaccctcaaggtggcatcgagcatacagctggagccttctgctcaccaaaactcctacttcccggtggcaggagagcaagagagggacagacagatggcagggcatgtccaaaagaagagcatcagcacaaatgaatcctccccttccccacctccaggggtgggggcctttggcacctcaatccccgataccctactcctt

SEQ ID NO: 159538 - protein, 310 aa, Artificial Sequence
  derived and/or modified sequence
MDRLLRLGGGMPGLGQGPPTDAPAVDTAEQVYISSLALLKMLKHGRAGVPMEVMGLMLGEFVDDYTVRVIDVFAMPQSGTGVSVEAVDPVFQAKMLDMLKQTGRPEMVVGWYHSHPGFGCWLSGVDINTQQSFEALSERAVAVVVDPIQSVKGKVVIDAFRLINANMMVLGHEPRQTTSNLGHLNKPSIQALIHGLNRHYYSITINYRKNELEQKMLLNLHKKSWMEGLTLQDYSEHCKHNESVVKEMLELAKNYNKAVEEEDKMTPEQLAIKNVGKQDPKRHLEEHVDVLMTSNIVQCLAAMLDTVVFK

SEQ ID NO: 159539 - protein, 84 aa, Artificial Sequence
  derived and/or modified sequence
MDRLLRLGGGMPGLGQGPPTDAPAVDTAEQVYISSLALLKMLKHGRAGVPMEVMGLMLGEFVDDYTVRVIDVFAMPQSGTGVSV

SEQ ID NO: 159540 - DNA, 933 bp, Artificial Sequence
  derived and/or modified sequence
atggaccgactcctcaggctcggcggagggatgcccggtctaggacagggcccaccgacagatgctccagccgtggatacagcagagcaagtgtacattagttccctggccttattgaagatgctgaaacacggtagggccggggttccaatggaggtgatgggcttaatgctgggagagtttgtggacgattatacagtcagggtcatcgacgtcttcgccatgccccagtcgggcacaggggtatcggtggaggcggtcgacccagtgttccaggcaaaaatgctggacatgctgaagcagacaggcagacccgaaatggtggttggctggtaccactcccaccccggatttggatgctggctttccggggtcgatattaatacacagcagtctttcgaagccctttctgaaagggcagtggctgttgttgtggaccctattcaaagtgtcaaaggaaaggtggtcatcgatgcctttagactgatcaatgccaacatgatggtattaggacatgaacctagacagacgacatccaatctgggccacctcaataaaccctccatacaggctcttatacacgggcttaataggcattactactctataactatcaactatcggaaaaacgaactagagcagaaaatgttgctgaatttgcacaagaaaagctggatggagggtttgaccctccaggattacagcgagcactgtaaacacaacgaatccgtggtgaaggagatgctcgagctggccaagaattacaataaagctgttgaagaggaggataaaatgacccccgagcagctggctatcaaaaacgttggaaagcaggacccgaaaaggcatctggaggagcatgtggatgtcctgatgacctcaaacattgtccagtgtctcgccgcgatgctggacaccgttgtgttcaaatag

SEQ ID NO: 159541 - DNA, 255 bp, Artificial Sequence
  derived and/or modified sequence
atggatcgcctgcttagactcggaggaggcatgccaggactcggccaaggccctcctaccgacgcacctgccgtggatactgccgagcaggtgtatatcagctccctggctctgttgaagatgttgaaacacggacgtgcgggcgttcccatggaagttatgggcctcatgttgggagagtttgtggatgattatactgtgcgcgttatcgacgttttcgccatgccacagtccggcacaggcgtgtccgtgtag

SEQ ID NO: 159542 - DNA, 933 bp, Artificial Sequence
  derived and/or modified sequence
atggaccggctgctgcggctgggcggcggcatgcctggcctgggccagggccccccaacagatgccccagctgtggacacagctgagcaggtgtacatcagcagcctggccctgctgaagatgctgaagcacggccgggccggcgtgcccatggaggtgatgggcctgatgctgggggagtttgtggatgactacacagtgcgggtgattgatgtgtttgccatgccccagagcggcaccggggtgtctgtggaggccgtggaccctgtgttccaggccaagatgctggacatgctgaagcagacaggccggcctgagatggtggtgggctggtaccacagccaccctggcttcggctgctggctgtctggagtggacatcaacacccagcagagctttgaggccctgtctgaaagagctgtggccgtggtggtggaccccatccagagcgtgaagggcaaggtggtgattgatgccttccgcctcatcaatgccaacatgatggtgctgggccacgagccccggcagaccaccagcaacctgggccacctgaacaagcccagcatccaggccctgatccacggcctgaacagacactactacagcatcaccatcaactacaggaagaatgagctggagcagaagatgctgctgaacctgcacaagaagtcctggatggagggcctgaccctgcaggactacagcgagcactgcaagcacaatgaatctgtggtgaaggagatgctggagctggccaagaactacaacaaggctgtggaggaggaggacaagatgaccccagagcagctggccatcaagaatgtgggcaagcaggaccccaagaggcacctggaggagcacgtggatgtgctgatgaccagcaacatcgtgcagtgcctggccgccatgctggacacagtggtgttcaagtag

SEQ ID NO: 159543 - DNA, 255 bp, Artificial Sequence
  derived and/or modified sequence
atggaccggctgctgcggctgggcggcggcatgcctggcctgggccagggccccccaacagatgccccagctgtggacacagctgagcaggtgtacatcagcagcctggccctgctgaagatgctgaagcacggccgggccggcgtgcccatggaggtgatgggcctgatgctgggggagtttgtggatgactacacagtgcgggtgattgatgtgtttgccatgccccagagcggcaccggggtgtctgtgtag

SEQ ID NO: 159544 - DNA, 933 bp, Artificial Sequence
  derived and/or modified sequence
atggaccggctgctgcggctgggcggcggcatgcccggcctgggccagggtccccctactgacgctcccgcagtcgatactgccgagcaggtgtacatctcatctcttgctcttcttaagatgctgaagcacggcagggccggcgtgccgatggaggttatgggattgatgctcggtgagttcgtggacgattataccgtgagagtgatcgacgtgttcgccatgccgcaaagtggcacaggcgtcagcgtggaggcagtggacccggtatttcaggctaagatgcttgacatgcttaagcagaccggccggcccgaaatggttgtagggtggtatcatagccaccctgggttcggttgctggttgtccggagtggatattaacacccagcagtcattcgaagctctgtcggaaagggccgttgcggtggtggtagaccccatccaatctgttaagggtaaggtcgttattgatgccttccgcctgattaacgctaatatgatggtattagggcatgaacccagacagaccaccagcaacctgggccacctcaataagccttccattcaggccttgatccacggtctcaaccggcactactactcaatcaccattaattacaggaaaaacgagctggagcagaaaatgttgctgaatctgcacaaaaagagctggatggaaggtctcactctgcaggattactcagagcactgtaagcataacgagagtgttgtgaaggagatgcttgagcttgcaaagaattataacaaagctgtcgaagaagaggataagatgacccctgaacaattggccatcaaaaatgtgggcaaacaagaccctaagaggcacctggaagaacacgtggatgtgctgatgacctccaacattgttcagtgtcttgcagccatgctggatacagtcgtgtttaaatag

SEQ ID NO: 159545 - DNA, 255 bp, Artificial Sequence
  derived and/or modified sequence
atggaccggctgctgcggctgggcggcggcatgcccggcctgggccagggccctccaactgatgctccggcagtggatacagcagagcaggtgtacatctccagtttagcgcttctgaagatgcttaaacacgggcgagccggcgttcctatggaggtgatggggctgatgcttggggagtttgtcgatgactacacagtgagggtgattgatgtttttgcaatgccccagtccggaaccggagtctctgtttag

SEQ ID NO: 159546 - DNA, 933 bp, Artificial Sequence
  derived and/or modified sequence
atggataggctactgcgactcggcggaggtatgccaggactgggccagggtccgcctacagatgccccagcggtcgacactgccgaacaggtgtacatctccagcctcgcccttttgaagatgctgaagcacggcagagccggagtgccgatggaagtcatgggtttaatgctgggtgaattcgtggatgactacactgtgcgagtgatagatgtattcgccatgcctcagtctggcaccggggtttccgttgaagctgtcgatcctgtatttcaagcaaaaatgctggacatgctcaaacagacaggacgtccagagatggtggtcggatggtatcactcacatcccggattcgggtgttggctgtcaggtgtcgatattaatacccagcagagtttcgaggcgctatctgagagagccgtggccgttgttgtcgaccctatacagtcagtcaagggcaaagtcgttatagatgcctttcggctcataaatgccaatatgatggtgctgggtcatgagccgagacagaccacttctaacttgggacacctcaataaaccatcgattcaggccttaattcatgggcttaatagacactactacagtataacaattaactacaggaaaaacgagttggagcagaagatgctgctgaacctgcacaagaagtcctggatggaaggccttacccttcaggactactcagaacattgtaagcataacgagtcagtggttaaggagatgttggagctggccaagaattataacaaggcagtcgaggaagaagacaaaatgacgcctgagcaactggcaatcaaaaatgtcggcaaacaggacccaaagagacacttagaagagcacgtggacgtgctgatgacctcgaacattgttcagtgccttgccgctatgctcgataccgttgtgtttaagtag

SEQ ID NO: 159547 - DNA, 255 bp, Artificial Sequence
  derived and/or modified sequence
atggaccgactgctgaggctcggtggaggcatgcctggattgggccaaggcccaccgacagacgccccagccgtcgacacggccgagcaggtctatattagctctcttgcactcttgaagatgttaaaacacggcagagcaggtgtgcctatggaagtcatgggcttaatgttgggagaatttgtcgacgactatacagtgcgagtcattgatgtctttgcaatgccccagtctgggaccggagtgtctgtgtag

SEQ ID NO: 159548 - DNA, 1954 bp, Artificial Sequence
  derived and/or modified sequence
agataaccaagttaaatctagctcaaatgaaccttttagtttttgaggagggcaataatagtagtgaacaccaaaacgaaaggggatctgggcttcaaaatactaacagttctatttcctagccagtcgtctcccgggctggatgtgccgccgtcccagatctcagcggcggccgcagagcgcagaggtagggagagaaaaaggaggcgtcggcggggcgcgagcgaccagggcgctaagtgccgcctcacagtcctgccagagacaggagacgccgggccgcccgcgccgtctgtcccaagagctcctcctggacatccgcttgactctccgtcgtctccaattggccgtcggggaacggaagccgaagcaaactagtgaacccggaagtgcttcgcggcggaggcccgggcaactcttttgaatggaatcgggctgattcatcgccggtttgcagacagagccgcgtcgggtgtgcgccgctgctgctgttgcctctgtcttcgcgtcaccacagaggcaagacaagggtccatatcgcggcatccggctcccgcccgtcttcaggagagaaagaaaaaataaaatatacttggggaagttgtacctgccagaattagcaagagctttctttaagaagacatttgtcaaactcaacaaattgaaggttaacaccttaagagttgtagttactgaccagaaatatggacagacttcttagacttggaggaggtatgcctggactgggccaggggccacctacagatgctcctgcagtggacacagcagaacaagtctatatctcttccctggcactgttaaaaatgttaaaacatggccgtgctggagttccaatggaagttatgggtttgatgcttggagaatttgttgatgattataccgtcagagtgattgatgtgtttgctatgccacagtcaggaacaggtgtcagtgtggaggcagttgatccagtgttccaagctaaaatgttggatatgttgaagcagacaggaaggccggagatggttgttggttggtatcacagtcaccctggctttggttgttggctttctggtgtggatatcaacactcagcagagctttgaagccttgtcggagagagctgtggcagtggttgtggatcccattcagagtgtaaaaggaaaggttgttattgatgccttcagattgatcaatgctaatatgatggtcttaggacatgaaccaagacaaacaacttcgaatctgggtcacttaaacaagccatctatccaggcattaattcatggactaaacagacattattactccattactattaactatcggaaaaatgaactggaacagaagatgttgctaaatttgcataagaagagttggatggaaggtttgacacttcaggactacagtgaacattgtaaacacaatgaatcagtggtaaaagagatgttggaattagccaagaattacaataaggctgtagaagaagaagataagatgacacctgaacagctggcaataaagaatgttggcaagcaggaccccaaacgtcatttggaggaacatgtggatgtacttatgacctcaaatattgtccagtgtttagcagctatgttggatactgtcgtatttaaataaagcaacgaaaaacgctattaatgatgccttcagtgtatattcctctgttgttcctaatgctcaaaatcaagggacctctgaaggtgtacttggctaaatgtaagacatctggcatcatttgcagcactgtaacaccttcagtctcagttgtgcaattacttctgtttctttagtcagggtctttgcagattctaaagttatacatgaatacatcaaagtggacaaattttgttaagatcccatttaatatttgaaaaaatcagtagcacaaatatattttgattgtcacttacaaaataaaatacatttacagtcta

SEQ ID NO: 159549 - DNA, 577 bp, Artificial Sequence
  derived and/or modified sequence
ttcaggtaagacccagaaggcaggcctgggaggtctggggaggcagccgtgctaggccgccgccagccccgtgctttcctgagtcacgttgcccagctgagttgccacaggaggcctgggccgcgagggaggagcccggcctccttcattctcttcgcctgctctcagggctctctggcagggtcaggagagaaagaaaaaataaaatatacttggggaagttgtacctgccagaattagcaagagctttctttaagaagacatttgtcaaactcaacaaattgaaggttaacaccttaagagttgtagttactgaccagaaatatggacagacttcttagacttggaggaggtatgcctggactgggccaggggccacctacagatgctcctgcagtggacacagcagaacaagtctatatctcttccctggcactgttaaaaatgttaaaacatggccgtgctggagttccaatggaagttatgggtttgatgcttggagaatttgttgatgattataccgtcagagtgattgatgtgtttgctatgccacagtcaggaacaggtgtcagtgtgg

SEQ ID NO: 159550 - DNA, 933 bp, Artificial Sequence
  derived and/or modified sequence
atggacagactgctgagactgggcggcggcatgcccggcctgggccagggcccccccaccgacgcccccgccgtggacaccgccgagcaggtgtacatcagcagcctggccctgctgaagatgctgaagcacggcagagccggcgtgcccatggaggtgatgggcctgatgctgggcgagttcgtggacgactacaccgtgagagtgatcgacgtgttcgccatgccccagagcggcaccggcgtgagcgtggaggccgtggaccccgtgttccaggccaagatgctggacatgctgaagcagaccggcagacccgagatggtggtgggctggtaccacagccaccccggcttcggctgctggctgagcggcgtggacatcaacacccagcagagcttcgaggccctgagcgagagagccgtggccgtggtggtggaccccatccagagcgtgaagggcaaggtggtgatcgacgccttcagactgatcaacgccaacatgatggtgctgggccacgagcccagacagaccaccagcaacctgggccacctgaacaagcccagcatccaggccctgatccacggcctgaacagacactactacagcatcaccatcaactacagaaagaacgagctggagcagaagatgctgctgaacctgcacaagaagagctggatggagggcctgaccctgcaggactacagcgagcactgcaagcacaacgagagcgtggtgaaggagatgctggagctggccaagaactacaacaaggccgtggaggaggaggacaagatgacccccgagcagctggccatcaagaacgtgggcaagcaggaccccaagagacacctggaggagcacgtggacgtgctgatgaccagcaacatcgtgcagtgcctggccgccatgctggacaccgtggtgttcaagtag

SEQ ID NO: 159551 - DNA, 255 bp, Artificial Sequence
  derived and/or modified sequence
atggacagactgctgagactgggcggcggcatgcccggcctgggccagggcccccccaccgacgcccccgccgtggacaccgccgagcaggtgtacatcagcagcctggccctgctgaagatgctgaagcacggcagagccggcgtgcccatggaggtgatgggcctgatgctgggcgagttcgtggacgactacaccgtgagagtgatcgacgtgttcgccatgccccagagcggcaccggcgtgagcgtgtag

SEQ ID NO: 159552 - protein, 1404 aa, Artificial Sequence
  derived and/or modified sequence
MAWKTLPIYLLLLLSVFVIQQVSSQDLSSCAGRCGEGYSRDATCNCDYNCQHYMECCPDFKRVCTAELSCKGRCFESFERGRECDCDAQCKKYDKCCPDYESFCAEVHNPTSPPSSKKAPPPSGASQTIKSTTKRSPKPPNKKKTKKVIESEEITEEHSVSENQESSSSSSSSSSSSTIRKIKSSKNSAANRELQKKLKVKDNKKNRTKKKPTPKPPVVDEAGSGLDNGDFKVTTPDTSTTQHNKVSTSPKITTAKPINPRPSLPPNSDTSKETSLTVNKETTVETKETTTTNKQTSTDGKEKTTSAKETQSIEKTSAKDLAPTSKVLAKPTPKAETTTKGPALTTPKEPTPTTPKEPASTTPKEPTPTTIKSAPTTPKEPAPTTTKSAPTTPKEPAPTTTKEPAPTTPKEPAPTTTKEPAPTTTKSAPTTPKEPAPTTPKKPAPTTPKEPAPTTPKEPTPTTPKEPAPTTKEPAPTTPKEPAPTAPKKPAPTTPKEPAPTTPKEPAPTTTKEPSPTTPKEPAPTTTKSAPTTTKEPAPTTTKSAPTTPKEPSPTTTKEPAPTTPKEPAPTTPKKPAPTTPKEPAPTTPKEPAPTTTKKPAPTTPKEPAPTTPKETAPTTPKKLTPTTPEKLAPTTPEKPAPTTPEELAPTTPEEPTPTTPEEPAPTTPKAAAPNTPKEPAPTTPKEPAPTTPKEPAPTTPKETAPTTPKGTAPTTLKEPAPTTPKKPAPKELAPTTTKEPTSTTCDKPAPTTPKGTAPTTPKEPAPTTPKEPAPTTPKGTAPTTLKEPAPTTPKKPAPKELAPTTTKGPTSTTSDKPAPTTPKETAPTTPKEPAPTTPKKPAPTTPETPPPTTSEVSTPTTTKEPTTIHKSPDESTPELSAEPTPKALENSPKEPGVPTTKTPAATKPEMTTTAKDKTTERDLRTTPETTTAAPKMTKETATTTEKTTESKITATTTQVTSTTTQDTTPFKITTLKTTTLAPKVTTTKKTITTTEIMNKPEETAKPKDRATNSKATTPKPQKPTKAPKKPTSTKKPKTMPRVRKPKTTPTPRKMTSTMPELNPTSRIAEAMLQTTTRPNQTPNSKLVEVNPKSEDAGGAEGETPHMLLRPHVFMPEVTPDMDYLPRVPNQGIIINPMLSDETNICNGKPVDGLTTLRNGTLVAFRGHYFWMLSPFSPPSPARRITEVWGIPSPIDTVFTRCNCEGKTFFFKDSQYWRFTNDIKDAGYPKPIFKGFGGLTGQIVAALSTAKYKNWPESVYFFKRGGSIQQYIYKQEPVQKCPGRRPALNYPVYGETTQVRRRRFERAIGPSQTHTIRIQYSPARLAYQDKGVLHNEVKVSILWRGLPNVVTSAISLPNIRKPDGYDYYAFSKDQYYNIDVPSRTARAITTRSGQTLSKVWYNCP

SEQ ID NO: 159553 - protein, 265 aa, Artificial Sequence
  derived and/or modified sequence
MDGPAIITQVTNPKEDEGRLPGAGEKASQCNVSLKKQRSRSILSSFFCCFRDYNVEAPPPSSPSVLPPLVEENGGLQKPPAKYLLPEVTVLDYGKKCVVIDLDETLVHSSFKPISNADFIVPVEIDGTIHQVYVLKRPHVDEFLQRMGQLFECVLFTASLAKYADPVADLLDRWGVFRARLFRESCVFHRGNYVKDLSRLGRELSKVIIVDNSPASYIFHPENAVPVQSWFDDMTDTELLDLIPFFEGLSREDDVYSMLHRLCNR

SEQ ID NO: 159554 - DNA, 798 bp, Artificial Sequence
  derived and/or modified sequence
atggatggcccagctatcattactcaagtcaccaatcccaaagaggatgagggcaggctgcctggagcaggcgaaaaagcctctcaatgtaatgtgagtctgaagaagcagcgctccagatctattctctcgtcattcttctgctgttttcgcgactataatgtggaggccccccccccatcctctccctcagtgctacctccgctagtcgaagagaacgggggcctgcagaaaccgcccgccaaatatctcctgcccgaagtcaccgtgctcgactacggaaagaagtgtgtggtgattgaccttgatgagaccctggtacactcatcctttaagcccattagcaatgccgacttcatcgtccccgtcgagattgacggcacaattcatcaggtttacgtactcaagcggccccatgtggacgagttcctccagcgtatggggcagttgttcgagtgcgttttgttcacagcttcattggcaaaatatgctgatcccgtagccgacctccttgataggtggggggtcttccgggctcgtttgttccgtgaatcctgcgttttccacagaggcaattacgtgaaggatttatctcggctgggcagagagctatcgaaggtcataattgtggacaactcaccagcaagctatatctttcatcctgagaacgcagttccagtccaatcgtggtttgacgacatgacagataccgagttgctagacctgatccccttcttcgagggactaagtcgtgaagatgacgtatattccatgctacaccggctctgtaacagatag

SEQ ID NO: 159555 - DNA, 798 bp, Artificial Sequence
  derived and/or modified sequence
atggatggccctgccatcatcacccaggtgaccaaccccaaggaggatgagggccgcctgcctggagctggggagaaggccagccagtgcaatgtgtccctgaagaagcagaggagccgcagcatcctgagcagcttcttctgctgcttccgggactacaacgtggaggcccccccacccagcagccccagcgtgctgccccccctggtggaggagaatggaggcctgcagaagcccccagccaagtacctgctgcctgaggtgacagtgctggactatggcaagaagtgtgtggtgattgacctggatgagaccctggtgcacagcagcttcaagcccatcagcaatgctgacttcatcgtgcctgtggagattgatggcaccatccaccaggtgtatgtgctgaagaggcctcatgtggatgagttcctgcagaggatgggccagctgtttgaatgtgtgctcttcaccgccagcctggccaagtatgctgaccctgtggccgacctgctggaccgctggggcgtcttccgggcccggctcttccgggagagctgtgtgttccaccggggcaactacgtgaaggacctgagccggctgggccgggagctgagcaaggtgatcatcgtggacaacagccctgccagctacatcttccacccagaaaatgctgtgcctgtgcagagctggtttgatgacatgacagacacagagctgctggacctgatccccttctttgagggcctgagccgggaggatgatgtgtacagcatgctgcaccggctgtgcaacagatag

SEQ ID NO: 159556 - DNA, 798 bp, Artificial Sequence
  derived and/or modified sequence
atggacggccccgccatcatcacccaggtgaccaaccccaaggaggacgaaggtcgcctgccgggggccggagagaaggcctcacaatgcaatgtctcattgaagaaacagcggagtcgaagcatcttgtccagcttcttctgttgctttcgagattacaacgtagaagccccgccgcccagttccccctccgtgctgccccctctcgtggaagaaaacggcggcctgcagaagccacctgcaaaatatcttctgcccgaagtgaccgttctggattatgggaagaaatgtgtagtaattgacctggatgaaactcttgtacactccagctttaagccaatcagcaatgctgactttatcgtgccggtggagatcgacggaaccatacatcaagtatatgtcctgaagagaccacacgtggatgaatttctccagcgaatgggccagctgttcgaatgcgttttattcacagcttccctagccaagtacgccgaccctgttgcagaccttctcgatcggtggggagtttttagggcacggctcttccgagagtcttgtgtgttccacagaggcaactacgtgaaggatctgtctcgtttgggtcgggaattaagcaaggtgattattgtggataattcccccgccagctatatcttccacccggagaatgcggtgcctgtccagtcgtggtttgacgatatgaccgacacagaactgttggatctgataccgttttttgagggccttagccgggaggacgacgtgtacagcatgctccacaggctgtgtaatcgctag

SEQ ID NO: 159557 - DNA, 798 bp, Artificial Sequence
  derived and/or modified sequence
atggacggccctgccatcatcacacaggtgacaaatcctaaagaagacgaggggagactgccaggagccggagagaaagctagccagtgcaacgtgagcctcaaaaaacagaggagcagatccatcctgagttcatttttctgctgtttccgggattataacgttgaagcccctccgccatcaagcccaagcgtcttaccaccattggtggaggagaatggaggcttacagaagccccctgccaaatatctgctgccagaagtgactgtactcgattacggtaaaaagtgtgtcgtaatcgatctggatgagacattagttcacagttcttttaaaccaattagcaatgccgacttcatcgtgcccgtggagatcgacggcacgatccaccaggtgtacgtcctgaagaggcctcacgtggacgagttcttgcagaggatgggacagctgtttgaatgcgtactgtttaccgcgtctctcgccaagtatgcagacccggtagcagacctcctcgacagatggggtgtgttccgcgctagactcttcagagaaagttgtgtgttccaccggggtaattacgtcaaggacctgtcgcgattggggagagagctcagcaaagttatcattgtcgataacagtcctgcctcatatatatttcatcccgagaatgcagtcccagtgcagtcctggttcgacgatatgactgacaccgagctgctcgacctgatccctttcttcgaagggctttctagggaggatgatgtttactcaatgttgcaccggctttgtaaccgctag

SEQ ID NO: 159558 - DNA, 4640 bp, Artificial Sequence
  derived and/or modified sequence
cgcggctccggggttcatggtgacgaggcggcggccgctcgagcccagcggcggcggcggcgggagctggggcgcgggcccgggccgcctctcccagagcgcggggccgggcggcgggcgcgcccaggcagcggctgcgagcgcccccccgcgccgcgcccccgcgccccccgcgccgcgcccccgcgcgcttggcttgcggggggccgggcctgcgggcggccgccgcgccgcgcacccatggacggcccggccatcatcacccaggtgaccaaccccaaggaggacgagggccggttgccgggcgcgggcgagaaagcctcccagtgcaacgtcagcttaaagaagcagaggagccgcagcatccttagctccttcttctgctgcttccgtgattacaatgtggaggcccctccacccagcagccccagtgtgcttccgccactggtggaggagaatggtgggcttcagaagccaccagctaagtaccttcttccagaggtgacggtgcttgactatggaaagaaatgtgtggtcattgatttagatgaaacattggtgcacagttcgtttaagcctattagtaatgctgattttattgttccggttgaaatcgatggaactatacatcaggtgtatgtgctgaagcggccacatgtggacgagttcctccagaggatggggcagctttttgaatgtgtgctctttactgccagcttggccaagtatgcagaccctgtggctgacctcctagaccgctggggtgtgttccgggcccggctcttcagagaatcatgtgtttttcatcgtgggaactacgtgaaggacctgagtcgccttgggcgggagctgagcaaagtgatcattgttgacaattcccctgcctcatacatcttccatcctgagaatgcagtgcctgtgcagtcctggttcgatgacatgacggacacggagctgctggacctcatccccttctttgagggcctgagccgggaggacgacgtgtacagcatgctgcacagactctgcaataggtagccctggcctctgcctgcctcccgcctgtgcactctggaacctctggcctcaggggacctgcctgtcctcagctccctgggagctgaaagtgaggatactccgtgctccaggccacagggtgaatgtggccatgcctacctgttttgtttttttaagaacagaaacaactattttaaaagaactcttttaagaaatttcataaagggacatgcattttactgggtttgcttttcttaaaacataccaaaaaagaaaaaaatagaaaaaaaaaaaaaaaaagcttgatctctatcagacttcctttcaactgtcctcccctccaagcagaccacctgtccccttctatcccagctcagagcagctgacccaactcagaatctctttcctacaggatgaagtgccttttgaatgttattttaagccgagagttaatttttctacacaacatatttccagacatcttttagtcttttattgtcttagatactataagaagatgaacatgacaattttctagaacctggtagcgtgtgtgtgtgtggcggggggtgctgagggaggggagtgagtcacaggagcctgtcccccaacaggtgtgactgctctgacaacctgtggcatgctgcagggtcaggctcctgataggaggatttcatgactatgtcattgtctccactcatttttgacccagtttggaatgtatctgcaattgtgtggctcaacactttaggaaacaatagattattttatattattatttctgatggtgacaagtttgtcttgaggtcacattttctccttgaaaagtgacatcctgtcacttctgctctcacactactgccatacatttgtgttttttgttgttattgtttgggtagagcagttacaagaaaccctaaaacccttggatataaaagaaatctgtttattgatttttaaatctttcctttccaaaagctggatacacatggagctgtttgggaattttccttgctgctaccgcgctgccaccaaatggaattgaccagcggctgttacactgttctttgccactgtgcctatgctcagaatatgctcactgctaagctacaaactcggacagggtcagaaacagaggtgtcccatcccattgcagcctccaccacctgtaaccccttcctggcattggccactgaagggtacaaaggcaaaaggaccacagcaccacttaggtgtagcatggattttaaactgcagtcagtatcagatcctgtttgataaataagctgactgttctctcttgagaacctgtggcctcaaccagccaccaagctgatgtggcccaagtccatctcttggtcttctcctttgaagcacagcctatttctgagccaagggttggggaagcctgtctagatgtgggactcattgccccaaaccagggagaggaagagctcccacagggagagcccaggctctctttgcagcctttcccagtttggtgtttaagcagtgccatgttccttgtttgacaacaagacagtctgtaaagtattgctcttaaaaacaattaaaaagaaccctttcatattggcaccattgccttagtcctctgtgggttggtcttcagccagcattctggtgggagtgactggcattaacaagactggaaatcgggggtcaaagtaaaatatctttgttttgctttcattcacaaagtaatgaagccagctgccaattacatcctcccaacagcactttggtctgtggactgctgtgtgaatattcagaagggaagtaagtattcagggggtaaacaggtctcccagcattctgagtgttccaaaccagtaatccacatgccaattcaaatagaacagccccttgctagatattaccacagataatgacagttacatggtagaactgcccatgccacaaatatttatttggaaaagtagtcattaaatgaacccactgccttaaatgtcttgaatgttgcagtcaagtgtctgtcatgtgttgatatccacacagaattaggccctaatgagagccttagaccctcaaccatgcccccttcgttggcatcacagggccttatttggaagagcgggcaaagaggatggaaatcataaaatatttcatgggaatcgaacctagggatagtgctccacttctgacgatggagtgaagacacttggcagacttgagccagacacttcacctagtagttcctgaaactgtgagcaccactgcactaagccagtgcggagctgttagggacgggcccagctcctgcaccacggacacagaatgtctggagagggccagcaggccctctgagggttctggaatctgtgcaccttatttgaccacactccaaaattctgtttttattttaacccttgaatctgctttatgtacataatcaaaatatctatatctatatctatatctatatctatatatttttaatcatctacatgtaaatgaagcaatagaattctaacataaggccaagaaatgagacgaatgtttggggtttatgttttttaaggtaaatacgggtattgtttttaattattaccatgtattaaattgtgggctttgaaacctaatgaaacctgttagccacttctctgtgccatatacttcccatgttaccaaaatacccccaactctttagccaaaagagaaccctgacctcctgagtttccatgctcctttctgtaccaggtttaaatgtagtcttctggagaagtatttttgacattgagctctgggacaggacaccttgggtttgtggactgcagcccactatgatgttattacttctctggccaggcctccagtggaagtgcacaggcactcccaatgttgttaatgctctgtcttccatttgttctggaatcctacgtgttggtctgtggttccatgcattagctgtttgtaaataatgcatttgcatactgaaaaaggaatgccacctgccacagttgatggtgaggaagctcctttgacgtggtgcaattttgatgagatgtctctggggacacgaggatgccctaatgatgctgacttgtcatggttgcagcatttgaacttttggtgttaaaaaaaaaaacctgtaagtctgtaacctggcaacattttacaaccctgtatttttaaagatggctttctaataaaaaatccagaaccacacagccctatggtcaaacaatcctacgtttgtgcctctgcttttaaaggtgctgtgctggacagttggcatgccagggttcgagaagagtgaatggcttgacgtacttgcagttaactgtgcaaaattggctggctgcctctgttcctactgtactgtaactttgatcatgtctgttcctgttccattctcccaggagcttctctgcagactgacacaccctcccccaccccgggtagtggagatgctggtgtctgggtagtcatggatttctgctggacatttgaatgtgataaacaatccagcattacttaggaaatgctacatgcggaatgtgcacgtttccaggggcgagtattgtcaatcaaaaggtttgcaatgatttccttcctgccaaaaataaacatgtgaaactgca

SEQ ID NO: 159559 - DNA, 798 bp, Artificial Sequence
  derived and/or modified sequence
atggacggccccgccatcatcacccaggtgaccaaccccaaggaggacgagggcagactgcccggcgccggcgagaaggccagccagtgcaacgtgagcctgaagaagcagagaagcagaagcatcctgagcagcttcttctgctgcttcagagactacaacgtggaggcccccccccccagcagccccagcgtgctgccccccctggtggaggagaacggcggcctgcagaagccccccgccaagtacctgctgcccgaggtgaccgtgctggactacggcaagaagtgcgtggtgatcgacctggacgagaccctggtgcacagcagcttcaagcccatcagcaacgccgacttcatcgtgcccgtggagatcgacggcaccatccaccaggtgtacgtgctgaagagaccccacgtggacgagttcctgcagagaatgggccagctgttcgagtgcgtgctgttcaccgccagcctggccaagtacgccgaccccgtggccgacctgctggacagatggggcgtgttcagagccagactgttcagagagagctgcgtgttccacagaggcaactacgtgaaggacctgagcagactgggcagagagctgagcaaggtgatcatcgtggacaacagccccgccagctacatcttccaccccgagaacgccgtgcccgtgcagagctggttcgacgacatgaccgacaccgagctgctggacctgatccccttcttcgagggcctgagcagagaggacgacgtgtacagcatgctgcacagactgtgcaacagatag

SEQ ID NO: 159560 - protein, 198 aa, Artificial Sequence
  derived and/or modified sequence
MASGNARIGKPAPDFKATAVVDGAFKEVKLSDYKGKYVVLFFYPLDFTFVCPTEIIAFSNRAEDFRKLGCEVLGVSVDSQFTHLAWINTPRKEGGLGPLNIPLLADVTRRLSEDYGVLKTDEGIAYRGLFIIDGKGVLRQITVNDLPVGRSVDEALRLVQAFQYTDEHGEVCPAGWKPGSDTIKPNVDDSKEYFSKHN

SEQ ID NO: 159561 - protein, 142 aa, Artificial Sequence
  derived and/or modified sequence
MASGNARIGKPAPDFKATAVVDGAFKEVKLSDYKGKYVVLFFYPLDFTFVCPTEIIAFSNRAEDFRKLGCEVLGVSVDSQFTHLAWYEQGPKREVAAKLTPSGPSSVASWPLLNLWNLRFPIVKIMETLPPKSLRMMTVISI

SEQ ID NO: 159562 - DNA, 429 bp, Artificial Sequence
  derived and/or modified sequence
atggccagcggcaacgccagaatcggcaagcccgcccccgacttcaaggccaccgccgtggtggacggcgccttcaaggaggtgaagctgagcgactacaagggcaagtacgtggtgctgttcttctaccccctggacttcaccttcgtgtgccccaccgagatcatcgccttcagcaacagagccgaggacttcagaaagctgggctgcgaggtgctgggcgtgagcgtggacagccagttcacccacctggcctggtacgagcagggccccaagagagaggtggccgccaagctgacccccagcggccccagcagcgtggccagctggcccctgctgaacctgtggaacctgagattccccatcgtgaagatcatggagaccctgccccccaagagcctgagaatgatgaccgtgatcagcatctag

SEQ ID NO: 159563 - DNA, 597 bp, Artificial Sequence
  derived and/or modified sequence
atggccagcggcaacgcaagaatcggcaagcctgcacccgattttaaagccacagcggtagtcgacggcgctttcaaagaagtcaagctgagtgattacaagggcaagtacgtagtcctatttttttacccgttagacttcacatttgtgtgcccaacagagattatcgccttttctaacagggctgaggatttcaggaagttaggatgtgaggtactcggggtgtctgtcgattctcagttcacccacctcgcatggatcaatactcccaggaaagaaggcggtctggggccgttgaatattccactactggcagacgtgaccaggcgcctgagtgaggactatggtgtcctgaaaaccgatgaaggcattgcatatcgaggcttgttcattattgacggaaagggcgtgttaagacaaattactgtgaacgatctccctgtgggcagaagtgtcgacgaggctctccggttggtgcaggcctttcaatacacagatgagcacggtgaagtgtgtcctgctggctggaagccaggcagcgataccattaaaccaaacgttgacgatagcaaagaatacttttcgaaacacaactag

SEQ ID NO: 159564 - DNA, 429 bp, Artificial Sequence
  derived and/or modified sequence
atggcctccggaaacgcgcgaatcggaaaaccggccccagatttcaaggccactgcagtcgtcgatggagcattcaaagaggtgaagctgtctgattacaaaggcaaatacgttgtgctatttttctatcctctggatttcacattcgtgtgtcccaccgagattatagcttttagcaaccgcgccgaggatttcagaaaattagggtgtgaagtgcttggtgtgagcgtggatagccagttcacacacttggcatggtatgagcaggggcccaagagagaagtggctgccaaattaaccccatccggccccagcagcgtcgcatcatggccgctgttaaacctctggaatctgagatttcccatagtgaaaatcatggagaccctgccccccaagagtctgagaatgatgaccgtgatttccatctag

SEQ ID NO: 159565 - DNA, 597 bp, Artificial Sequence
  derived and/or modified sequence
atggccagcggaaatgcccgcatcggcaagccagccccagacttcaaggccacagctgtggtggatggagccttcaaggaggtgaagctgagtgactacaagggcaagtatgtggtgctcttcttctaccccctggacttcacctttgtgtgccccacagagatcatcgccttcagcaacagagctgaggacttcaggaagctgggctgtgaggtgctgggcgtgtctgtggacagccagttcacccacctggcctggatcaacacccccaggaaggagggcggcctgggccccctgaacatccccctgctggctgatgtgacccggcggctgtctgaagattatggagtgctgaagacagatgagggcatcgcctaccggggcctcttcatcattgatggaaaaggagtgctgcggcagatcaccgtgaatgacctgcctgtgggccgctctgtggatgaggccctgcggctggtgcaggccttccagtacacagatgagcacggggaggtgtgcccagctggctggaagccaggcagtgacaccatcaagcccaacgtggatgacagcaaggagtacttcagcaagcacaactag

SEQ ID NO: 159566 - DNA, 429 bp, Artificial Sequence
  derived and/or modified sequence
atggccagcggaaatgcccgcatcggcaagccagccccagacttcaaggccacagctgtggtggatggagccttcaaggaggtgaagctgagtgactacaagggcaagtatgtggtgctcttcttctaccccctggacttcacctttgtgtgccccacagagatcatcgccttcagcaacagagctgaggacttcaggaagctgggctgtgaggtgctgggcgtgtctgtggacagccagttcacccacctggcctggtatgagcagggccccaagcgggaggtggccgccaagctgacccccagcggccccagctctgtggcctcctggcccctgctgaacctgtggaacctgcgcttccccatcgtgaagatcatggagaccctgccccccaagagcctgaggatgatgaccgtcatcagcatctag

SEQ ID NO: 159567 - DNA, 597 bp, Artificial Sequence
  derived and/or modified sequence
atggccagcggcaacgcccggatcggcaagcccgcccccgacttcaaagcaacagctgtggtagatggcgcctttaaagaagttaaattgtctgactacaaagggaagtatgttgtgctgttcttctacccccttgacttcactttcgtctgcccgaccgagatcatcgctttctctaatagagccgaggatttccgtaagctgggttgcgaggtcctgggtgtgagcgtcgatagccagtttacccacttggcatggattaacacaccacggaaagaaggcgggctaggacctttgaacatcccacttctggcagacgtcacacgccggctctcggaggactacggcgtcctgaagactgacgagggcattgcttatcgaggactgttcattatcgatggcaaaggcgtgttgcgccaaataacagtgaatgatctcccagtggggaggtctgtcgacgaagccctccgcctggtccaagccttccagtatactgatgaacatggcgaggtctgtccagccgggtggaagccaggttccgatactattaaacccaatgtcgacgatagcaaggaatacttcagcaagcacaactag

SEQ ID NO: 159568 - DNA, 429 bp, Artificial Sequence
  derived and/or modified sequence
atggccagcggcaacgcccggatcggcaagcccgcccccgacttcaaggccactgccgtggtggacggggctttcaaggaagtgaagctcagcgactataagggaaagtatgtcgtgctctttttctatcccctcgactttacgtttgtgtgcccgacagaaattatagccttttctaaccgcgcagaagacttcagaaaactgggatgcgaggtcctgggcgtgtcagtggatagccagtttacccatctcgcgtggtacgagcagggcccaaagcgtgaagtggcagccaaattgacaccatccggcccctcatccgtcgctagctggcctttactgaatctgtggaatctgcgctttcctattgtgaagatcatggaaacactcccacctaaatccctcaggatgatgactgtgatatctatatag

SEQ ID NO: 159569 - DNA, 597 bp, Artificial Sequence
  derived and/or modified sequence
atggcttctgggaacgcccgtataggcaagcctgcacctgatttcaaggccacggcggtggtagacggtgcttttaaagaggtcaaactgtctgactacaaaggcaaatacgttgttttgtttttctaccccctagatttcactttcgtgtgcccgacggagattatcgcttttagcaaccgcgcagaggatttccggaaactcgggtgcgaggttctgggagtgtcagtcgactcacagttcacacaccttgcttggatcaatactcctcggaaagaagggggattgggccctctgaatatccccctcctggccgacgttacaaggaggctgagtgaggattacggagttctcaagaccgatgaggggattgcttatcgcggattgttcatcatcgatggcaaaggggtgctgcgccagatcactgtgaatgacctcccggttgggagatctgtggacgaagctctcagattggtgcaggcttttcagtacaccgatgaacacggcgaggtatgccccgctggttggaagcctggctcagatacaattaaacccaatgttgatgattctaaggagtatttctcaaaacacaattag

SEQ ID NO: 159570 - DNA, 429 bp, Artificial Sequence
  derived and/or modified sequence
atggcaagtggcaacgcgaggattggaaaacccgcacctgattttaaggccactgctgtggtggatggagcgttcaaggaggtgaagttgtccgactataagggtaaatatgtggtgctgtttttttatcctcttgacttcaccttcgtctgccctacagaaatcatagcattcagcaaccgagcggaagattttagaaagctaggctgcgaagtgctcggagtatctgtggattcacagtttacgcacctggcttggtacgaacagggccctaaacgtgaggtggctgctaaactgacaccatcaggccctagctctgttgcctcatggcctctgctcaatttatggaacctgcgctttcctattgttaagattatggagacgctgccacccaaatcactgaggatgatgaccgtaatttcaatttag

SEQ ID NO: 159571 - DNA, 710 bp, Artificial Sequence
  derived and/or modified sequence
gctcgtccgctccctcccccgcgccgtgcacgtcttggttcgggccgggcataaaaggcttcgcggcccagggctcacttggcgctgagaacgcgggtccacgcgtgtgatcgtccgtgcgtctagcctttgcccacgcagctttcagtcatggcctccggtaacgcgcgcatcggaaagccagcccctgacttcaaggccacagcggtggttgatggcgccttcaaagaggtgaagctgtcggactacaaagggaagtacgtggtcctctttttctaccctctggacttcacttttgtgtgccccaccgagatcatcgcgttcagcaaccgtgcagaggacttccgcaagctgggctgtgaagtgctgggcgtctcggtggactctcagttcacccacctggcttggtatgagcaggggccaaagagggaggttgcagctaagctcacaccctcaggtcctagcagtgtggcttcgtggccattgctcaacctctggaacctgcgtttccccatcgtgaaaataatggaaacattgccgcccaagtctttaaggatgatgacagtaattagcatttgacaactagttgcctggtatatagagttgcagatgcaactcagatgcaactctatctactctatgtacttagttcccaggagggaggctgtgctgccctatttcatgaagatggaaactccagttcaccgaag

SEQ ID NO: 159572 - DNA, 987 bp, Artificial Sequence
  derived and/or modified sequence
cgccgtgcacgtcttggttcgggccgggcataaaaggcttcgcggcccagggctcacttggcgctgagaacgcgggtccacgcgtgtgatcgtccgtgcgtctagcctttgcccacgcagctttcagtcatggcctccggtaacgcgcgcatcggaaagccagcccctgacttcaaggccacagcggtggttgatggcgccttcaaagaggtgaagctgtcggactacaaagggaagtacgtggtcctctttttctaccctctggacttcacttttgtgtgccccaccgagatcatcgcgttcagcaaccgtgcagaggacttccgcaagctgggctgtgaagtgctgggcgtctcggtggactctcagttcacccacctggcttggatcaacaccccccggaaagagggaggcttgggccccctgaacatccccctgcttgctgacgtgaccagacgcttgtctgaggattacggcgtgctgaaaacagatgagggcattgcctacaggggcctctttatcatcgatggcaagggtgtccttcgccagatcactgttaatgatttgcctgtgggacgctccgtggatgaggctctgcggctggtccaggccttccagtacacagacgagcatggggaagtttgtcccgctggctggaagcctggcagtgacacgattaagcccaacgtggatgacagcaaggaatatttctccaaacacaattaggctggctaacggatagtgagcttgtgcccctgcctaggtgcctgtgctgggtgtccacctgtgcccccacctgggtgccctatgctgacccaggaaaggccagacctgcccctccaaactccacagtatgggaccctggagggctaggccaaggccttctcatgcctccacctagaagctgaatagtgacgccctcccccaagcccacccagccgcacacaggcctagaggtaaccaataaagtattagggaaaggtgtga

SEQ ID NO: 159573 - DNA, 597 bp, Artificial Sequence
  derived and/or modified sequence
atggccagcggcaacgccagaatcggcaagcccgcccccgacttcaaggccaccgccgtggtggacggcgccttcaaggaggtgaagctgagcgactacaagggcaagtacgtggtgctgttcttctaccccctggacttcaccttcgtgtgccccaccgagatcatcgccttcagcaacagagccgaggacttcagaaagctgggctgcgaggtgctgggcgtgagcgtggacagccagttcacccacctggcctggatcaacacccccagaaaggagggcggcctgggccccctgaacatccccctgctggccgacgtgaccagaagactgagcgaggactacggcgtgctgaagaccgacgagggcatcgcctacagaggcctgttcatcatcgacggcaagggcgtgctgagacagatcaccgtgaacgacctgcccgtgggcagaagcgtggacgaggccctgagactggtgcaggccttccagtacaccgacgagcacggcgaggtgtgccccgccggctggaagcccggcagcgacaccatcaagcccaacgtggacgacagcaaggagtacttcagcaagcacaactag

SEQ ID NO: 159574 - protein, 195 aa, Artificial Sequence
  derived and/or modified sequence
MTDSVIYSMLELPTATQAQNDYGPQQKSSSSRPSCSCLVAIALGLLTAVLLSVLLYQWILCQGSNYSTCASCPSCPDRWMKYGNHCYYFSVEEKDWNSSLEFCLARDSHLLVITDNQEMSLLQVFLSEAFCWIGLRNNSGWRWEDGSPLNFSRISSNSFVQTCGAINKNGLQASSCEVPLHWVCKKCPFADQALF

SEQ ID NO: 159575 - protein, 189 aa, Artificial Sequence
  derived and/or modified sequence
MTDSVIYSMLELPTATQAQNDYGPQQKSSSSRPSCSCLVAIALGLLTAVLLSVLLYQWILCQGSNYSTCASCPSCPDRWMKYGNHCYYFSVEEKDWNSSLEFCLARDSHLLVITDNQEMSLLQVFLSEAFCWIGLRNNSGWRWEDGSPLNFSRISSNSFVQTCGAINKNGLQASSCEVPLHWVCKKVRL

SEQ ID NO: 159576 - DNA, 588 bp, Artificial Sequence
  derived and/or modified sequence
atgacagatagcgtgatctacagcatgctcgagctgccaacagccacccaggcccagaacgattacggcccacaacagaagtcttcatctagtaggccgtcttgctcttgcctcgtagccatcgccctaggcctgcttaccgcagttctgctgtctgtgttgttataccaatggatcctgtgccaggggagcaattactccacatgtgcaagttgcccctcttgccctgacagatggatgaagtatggcaatcattgctactacttttcagtcgaggagaaagattggaacagttcactggagttttgcctcgcccgcgacagccacctactagtgatcactgacaaccaggagatgtctctgctgcaggtgttcctcagcgaggctttttgttggataggactacggaataatagcggttggcggtgggaagacggcagtcccctcaactttagccgtattagttccaacagttttgtgcaaacatgcggcgcaataaacaagaacggacttcaggccagctcttgcgaggtacccttgcactgggtttgtaagaagtgtccttttgccgatcaggccctgttttag

SEQ ID NO: 159577 - DNA, 570 bp, Artificial Sequence
  derived and/or modified sequence
atgaccgattctgttatatattcgatgctggaactccccacagctacacaggcccagaacgattacgggccacagcaaaaatcttcaagctcacggccgtcttgttcctgccttgtggcaatagccctggggttgttgaccgcagtacttctgtccgtgctgctgtatcagtggatcctatgtcaagggtccaattattccacatgcgcttcttgcccaagctgcccggatcggtggatgaagtatggaaaccattgttactatttcagcgtcgaagaaaaagattggaattcatccctggaattctgtttggctagggattcacacctactcgtaataactgacaatcaagagatgtccttgttgcaggtctttctctcagaggccttttgctggatagggctgcgcaataactccggctggcgctgggaagacgggagccccttaaatttctcacgcatatctagcaatagctttgtccagacctgcggggccataaataagaacggcctgcaggcctctagttgcgaagtgccactacattgggtgtgcaaaaaggttagactctag

SEQ ID NO: 159578 - DNA, 1335 bp, Artificial Sequence
  derived and/or modified sequence
agatcttagctgaagatgactgacagtgttatttattccatgttagagttgcctacggcaacccaagcccagaatgactatggaccacagcaaaaatcttcctcttccaggccttcttgttcttgccttgtggcaatagctttggggcttctgactgcagttcttctgagtgtgctgctataccagtggatcctgtgccagggctccaactactccacttgtgccagctgtcctagctgcccagaccgctggatgaaatatggtaaccattgttattatttctcagtggaggaaaaggactggaattctagtctggaattctgcctagccagagactcacacctccttgtgataacggacaatcaggaaatgagcctgctccaagttttcctcagtgaggccttttgctggattggtctgaggaacaattctggctggaggtgggaagatggatcacctctaaacttctcaaggatttcttctaatagctttgtgcagacatgcggtgccatcaacaaaaatggtcttcaagcctcaagctgtgaagttcctttacactgggtgtgtaagaagtgtccctttgcagatcaagctttattctgaagaataaacctagctggcatgctggtgtgtacctgtagtcctagctatttgggaagctgaggtgggagggtcgcttgagcccaggagtttgaggctgcagtgagctatgattgtgccactgtactccagcctgggagatagagcaagactccatctctaaaaaaaaaaaaaaatgctaatgtgagaatataaattgtgggaaatgagtgagggcaaggtggtacttcctccttctgagctcttcacacgtaatgcaaaaacccggtcttaactgattttgttttttttctgagtatgcatatatgtggttgaatgaaccaatgtgtgattgtatcttttccattatgtgactgtttgacctgcatattaatttcaagatagcagtcaattcgataaggcattttcatagaggaaagtttacagaaacagtttatgtggttggatcaccaaattatcttaggtactaaggcctcaaaaataagaaaaactttattatttctcctcagtagagtttggacatacataaggagagaaggtacagtgatgaaggagaccataattctgtagtgttgatgatcctggattataatctttttctctttatctttcatagtttttttaaaaacatggactgtatcttatctaccactatatcccaaatacctaagatagtgcttacgttcagtgactattaaataaataaatggatgaattaaaaagtaagaatgaaaa

SEQ ID NO: 159579 - DNA, 1206 bp, Artificial Sequence
  derived and/or modified sequence
agtttagagattgggctgtttcctcactgatacatatcccttcacacttctataatttaactctctcaactgcatgtgaaagatcttagctgaagatgactgacagtgttatttattccatgttagagttgcctacggcaacccaagcccagaatgactatggaccacagcaaaaatcttcctcttccaggccttcttgttcttgccttgtggcaatagctttggggcttctgactgcagttcttctgagtgtgctgctataccagtggatcctgtgccagggctccaactactccacttgtgccagctgtcctagctgcccagaccgctggatgaaatatggtaaccattgttattatttctcagtggaggaaaaggactggaattctagtctggaattctgcctagccagagactcacacctccttgtgataacggacaatcaggaaatgagcctgctccaagttttcctcagtgaggccttttgctggattggtctgaggaacaattctggctggaggtgggaagatggatcacctctaaacttctcaaggatttcttctaatagctttgtgcagacatgcggtgccatcaacaaaaatggtcttcaagcctcaagctgtgaagttcctttacactgggtgtgtaagaaggtcagactttgatagatgaccactctgtcctgaccctcagatctgtcatgtatccctaaaaggagggagctggccactggctgttgggaaagccatgagtatatagttagcaaatactgaactttctcagatatggcattagatgcaagacaacctcctagggattgatgcctaactgatggattctctttgagactatttagatattatgtgagcaatttaaagaccagatctaagcaaattttgaaatagatgtttgttttttgtatttctcagtatggaaactaatgctgccactctcatccccgtcccaaccatctctgtcaaaaatatacctttttcatatgatattctgagctaatctgataaaatctatgccaatatatactattgcttgtgtactagagaagtacattattgctgtactcctctgtacattactgatccctgatggtatatttctatcctaacagtgtccctttgcagatcaagctttattctgaagaataaacctagctggcatgctggtgtgtacctgtagtcctagctattt

SEQ ID NO: 159580 - DNA, 588 bp, Artificial Sequence
  derived and/or modified sequence
atgacagacagcgtcatctacagcatgctggagctgcccacagccacccaggcccagaatgactatggcccccagcagaagagcagcagcagccggcccagctgcagctgcctggtggccatcgccctgggcctgctgacagctgtgctgctgtctgtgctgctgtaccagtggatcctgtgccagggcagcaactacagcacctgtgccagctgccccagctgcccagaccgctggatgaagtatggcaaccactgctactacttctctgtggaggagaaggactggaacagcagcctggagttctgcctggcccgggacagccacctgctggtgatcacagacaaccaggagatgagcctgctgcaggtgttcctgtctgaggccttctgctggattggcctgaggaacaacagcggctggcgctgggaggatggcagccccctgaacttcagccgcatcagcagcaacagctttgtgcagacctgtggggccatcaacaagaatggcctgcaggccagcagctgtgaggtgcccctgcactgggtgtgcaagaagtgcccctttgctgaccaggccctcttctag

SEQ ID NO: 159581 - DNA, 570 bp, Artificial Sequence
  derived and/or modified sequence
atgacagacagcgtcatctacagcatgctggagctgcccacagccacccaggcccagaatgactatggcccccagcagaagagcagcagcagccggcccagctgcagctgcctggtggccatcgccctgggcctgctgacagctgtgctgctgtctgtgctgctgtaccagtggatcctgtgccagggcagcaactacagcacctgtgccagctgccccagctgcccagaccgctggatgaagtatggcaaccactgctactacttctctgtggaggagaaggactggaacagcagcctggagttctgcctggcccgggacagccacctgctggtgatcacagacaaccaggagatgagcctgctgcaggtgttcctgtctgaggccttctgctggattggcctgaggaacaacagcggctggcgctgggaggatggcagccccctgaacttcagccgcatcagcagcaacagctttgtgcagacctgtggggccatcaacaagaatggcctgcaggccagcagctgtgaggtgcccctgcactgggtgtgcaagaaggtgcggctgtag

SEQ ID NO: 159582 - DNA, 588 bp, Artificial Sequence
  derived and/or modified sequence
atgaccgacagcgtgatctacagcatgctggagctgcccaccgccacacaggctcaaaatgactatggcccccagcagaaaagcagcagcagcagaccatcctgcagctgcctagtggccatcgcgttgggcctgttgaccgccgtactgctttccgtgctgctgtaccaatggattctctgccagggctctaattatagtacctgcgcgtcatgcccctcatgccctgatcggtggatgaagtatggtaaccattgttattatttcagcgtcgaggaaaaagattggaattctagcctcgagttctgtctggcgcgcgattcacacctgctggtgatcactgataatcaagagatgtctctcttgcaggtgttcctcagtgaggctttctgctggatcgggctgagaaataatagcggatggcgctgggaagatggaagccccctaaatttctcacgcatttcatctaatagctttgttcagacttgcggtgccatcaataagaacgggctgcaggcaagctcctgcgaagtccccttgcactgggtatgcaaaaaatgcccctttgcagaccaagctctcttttag

SEQ ID NO: 159583 - DNA, 570 bp, Artificial Sequence
  derived and/or modified sequence
atgaccgacagcgtgatctacagcatgctggagctgcccaccgccacacaagcccagaacgactacggtccccagcagaaatctagctcctcaagacccagctgttcgtgtctagttgctatcgctctaggactcctgactgccgttctgttatccgtgctactgtatcagtggatcttatgccaaggcagtaactatagcacatgcgcaagttgcccgtcttgccctgataggtggatgaaatatgggaaccattgttattatttttccgtggaggaaaaagattggaattccagcctcgaattttgccttgcccgcgattcacatctgctggtcatcaccgataatcaggagatgtccctccttcaggttttcttgtcggaggccttctgctggatcggcctgcgtaataatagcggatggcgctgggaggacggtagtccactgaacttttcccgaattagtagcaacagcttcgtgcagacttgcggagctattaataaaaacggcctacaagcatcatcctgtgaggtgcctttgcactgggtgtgcaaaaaagtcaggctgtag

SEQ ID NO: 159584 - DNA, 588 bp, Artificial Sequence
  derived and/or modified sequence
atgaccgatagcgtgatctactccatgctcgaactgccaacagcgactcaggcccagaatgattacggccctcaacagaagtcatcgtcttccaggccctcctgttcttgcttagtggctatcgccttaggtctgctgaccgctgtcttattgagtgtcctactataccagtggattctgtgtcaaggctcaaattacagcacatgtgccagctgcccaagttgccccgaccgctggatgaaatatggcaatcactgttattacttctccgtggaggagaaggactggaattctagtctcgagttttgtctagcacgggatagtcacctcttggtgatcacagacaaccaggagatgtctctgctccaggtcttcctgtctgaggccttctgctggatcggcttacggaacaactccgggtggaggtgggaagacggttcccccctgaacttcagcaggattagctctaactcttttgtgcagacatgcggtgccattaataagaatggcctacaggcttccagttgcgaggtgccgctgcattgggtctgcaagaagtgtccctttgccgatcaggccttgttttag

SEQ ID NO: 159585 - DNA, 570 bp, Artificial Sequence
  derived and/or modified sequence
atgaccgatagcgtcatttattccatgttagagctgccaaccgcgacacaggctcagaacgactacggaccgcagcagaaaagctccagctcacggccaagctgttcctgcttggtggctattgctctgggtctgttgactgccgttcttctatctgtcctgctttatcaatggattctgtgccagggctccaactacagcacatgcgcctcatgtccatcctgtcccgatcgctggatgaaatacggtaatcactgttactatttcagcgtggaggaaaaagactggaattcatcactggagttctgtctagccagggacagtcatctcctggttatcaccgataaccaggagatgagccttcttcaggttttcctgtccgaagccttctgctggatcgggctgcggaacaattccggctggaggtgggaggatggcagccctcttaatttttcgcgtatcagcagcaattcctttgtgcagacatgcggagcaattaataaaaacggcttgcaagcgagttcctgcgaggtgccactgcactgggtgtgcaagaaggtccggctgtag

SEQ ID NO: 159586 - DNA, 588 bp, Artificial Sequence
  derived and/or modified sequence
atgaccgacagcgtgatctacagcatgctggagctgcccaccgccacccaggcccagaacgactacggcccccagcagaagagcagcagcagcagacccagctgcagctgcctggtggccatcgccctgggcctgctgaccgccgtgctgctgagcgtgctgctgtaccagtggatcctgtgccagggcagcaactacagcacctgcgccagctgccccagctgccccgacagatggatgaagtacggcaaccactgctactacttcagcgtggaggagaaggactggaacagcagcctggagttctgcctggccagagacagccacctgctggtgatcaccgacaaccaggagatgagcctgctgcaggtgttcctgagcgaggccttctgctggatcggcctgagaaacaacagcggctggagatgggaggacggcagccccctgaacttcagcagaatcagcagcaacagcttcgtgcagacctgcggcgccatcaacaagaacggcctgcaggccagcagctgcgaggtgcccctgcactgggtgtgcaagaagtgccccttcgccgaccaggccctgttctag

SEQ ID NO: 159587 - DNA, 570 bp, Artificial Sequence
  derived and/or modified sequence
atgaccgacagcgtgatctacagcatgctggagctgcccaccgccacccaggcccagaacgactacggcccccagcagaagagcagcagcagcagacccagctgcagctgcctggtggccatcgccctgggcctgctgaccgccgtgctgctgagcgtgctgctgtaccagtggatcctgtgccagggcagcaactacagcacctgcgccagctgccccagctgccccgacagatggatgaagtacggcaaccactgctactacttcagcgtggaggagaaggactggaacagcagcctggagttctgcctggccagagacagccacctgctggtgatcaccgacaaccaggagatgagcctgctgcaggtgttcctgagcgaggccttctgctggatcggcctgagaaacaacagcggctggagatgggaggacggcagccccctgaacttcagcagaatcagcagcaacagcttcgtgcagacctgcggcgccatcaacaagaacggcctgcaggccagcagctgcgaggtgcccctgcactgggtgtgcaagaaggtgagactgtag

SEQ ID NO: 159588 - protein, 319 aa, Artificial Sequence
  derived and/or modified sequence
MVGKMWPVLWTLCAVRVTVDAISVETPQDVLRASQGKSVTLPCTYHTSTSSREGLIQWDKLLLTHTERVVIWPFSNKNYIHGELYKNRVSISNNAEQSDASITIDQLTMADNGTYECSVSLMSDLEGNTKSRVRLLVLVPPSKPECGIEGETIIGNNIQLTCQSKEGSPTPQYSWKRYNILNQEQPLAQPASGQPVSLKNISTDTSGYYICTSSNEEGTQFCNITVAVRSPSMNVALYVGIAVGVVAALIIIGIIIYCCCCRGKDDNTEDKEDARPNREAYEEPPEQLRELSREREEEDDYRQEEQRSTGRESPDHLDQ

SEQ ID NO: 159589 - DNA, 960 bp, Artificial Sequence
  derived and/or modified sequence
atggtgggcaagatgtggcccgtgctgtggaccctgtgcgccgtgagagtgaccgtggacgccatcagcgtggagaccccccaggacgtgctgagagccagccagggcaagagcgtgaccctgccctgcacctaccacaccagcaccagcagcagagagggcctgatccagtgggacaagctgctgctgacccacaccgagagagtggtgatctggcccttcagcaacaagaactacatccacggcgagctgtacaagaacagagtgagcatcagcaacaacgccgagcagagcgacgccagcatcaccatcgaccagctgaccatggccgacaacggcacctacgagtgcagcgtgagcctgatgagcgacctggagggcaacaccaagagcagagtgagactgctggtgctggtgccccccagcaagcccgagtgcggcatcgagggcgagaccatcatcggcaacaacatccagctgacctgccagagcaaggagggcagccccaccccccagtacagctggaagagatacaacatcctgaaccaggagcagcccctggcccagcccgccagcggccagcccgtgagcctgaagaacatcagcaccgacaccagcggctactacatctgcaccagcagcaacgaggagggcacccagttctgcaacatcaccgtggccgtgagaagccccagcatgaacgtggccctgtacgtgggcatcgccgtgggcgtggtggccgccctgatcatcatcggcatcatcatctactgctgctgctgcagaggcaaggacgacaacaccgaggacaaggaggacgccagacccaacagagaggcctacgaggagccccccgagcagctgagagagctgagcagagagagagaggaggaggacgactacagacaggaggagcagagaagcaccggcagagagagccccgaccacctggaccagtag

SEQ ID NO: 159590 - DNA, 2802 bp, Artificial Sequence
  derived and/or modified sequence
ctacccctttgtgagcagtctaggactttgtacacttgttaagtagggagaaggcaggggaggtggctggtttaaggggaacttgagggaagtagggaagactcctcttgggacctttggagtaggtgacacatgagcccagccccagctcacctgccaatccagctgaggagctcacctgccaatccagctgaggctgggcagaggtgggtgagaagagggaaaattgcagggacctccagttgggccaggccagaagctgctgtagctttaaccagacagctcagacctgtctggaggctgccagtgacaggttaggtttagggcagagaagaagcaagaccatggtggggaagatgtggcctgtgttgtggacactctgtgcagtcagggtgaccgtcgatgccatctctgtggaaactccgcaggacgttcttcgggcttcgcagggaaagagtgtcaccctgccctgcacctaccacacttccacctccagtcgagagggacttattcaatgggataagctcctcctcactcatacggaaagggtggtcatctggccgttttcaaacaaaaactacatccatggtgagctttataagaatcgcgtcagcatatccaacaatgctgagcagtccgatgcctccatcaccattgatcagctgaccatggctgacaacggcacctacgagtgttctgtctcgctgatgtcagacctggagggcaacaccaagtcacgtgtccgcctgttggtcctcgtgccaccctccaaaccagaatgcggcatcgagggagagaccataattgggaacaacatccagctgacctgccaatcaaaggagggctcaccaacccctcagtacagctggaagaggtacaacatcctgaatcaggagcagcccctggcccagccagcctcaggtcagcctgtctccctgaagaatatctccacagacacatcgggttactacatctgtacctccagcaatgaggaggggacgcagttctgcaacatcacggtggccgtcagatctccctccatgaacgtggccctgtatgtgggcatcgcggtgggcgtggttgcagccctcattatcattggcatcatcatctactgctgctgctgccgagggaaggacgacaacactgaagacaaggaggatgcaaggccgaaccgggaagcctatgaggagccaccagagcagctaagagaactttccagagagagggaggaggaggatgactacaggcaagaagagcagaggagcactgggcgtgaatccccggaccacctcgaccagtgacaggccagcagcagagggcggcggaggaagggttaggggttcattctcccgcttcctggcctcccttctcctttctaagccctgttctcctgtccctccatcccagacattgatggggacatttcttccccagtgtcagctgtggggaacatggctggcctggtaagggggtccctgtgctgatcctgctgacctcactgtcctgtgaagtaacccctcctggctgtgacacctggtgcgggcctggccctcactcaagaccaggctgcagcctccacttccctcgtagttggcaggagctcctggaagcacagcgctgagcatggggcgctcccactcagaactctccagggaggcgatgccagccttggggggtgggggctgtcctgctcacctgtgtgcccagcacctggaggggcaccaggtggagggtttgcactccacacatctttcttgaatgaatgaaagaataagtgagtatgcttgggccctgcattggcctggcctccagctcccactccctttccaacctcacttcccgtagctgccagtatgttccaaaccctcctgggaaggccacctcccactcctgctgcacaggccctggggagcttttgcccacacactttccatctctgcctgtcaatatcgtacctgtccctccaggcccatctcaaatcacaaggatttctctaaccctatcctaattgtccacatacgtggaaacaatcctgttactctgtcccacgtccaatcatgggccacaaggcacagtcttctgagcgagtgctctcactgtattagagcgccagctccttggggcagggcctgggcctcatggcttttgctttccctgaagccctagtagctggcgcccatcctagtgggcacttaagcttaattggggaaactgctttgattggttgtgccttcccttctctggtctccttgagatgatcgtagacacagggatgattcccacccaaacccacgtattcattcagtgagttaaacacgaattgatttaaagtgaacacacacaagggagcttgcttgcagatggtctgagttcttgtgtcctggtaattcctctccaggccagaataattggcatgtctcctcaacccacatggggttcctggttgttcctgcatcccgatacctcagccctggccctgcccagcccatttgggctctggttttctggtggggctgtcctgctgccctcccacagcctccttctgtttgtcgagcatttcttctactcttgagagctcaggcagcgttagggctgcttaggtctcatggaccagtggctggtctcacccaactgcagtttactattgctatcttttctggatgatcagaaaaataattccataaatctattgtctacttgcgattttttaaaaaatgtatatttttatatatattgttaaatcctttgcttcattccaaatgctttcagtaataataaaattgtgggtggaaattctta

SEQ ID NO: 159591 - DNA, 960 bp, Artificial Sequence
  derived and/or modified sequence
atggtggggaagatgtggccagttctttggacactctgcgcagtaagggttacagtggatgccatcagtgtagagaccccgcaagacgttctacgagcttcccaaggcaaaagcgtgactctgccatgtacctatcatacctccacctcctctcgcgaaggactcatacaatgggacaagcttctgttgacacacacagagcgggtcgtgatttggcctttctcaaataaaaactatatccacggcgaactttacaaaaatcgcgtgagtatctctaataacgcagagcaatccgatgccagcataaccattgaccagctcacaatggcagataacggaacctacgagtgcagtgtttctttaatgtccgatttagagggcaacactaagagccgagttcgccttcttgtgctagtgccccccagtaagccggagtgcggaattgagggagagacgatcattggcaataacatccagctgacttgtcaaagtaaagaaggatccccaactccacagtacagctggaaaaggtacaacatcctgaatcaggaacagcccttggcacaaccagctagtggtcagcccgtatcgctaaagaacatctcaacagatactagcggctactatatttgtacatcttccaacgaagaagggacccagttctgcaacatcactgttgccgtgcgttcccccagtatgaacgtggccctgtacgtgggtatcgctgttggagtggttgctgccctgattatcatcggtattataatttattgttgctgctgccgcggcaaagatgacaacactgaagataaggaggatgcccgccccaaccgggaagcctacgaggaaccccctgaacaactaagggagctttctagagaacgggaggaagaggacgattacagacaggaagagcagaggtcgaccggccgggaatctcctgatcacctcgaccagtag

SEQ ID NO: 159592 - DNA, 960 bp, Artificial Sequence
  derived and/or modified sequence
atggtgggcaagatgtggcctgtgctgtggaccctgtgtgctgtgcgggtgacagtggatgccatctctgtggagaccccccaggatgtgctgcgggccagccagggcaagtctgtgaccctgccctgcacctaccacaccagcaccagcagccgggagggcctcatccagtgggacaagctgctgctgacccacacagagcgggtggtgatctggcccttcagcaacaagaactacatccatggagagctgtacaagaacagagtgtccatcagcaacaatgctgagcagagtgatgccagcatcaccatcgaccagctgaccatggctgacaatggcacctatgagtgcagcgtgtccctgatgtctgacctggagggcaacaccaagagccgggtgcggctgctggtgctggtgccccccagcaagccagaatgtggcatcgagggggagaccatcatcggcaacaacatccagctgacctgccagagcaaggagggcagccccaccccccagtacagctggaagcgctacaacatcctgaaccaggagcagcccctggcccagcctgccagcggccagcctgtgtccctgaagaacatcagcacagacaccagcggctactacatctgcaccagcagcaatgaggagggcacccagttctgcaacatcaccgtggccgtgcgcagccccagcatgaatgtggccctgtatgtgggcattgctgtgggcgtggtggccgccctgatcatcatcggcatcatcatctactgctgctgctgccggggcaaggatgacaacacagaggacaaggaggatgcccggcccaaccgggaggcctatgaggagcccccagagcagctgcgggagctgagccgggagcgggaggaggaggatgactaccggcaggaggagcagaggagcacaggccgggagagcccagaccacctggaccagtag

SEQ ID NO: 159593 - DNA, 960 bp, Artificial Sequence
  derived and/or modified sequence
atggtgggcaagatgtggcccgtgctgtggaccctgtgcgccgtgagagtcacagtcgatgccataagcgtagaaacccctcaagacgttctccgagctagccagggaaaaagcgtgaccctgccgtgtacttatcatacaagtacaagcagccgagaggggctcatacagtgggacaagcttctgcttacccataccgagcgagtggtgatttggccgttcagcaataagaattacatacatggagagctttacaagaaccgcgtgagtattagtaacaacgcggagcagagtgacgctagtattaccattgatcagctgacaatggctgacaatgggacttacgagtgcagcgtgtctctcatgagtgatctggaggggaatactaagagccgggtgcgactgctggtcctggtgccaccctctaaacccgagtgcggtatcgaaggagagacgatcatcggaaacaacattcaactcacttgtcagagtaaggagggtagcccgacacctcagtactcttggaagaggtataacatactgaatcaggagcagccacttgctcagcctgctagcggacagcccgtcagtctgaagaatattagcactgacacatcaggctactatatctgcacgagctcaaatgaggaagggacacaattctgcaatattactgtggctgtgagatcgcctagcatgaacgtagcactgtacgtcgggattgccgtgggcgttgtggcggctctgattatcatcggaatcatcatctactgttgttgctgtagaggtaaggatgataataccgaagacaaggaagatgcgaggccaaatcgggaggcgtacgaggagccccccgaacagcttagggagctgtcccgcgagcgtgaagaagaggatgactataggcaggaagagcagaggagcactggcagagagtctccagaccacctcgatcagtag

SEQ ID NO: 159594 - DNA, 960 bp, Artificial Sequence
  derived and/or modified sequence
atggttggcaagatgtggccggtgctgtggactctctgtgctgtgagggtgacagtggacgccatctcagtggaaaccccccaggatgtgctgcgagcgtcgcaagggaagagtgtgacccttccttgcacgtatcataccagcacttcgtctcgtgaggggcttattcagtgggacaagctactgctgactcataccgaacgcgtcgttatctggccattttccaataaaaattacatccacggcgaactgtacaaaaacagagtaagtattagtaataacgctgaacaatcagacgctagcatcacgatcgaccagctgacaatggcagataatgggacttatgaatgttcagtgagccttatgagcgaccttgaagggaatactaagagcagggtgagactattggtgcttgtcccaccatcaaaaccggagtgtggtattgagggcgagaccataatcggaaacaatatccaactcacatgccagagcaaggaagggtcccctacgccacagtattcctggaaacggtataacattctgaaccaggagcaacccctagcccagccagcctcaggacagccagttagcttgaaaaacatctccactgacacttcaggctactacatctgcaccagcagcaatgaggagggaacgcagttttgcaacattaccgtcgctgttaggagccctagcatgaatgtggctctgtatgtaggcattgcggtgggcgttgtggccgcactcattatcatcggaatcatcatatattgctgttgctgccggggtaaggacgacaacactgaggataaggaggatgcacgtcccaaccgagaggcctatgaggagcccccagagcagctcagggagcttagtcgcgagcgtgaagaggaggacgactacaggcaagaggaacagcgctccaccggaagagagtcccctgaccacctggaccagtag

SEQ ID NO: 159595 - protein, 671 aa, Artificial Sequence
  derived and/or modified sequence
MASVALEDVAVNFTREEWALLGPCQKNLYKDVMQETIRNLDCVVMKWKDQNIEDQYRYPRKNLRCRMLERFVESKDGTQCGETSSQIQDSIVTKNTLPGVGPCESSMRGEKVMGHSSLNCYIRVGAGHKPHEYHECGEKPDTHKQRGKAFSYHNSFQTHERLHTGKKPYDCKECGKSFSSLGNLQRHMAVQRGDGPYKCKLCGKAFFWPSLLHMHERTHTGEKPYECKQCSKAFSFYSSYLRHERTHTGEKPYECKQCSKAFPFYSSYLRHERTHTGEKPYKCKQCSKAFPDSSSCLIHERTHTGEKPYTCKQCGKAFSVSGSLQRHETTHSAEKPYACQQCGKAFHHLGSFQRHMIRHTGNGPHKCKICGKGFDCPSSLQSHERTHTGEKPYECKQCGKALSHRSSFRSHMIMHTGDGPHKCKVCGKAFVYPSVFQRHERTHTAEKPYKCKQCGKAYRISSSLRRHETTHTGEKPYKCKLGKACIDFCSFQNHKTTHTGEKPYECKECGKAFSRFRYLSRHKRTHTGEKPYECKTCRKAFGHYDNLKVHERIHSGEKPYECKECGKAFSWLTCFLRHERIHMREKSYECPQCGKAFTHSRFLQGHEKTHTGENPYECKECGKAFASLSSLHRHKKTHWKKTHTGENPYECKECGKAFASLSSLHRHKKTH

SEQ ID NO: 159596 - protein, 643 aa, Artificial Sequence
  derived and/or modified sequence
MASVALEDVAVNFTREEWALLGPCQKNLYKDVMQETIRNLDCVVMKWKDQNIEDQYRYPRKNLRCRMLERFVESKDGTQCGETSSQIQDSIVTKNTLPGVGPCESSMRGEKVMGHSSLNCYIRVGAGHKPHEYHECGEKPDTHKQRGKAFSYHNSFQTHERLHTGKKPYDCKECGKSFSSLGNLQRHMAVQRGDGPYKCKLCGKAFFWPSLLHMHERTHTGEKPYECKQCSKAFSFYSSYLRHERTHTGEKPYECKQCSKAFPFYSSYLRHERTHTGEKPYKCKQCSKAFPDSSSCLIHERTHTGEKPYTCKQCGKAFSVSGSLQRHETTHSAEKPYACQQCGKAFHHLGSFQRHMIRHTGNGPHKCKICGKGFDCPSSLQSHERTHTGEKPYECKQCGKALSHRSSFRSHMIMHTGDGPHKCKVCGKAFVYPSVFQRHERTHTAEKPYKCKQCGKAYRISSSLRRHETTHTGEKPYKCKLGKACIDFCSFQNHKTTHTGEKPYECKECGKAFSRFRYLSRHKRTHTGEKPYECKTCRKAFGHYDNLKVHERIHMREKSYECPQCGKAFTHSRFLQGHEKTHTGENPYECKECGKAFASLSSLHRHKKTHWKKTHTGENPYECKECGKAFASLSSLHRHKKTH

SEQ ID NO: 159597 - DNA, 2736 bp, Artificial Sequence
  derived and/or modified sequence
aactgtcaatcaggcactgcccagagaagtgtgtgtggttgaaaaagcccgcggcgtctgctccacccacctgcgctcggctctgggttctgtagctgagagacgacctggaagttctgaggcagcctttgtctggctggaacacgcattggcagcgggagctgtcggtaggacctgggacaccgcggaagtcgggaaatggcctcagtggctttagaggatgtggctgtgaacttcacccgagaagagtgggctttgctgggtccttgtcagaagaatctctacaaagatgtgatgcaggaaaccatcaggaacctggattgtgtagtaatgaaatggaaagaccagaacattgaagatcaatatagatatcccaggaaaaatctaagatgtcgtatgttagagagatttgttgaaagtaaagatggaactcaatgtggagaaacatctagccagattcaagatagtattgtgaccaagaacactcttcctggagtaggtccttgtgaaagcagtatgagaggagaaaaagtcatgggtcattcatcccttaattgttacatcagagttggtgctgggcacaaaccacatgagtatcatgaatgtggagagaagccagatacgcataaacaacgtgggaaagccttcagttaccacaactcatttcaaacacatgagaggcttcacactggaaagaaaccatatgattgtaaagaatgtgggaagtccttcagttctttgggaaaccttcaaagacacatggcagtgcagcgtggagatggaccttataaatgtaagttgtgtgggaaagcgtttttttggcccagtttattacatatgcatgaaagaacgcacactggagagaaaccatatgaatgtaagcagtgttctaaagccttttctttttacagttcctatctaagacatgaaagaacacatactggggagaaaccgtatgaatgtaaacagtgttctaaagcctttcctttttacagttcctatctaagacatgaaagaacacatactggggagaaaccatataaatgtaagcagtgttctaaagccttccctgattccagttcttgtctaatacatgaaagaactcacactggagagaaaccctatacatgtaaacaatgtgggaaagccttcagtgtttccggttcccttcaaagacatgaaaccactcacagtgcagagaaaccctatgcatgtcagcaatgtgggaaagcgtttcatcatctgggaagctttcaaagacacatgataaggcacactggaaatggacctcataaatgtaagatatgtgggaaaggctttgattgtcctagttcactgcaaagtcatgaaagaactcacactggagagaaaccctatgaatgcaagcagtgtgggaaagcattatctcatcgctcaagctttcgaagtcatatgataatgcacactggagatggacctcataaatgcaaggtatgtgggaaagcctttgtttatcccagtgtatttcaaagacatgaaaggactcacactgcagagaaaccctataaatgtaaacaatgtggcaaagcctaccgtatttccagttcccttcgaaggcatgaaacaactcatactggagagaaaccctataaatgcaaacttgggaaagcctttattgatttctgttcctttcaaaatcacaaaacaactcacactggagagaagccatatgagtgtaaggaatgtgggaaagcattcagtcgtttcagatacctttctcgacataaaaggactcacacaggagagaaaccttatgagtgtaaaacatgtaggaaagccttcggtcattatgataacttaaaggtacatgaaagaattcactctggagagaagccgtatgaatgtaaggaatgtgggaaagcattctcttggctcacttgctttctacgacatgaaagaattcacatgagagagaaatcctatgaatgtccacaatgtggtaaagccttcactcattcccgttttcttcaaggacatgaaaaaactcatactggagagaacccgtatgaatgtaaggaatgtgggaaagcatttgcttctctcagttccttgcatagacataaaaagactcactggaaaaaaactcacactggagagaacccatatgaatgtaaggaatgtgggaaagcatttgcttctctcagttccttgcatagacataaaaagactcactagcattctctctaaatgtatggaatgtgggaaagcatttattaattttatttcatttcagatacttgtacgaaacacattggagatagaccctgtgaatgtaagcacttggtaaagccttaagtagtttcagtttctttccagtacagtcatcccttgatacctgctgggtattggttccagcactccgtgagccatgtccagtcccttttataaaatgacatgtttgtatgtaacttacccacatcctcttgtatagtctcaattatgtctagattacttaaaatacctcatgcattataaaagctatgcaaatagttgttctattgtattgtttagggaatcatgataaggaaaagagtctatgtattttcagtatagatgcagtaattgtgagcctatcaacatagtgtagtcagccagaacattaaagtttctttgtttcaactctcaaaaaaaaaaaaaaaaaaaaaaaaaaaaaaaaaaaaaaaaaaaaaaaaaaaaaaaaaaaaaaaaaaaaaaaaa

SEQ ID NO: 159598 - DNA, 2016 bp, Artificial Sequence
  derived and/or modified sequence
atggccagcgtggccctggaggacgtggccgtgaacttcaccagagaggagtgggccctgctgggcccctgccagaagaacctgtacaaggacgtgatgcaggagaccatcagaaacctggactgcgtggtgatgaagtggaaggaccagaacatcgaggaccagtacagataccccagaaagaacctgagatgcagaatgctggagagattcgtggagagcaaggacggcacccagtgcggcgagaccagcagccagatccaggacagcatcgtgaccaagaacaccctgcccggcgtgggcccctgcgagagcagcatgagaggcgagaaggtgatgggccacagcagcctgaactgctacatcagagtgggcgccggccacaagccccacgagtaccacgagtgcggcgagaagcccgacacccacaagcagagaggcaaggccttcagctaccacaacagcttccagacccacgagagactgcacaccggcaagaagccctacgactgcaaggagtgcggcaagagcttcagcagcctgggcaacctgcagagacacatggccgtgcagagaggcgacggcccctacaagtgcaagctgtgcggcaaggccttcttctggcccagcctgctgcacatgcacgagagaacccacaccggcgagaagccctacgagtgcaagcagtgcagcaaggccttcagcttctacagcagctacctgagacacgagagaacccacaccggcgagaagccctacgagtgcaagcagtgcagcaaggccttccccttctacagcagctacctgagacacgagagaacccacaccggcgagaagccctacaagtgcaagcagtgcagcaaggccttccccgacagcagcagctgcctgatccacgagagaacccacaccggcgagaagccctacacctgcaagcagtgcggcaaggccttcagcgtgagcggcagcctgcagagacacgagaccacccacagcgccgagaagccctacgcctgccagcagtgcggcaaggccttccaccacctgggcagcttccagagacacatgatcagacacaccggcaacggcccccacaagtgcaagatctgcggcaagggcttcgactgccccagcagcctgcagagccacgagagaacccacaccggcgagaagccctacgagtgcaagcagtgcggcaaggccctgagccacagaagcagcttcagaagccacatgatcatgcacaccggcgacggcccccacaagtgcaaggtgtgcggcaaggccttcgtgtaccccagcgtgttccagagacacgagagaacccacaccgccgagaagccctacaagtgcaagcagtgcggcaaggcctacagaatcagcagcagcctgagaagacacgagaccacccacaccggcgagaagccctacaagtgcaagctgggcaaggcctgcatcgacttctgcagcttccagaaccacaagaccacccacaccggcgagaagccctacgagtgcaaggagtgcggcaaggccttcagcagattcagatacctgagcagacacaagagaacccacaccggcgagaagccctacgagtgcaagacctgcagaaaggccttcggccactacgacaacctgaaggtgcacgagagaatccacagcggcgagaagccctacgagtgcaaggagtgcggcaaggccttcagctggctgacctgcttcctgagacacgagagaatccacatgagagagaagagctacgagtgcccccagtgcggcaaggccttcacccacagcagattcctgcagggccacgagaagacccacaccggcgagaacccctacgagtgcaaggagtgcggcaaggccttcgccagcctgagcagcctgcacagacacaagaagacccactggaagaagacccacaccggcgagaacccctacgagtgcaaggagtgcggcaaggccttcgccagcctgagcagcctgcacagacacaagaagacccactag

SEQ ID NO: 159599 - DNA, 1932 bp, Artificial Sequence
  derived and/or modified sequence
atggccagcgtggccctggaggacgtggccgtgaacttcaccagagaggagtgggccctgctgggcccctgccagaagaacctgtacaaggacgtgatgcaggagaccatcagaaacctggactgcgtggtgatgaagtggaaggaccagaacatcgaggaccagtacagataccccagaaagaacctgagatgcagaatgctggagagattcgtggagagcaaggacggcacccagtgcggcgagaccagcagccagatccaggacagcatcgtgaccaagaacaccctgcccggcgtgggcccctgcgagagcagcatgagaggcgagaaggtgatgggccacagcagcctgaactgctacatcagagtgggcgccggccacaagccccacgagtaccacgagtgcggcgagaagcccgacacccacaagcagagaggcaaggccttcagctaccacaacagcttccagacccacgagagactgcacaccggcaagaagccctacgactgcaaggagtgcggcaagagcttcagcagcctgggcaacctgcagagacacatggccgtgcagagaggcgacggcccctacaagtgcaagctgtgcggcaaggccttcttctggcccagcctgctgcacatgcacgagagaacccacaccggcgagaagccctacgagtgcaagcagtgcagcaaggccttcagcttctacagcagctacctgagacacgagagaacccacaccggcgagaagccctacgagtgcaagcagtgcagcaaggccttccccttctacagcagctacctgagacacgagagaacccacaccggcgagaagccctacaagtgcaagcagtgcagcaaggccttccccgacagcagcagctgcctgatccacgagagaacccacaccggcgagaagccctacacctgcaagcagtgcggcaaggccttcagcgtgagcggcagcctgcagagacacgagaccacccacagcgccgagaagccctacgcctgccagcagtgcggcaaggccttccaccacctgggcagcttccagagacacatgatcagacacaccggcaacggcccccacaagtgcaagatctgcggcaagggcttcgactgccccagcagcctgcagagccacgagagaacccacaccggcgagaagccctacgagtgcaagcagtgcggcaaggccctgagccacagaagcagcttcagaagccacatgatcatgcacaccggcgacggcccccacaagtgcaaggtgtgcggcaaggccttcgtgtaccccagcgtgttccagagacacgagagaacccacaccgccgagaagccctacaagtgcaagcagtgcggcaaggcctacagaatcagcagcagcctgagaagacacgagaccacccacaccggcgagaagccctacaagtgcaagctgggcaaggcctgcatcgacttctgcagcttccagaaccacaagaccacccacaccggcgagaagccctacgagtgcaaggagtgcggcaaggccttcagcagattcagatacctgagcagacacaagagaacccacaccggcgagaagccctacgagtgcaagacctgcagaaaggccttcggccactacgacaacctgaaggtgcacgagagaatccacatgagagagaagagctacgagtgcccccagtgcggcaaggccttcacccacagcagattcctgcagggccacgagaagacccacaccggcgagaacccctacgagtgcaaggagtgcggcaaggccttcgccagcctgagcagcctgcacagacacaagaagacccactggaagaagacccacaccggcgagaacccctacgagtgcaaggagtgcggcaaggccttcgccagcctgagcagcctgcacagacacaagaagacccactag

SEQ ID NO: 159600 - DNA, 2016 bp, Artificial Sequence
  derived and/or modified sequence
atggcctctgtcgcccttgaggatgtagctgtaaacttcactcgggaggaatgggctttgcttggcccttgccagaaaaatctgtataaagatgtgatgcaggagacaatccgcaatcttgattgcgttgtgatgaagtggaaggatcaaaatatcgaagaccaataccgctaccctcgcaaaaacctgcgatgtcgtatgctggagcgatttgttgagtctaaggatgggacgcagtgcggggaaaccagctcccagattcaagattccatcgtcaccaagaatactctgcctggtgtgggaccatgcgagtcatcaatgcgaggtgagaaggtgatgggccactcctccttgaactgttacattagagtgggcgctggacacaaacctcacgaataccatgaatgcggggaaaagcccgatacgcataagcagcgaggcaaagcgttttcatatcataatagcttccaaacccatgagaggctccacacgggtaaaaagccatatgactgtaaggaatgcggcaagagtttcagctctctcggaaacctgcagaggcatatggccgtgcaacgcggcgatggaccttacaagtgcaagttgtgtgggaaagccttcttttggcccagtttgcttcacatgcatgagaggacgcataccggtgaaaagccttatgagtgtaagcaatgctctaaggccttctcgttttactcatcatacctgagacacgaaaggacgcacacaggagagaaaccctacgagtgtaagcagtgctccaaggcatttccattttacagcagctacctcaggcatgagagaacacatactggtgagaagccttacaagtgcaagcagtgtagtaaggccttccccgattcctcctcctgtcttattcacgagcggacccacaccggcgaaaagccatacacgtgcaagcagtgcggcaaggcattctcagtgtccggcagccttcaacgacacgaaaccactcactcggccgagaagccctacgcttgccagcagtgcggaaaagcattccaccacttaggaagcttccagcggcatatgatccggcataccggcaacggaccgcataaatgcaagatctgcggcaaaggattcgactgcccctctagtcttcagtcacacgagcggactcataccggagaaaaaccatatgagtgcaaacagtgcggcaaggcgctctcccatcggtcttcatttagaagccacatgatcatgcatacaggtgacggtccccacaagtgtaaagtgtgcggcaaggccttcgtgtacccaagcgtgttccagcgccacgaacgcactcacacggctgaaaaaccctacaagtgtaaacagtgtggtaaggcttataggatctccagttccctgcggagacatgagactacacatactggagagaaaccatacaagtgcaagctggggaaggcttgtatcgacttttgcagcttccagaaccacaaaaccacacacaccggcgagaagccatacgaatgcaaagagtgtggaaaggcattcagtcggtttagatatctgtcgcgacataagagaacacatacaggcgagaagccatatgaatgcaaaacctgccgtaaggcattcgggcactatgataaccttaaggtgcacgagcggatccacagtggagagaaaccttacgagtgcaaggagtgtggcaaagctttttcttggctcacttgtttcctccgccatgagcgcatacacatgcgcgaaaagagttatgagtgtccacaatgtggcaaagccttcacccacagccgtttcctgcaagggcatgagaagacccatactggggagaacccttacgagtgcaaggagtgcggcaaagcctttgcctctctgagctctttacaccgacacaagaagacacactggaagaagactcatactggagaaaatccgtatgagtgcaaggaatgtggcaaggcttttgcgtctctctcttccctgcatcgccacaaaaaaacccattag

SEQ ID NO: 159601 - DNA, 1932 bp, Artificial Sequence
  derived and/or modified sequence
atggcaagcgtggctctggaagacgtggcagtaaattttaccagggaagagtgggccctgttaggcccctgccaaaagaatttatacaaggatgtaatgcaagagactatcagaaacctggattgtgtggtaatgaagtggaaagatcagaatatcgaagaccagtacaggtatcctcgcaagaatctcaggtgccgcatgttagaacggttcgttgagtccaaagatggcacccaatgcggcgagacaagtagccagatccaagattcaatagtaaccaagaatacgctgcctggtgtcgggccctgcgagagcagcatgcggggggaaaaggtgatgggccattccagccttaattgctacatacgggtgggggccggacataagcctcacgaatatcacgagtgtggtgaaaagcctgatacacacaagcaacgtggcaaggctttctcctaccacaactcatttcagacacacgaacggctacataccggaaagaagccgtacgactgcaaagagtgcgggaagagtttctcatctcttggaaatttacagaggcacatggccgtgcaacgaggtgatggcccatacaagtgtaaactgtgcggaaaagctttcttctggccttctctccttcatatgcatgaacgaacacacacaggtgagaagccctacgaatgtaagcagtgttctaaggcctttagcttttatagttcctatctcaggcatgaaagaactcacactggggagaagccctatgagtgcaaacaatgcagtaaagccttcccattctatagttcctatctcaggcatgaaagaacccacactggcgaaaaaccttataaatgcaagcaatgctccaaagcattcccagattcatccagttgtctgatccatgagcgaacacacaccggggaaaagccctatacctgcaagcaatgcggcaaagcattttctgtgtcagggagcctacaacgccacgagacgacacatagcgccgagaagccctacgcatgtcagcagtgcggcaaagcctttcaccatttaggaagctttcaacggcatatgattcggcacaccggcaacggtccccacaagtgtaagatctgtggcaaagggtttgactgtcccagtagcctccagagtcacgagcgcactcacaccggtgagaaaccatatgaatgtaaacagtgcggaaaggcactcagtcatagaagcagcttcaggtcccacatgattatgcacacaggcgacggcccccataaatgtaaagtttgcggaaaggcctttgtataccccagcgtctttcagaggcacgaaagaacccacaccgcagaaaaaccatataagtgcaaacagtgtgggaaggcctaccggatttcctctagcctacggagacatgagacaacacacaccggcgaaaaaccttacaagtgcaaactgggcaaagcctgcattgacttctgtagctttcagaaccacaagacaacacacacaggagagaagccctacgaatgtaaggagtgtggcaaagctttctccaggtttcggtacctaagtagacataaacgaacccacaccggagagaaaccctacgagtgtaaaacttgcaggaaagccttcggccattatgataacttaaaagttcatgaacggattcatatgagagaaaagagctacgagtgtccccagtgcgggaaggcattcacacatagtagatttctccaggggcacgaaaaaacccatactggagagaacccttatgaatgcaaggagtgcgggaaggctttcgccagtctgtctagcctccatcggcataagaaaacacactggaaaaagacacacaccggtgagaacccttatgagtgcaaagagtgcggaaaagcctttgcaagcctgtctagcttgcatagacacaaaaagactcattag

SEQ ID NO: 159602 - DNA, 2016 bp, Artificial Sequence
  derived and/or modified sequence
atggcctctgtggccctggaggatgtggccgtgaacttcacccgggaggagtgggccctgctgggcccctgccagaagaacctgtacaaggatgtgatgcaggagaccatccggaacctggactgtgtggtgatgaagtggaaggaccagaacatcgaggaccagtaccgctaccccaggaagaacctgcgctgcaggatgctggagagatttgtggagagcaaggatggcacccagtgtggggagaccagcagccagatccaggacagcatcgtgaccaagaacaccctgcccggggtgggcccctgtgagagctccatgagaggagagaaggtgatgggccacagcagcctgaactgctacatccgggtgggcgccggccacaagccccatgagtaccatgaatgtggggagaagccagacacccacaagcagaggggcaaggccttctcctaccacaacagcttccagacccatgagcggctgcacacaggcaagaagccctatgactgcaaggaatgtgggaagagcttcagcagcctgggcaacctgcagaggcacatggctgtgcagagaggagatggcccctacaagtgcaagctgtgtgggaaggccttcttctggcccagcctgctgcacatgcatgagaggacccacactggagagaagccctatgagtgcaagcagtgcagcaaggccttctccttctacagcagctacctgcggcatgagaggacccacactggagagaagccctatgagtgcaagcagtgcagcaaggccttccccttctacagcagctacctgcggcatgagaggacccacactggagagaagccctacaagtgcaagcagtgcagcaaggccttcccagacagcagcagctgcctgattcatgagaggacccacactggagagaagccctacacctgcaagcagtgtgggaaggccttctctgtgtctggcagcctgcagagacatgagaccacccacagcgctgagaagccctatgcctgccagcagtgtgggaaggccttccaccacctgggcagcttccagaggcacatgatccgccacactggaaatggcccccacaagtgcaagatctgtgggaagggctttgactgccccagcagcctgcagagccatgagaggacccacactggagagaagccctatgagtgcaagcagtgtgggaaggccctgagccacaggagcagcttccgcagccacatgatcatgcacactggagatggcccccacaagtgcaaggtgtgtgggaaggcctttgtgtaccccagcgtcttccagagacatgagaggacccacacagctgagaagccctacaagtgcaagcagtgtgggaaggcctaccgcatcagcagcagcctgcggagacatgagaccacccacactggagagaagccctacaagtgcaagctgggcaaggcctgcatcgacttctgcagcttccagaaccacaagaccacccacactggagagaagccctatgagtgcaaggaatgtgggaaggccttcagccgcttccgctacctgagccgccacaagaggacccacactggagagaagccctatgagtgcaagacctgcaggaaggccttcggccactatgacaacctgaaggtgcatgagcgcatccacagcggggagaagccctatgagtgcaaggaatgtgggaaggccttctcctggctgacctgcttcctgcggcatgagcgcatccacatgagggagaagagctatgaatgtccccagtgtgggaaggccttcacccacagccgcttcctgcagggccacgagaagacccacactggagagaacccctatgagtgcaaggaatgtgggaaggcctttgccagcctgagcagcctgcaccgccacaagaagacccactggaagaagacccacactggagagaacccctatgagtgcaaggaatgtgggaaggcctttgccagcctgagcagcctgcaccgccacaagaagacccactag

SEQ ID NO: 159603 - DNA, 1932 bp, Artificial Sequence
  derived and/or modified sequence
atggcctctgtggccctggaggatgtggccgtgaacttcacccgggaggagtgggccctgctgggcccctgccagaagaacctgtacaaggatgtgatgcaggagaccatccggaacctggactgtgtggtgatgaagtggaaggaccagaacatcgaggaccagtaccgctaccccaggaagaacctgcgctgcaggatgctggagagatttgtggagagcaaggatggcacccagtgtggggagaccagcagccagatccaggacagcatcgtgaccaagaacaccctgcccggggtgggcccctgtgagagctccatgagaggagagaaggtgatgggccacagcagcctgaactgctacatccgggtgggcgccggccacaagccccatgagtaccatgaatgtggggagaagccagacacccacaagcagaggggcaaggccttctcctaccacaacagcttccagacccatgagcggctgcacacaggcaagaagccctatgactgcaaggaatgtgggaagagcttcagcagcctgggcaacctgcagaggcacatggctgtgcagagaggagatggcccctacaagtgcaagctgtgtgggaaggccttcttctggcccagcctgctgcacatgcatgagaggacccacactggagagaagccctatgagtgcaagcagtgcagcaaggccttctccttctacagcagctacctgcggcatgagaggacccacactggagagaagccctatgagtgcaagcagtgcagcaaggccttccccttctacagcagctacctgcggcatgagaggacccacactggagagaagccctacaagtgcaagcagtgcagcaaggccttcccagacagcagcagctgcctgattcatgagaggacccacactggagagaagccctacacctgcaagcagtgtgggaaggccttctctgtgtctggcagcctgcagagacatgagaccacccacagcgctgagaagccctatgcctgccagcagtgtgggaaggccttccaccacctgggcagcttccagaggcacatgatccgccacactggaaatggcccccacaagtgcaagatctgtgggaagggctttgactgccccagcagcctgcagagccatgagaggacccacactggagagaagccctatgagtgcaagcagtgtgggaaggccctgagccacaggagcagcttccgcagccacatgatcatgcacactggagatggcccccacaagtgcaaggtgtgtgggaaggcctttgtgtaccccagcgtcttccagagacatgagaggacccacacagctgagaagccctacaagtgcaagcagtgtgggaaggcctaccgcatcagcagcagcctgcggagacatgagaccacccacactggagagaagccctacaagtgcaagctgggcaaggcctgcatcgacttctgcagcttccagaaccacaagaccacccacactggagagaagccctatgagtgcaaggaatgtgggaaggccttcagccgcttccgctacctgagccgccacaagaggacccacactggagagaagccctatgagtgcaagacctgcaggaaggccttcggccactatgacaacctgaaggtgcatgagcgcatccacatgagggagaagagctatgaatgtccccagtgtgggaaggccttcacccacagccgcttcctgcagggccacgagaagacccacactggagagaacccctatgagtgcaaggaatgtgggaaggcctttgccagcctgagcagcctgcaccgccacaagaagacccactggaagaagacccacactggagagaacccctatgagtgcaaggaatgtgggaaggcctttgccagcctgagcagcctgcaccgccacaagaagacccactag

SEQ ID NO: 159604 - DNA, 2016 bp, Artificial Sequence
  derived and/or modified sequence
atggccagcgtggccctggaggacgtggccgtgaacttcacccgggaggagtgggccttgctgggcccatgccagaagaacctgtacaaggatgtgatgcaggaaactattcggaatttggactgtgttgtgatgaagtggaaagatcagaatattgaagaccagtatcggtacccccgtaagaatttgcggtgtcgcatgctagagaggtttgtggagtctaaagacgggacgcagtgcggtgaaactagttcacaaatacaggattcaattgtgaccaaaaacacactgcccggcgtgggtccgtgcgagagtagtatgagaggcgagaaggtcatgggtcattcttctttgaattgttacattagggttggggccggacacaagccacatgagtaccacgagtgcggcgaaaagcccgacacccataaacagcgcggcaaggcattcagctaccacaactctttccagacccacgaacgattgcacaccggtaagaagccatatgattgtaaggaatgcgggaagtccttctcatctctgggcaatctccagaggcatatggcagtgcaacggggagatgggccctacaagtgtaagctgtgtggtaaagcgttcttttggccctcgctactgcatatgcatgagcgcacgcatacaggggaaaaaccctacgagtgcaagcaatgttcaaaggctttttccttctactcaagctatcttcgccacgaacgaactcacacgggtgagaagccttatgagtgtaaacagtgtagcaaagcctttccgttctactccagttacctgcgccatgaaaggacccacacgggcgagaaaccctacaagtgcaagcagtgctcgaaggcttttcccgatagctcttcctgtctaatccacgaacgcacgcatacaggcgaaaaaccctacacctgcaagcagtgtggcaaagctttttccgtgagtggatctctgcagcgccacgagaccacccactccgccgaaaagccttatgcgtgccaacagtgcggtaaggccttccaccacttagggagctttcagcgacatatgatccggcatactggtaacgggccacataagtgtaagatttgtggtaagggctttgactgcccctcttctctgcagtcacatgagagaacacacaccggtgaaaaaccttacgaatgtaagcagtgtgggaaggccctgagccaccgctcaagcttccgctcacatatgattatgcatacaggcgatggacctcacaaatgcaaggtatgcgggaaggccttcgtatatcccagcgtgtttcaacgccacgagagaacacatacggcagagaagccatataaatgtaagcagtgtggcaaagcatacaggatctcttcctccctccggagacatgaaactacacatacgggggagaaaccttacaagtgcaagctcggcaaagcttgcatcgacttttgcagcttccagaatcataaaactacacacacgggtgaaaaaccttacgagtgtaaggagtgtggcaaagccttctctaggttcagatatctctcgcggcacaagagaactcacactggggaaaagccttacgaatgtaagacttgccgcaaggcattcggacactatgataaccttaaagtccatgaacgcatacacagtggcgaaaagccctatgaatgtaaggaatgtggcaaagcattcagttggctgacctgctttctccgacacgaacgtatccacatgcgcgagaagagctacgaatgccctcagtgcggaaaagcttttacacactcaaggttcctgcaaggccatgaaaaaactcatacaggagaaaacccttacgaatgcaaggagtgcgggaaggcctttgccagtctgtcatcactccatcgacacaagaaaactcactggaagaaaacccatactggggagaatccatacgagtgtaaggagtgtggaaaagctttcgcctcattatcatcgctgcacaggcacaagaaaactcactag

SEQ ID NO: 159605 - DNA, 1932 bp, Artificial Sequence
  derived and/or modified sequence
atggccagcgtggccctggaggacgtggccgtgaacttcacccgggaggagtgggccctactggggccctgtcagaaaaacctgtacaaggacgtgatgcaggagacgattaggaatctggactgtgtggttatgaagtggaaagaccaaaacattgaagatcagtacagataccccaggaagaacctgcggtgtcgtatgctggagcgatttgtcgagtccaaagatggaactcagtgtggggaaacctcctcccagatccaggacagtatagtgaccaaaaatacactgcccggcgttgggccttgcgagagttccatgaggggggagaaggttatgggacattcatcactcaactgctatatcagagttggcgccgggcacaaacctcacgagtatcatgaatgcggggaaaaacccgatacccataaacagcgggggaaggccttttcctaccataattccttccaaacccatgagcgtctgcatacggggaagaagccatatgattgcaaagaatgcggaaagtccttttcatctctcgggaatctgcagagacatatggccgtgcagcgcggcgacggcccatataagtgtaagctttgtggtaaagcttttttttggcccagtctactccatatgcatgagaggacgcatacaggcgagaaaccctatgagtgcaagcagtgtagcaaagcgtttagcttctactcttcttacttacggcacgagcgcactcacacaggcgagaaaccatatgagtgtaaacaatgtagtaaggcttttcctttctactcttcttacctgcgccacgagcgcactcatacaggggaaaaaccatacaaatgtaagcagtgctcaaaagcgttccctgattcctcaagctgtctcatccacgaacggacacatacaggggagaaaccatacacttgtaagcaatgcgggaaggcattctctgtctccggatccctccagagacatgaaaccacccattccgccgagaagccatatgcctgtcagcaatgtggtaaagcattccaccatcttggctcattccagagacacatgatccgtcacacaggcaacgggccacacaagtgcaagatttgcggcaagggcttcgactgcccttcaagtctccaaagtcatgaaaggacacacacaggcgagaaaccatatgaatgcaaacaatgtgggaaggccctgtcccatagatcctcattcagatcacatatgatcatgcacacaggggatggaccccataaatgcaaagtctgcggaaaagccttcgtttaccccagcgttttccaacggcatgaacgaacacataccgctgagaagccatataaatgtaaacaatgcgggaaggcatataggatcagtagctccctgcgcaggcacgagacgactcataccggggaaaagccatacaagtgtaagttgggaaaggcatgtattgacttttgcagctttcaaaaccacaaaactactcacaccggcgagaagccatacgagtgtaaagagtgcggaaaagcttttagtcgatttcgctatttgagtcgccataagcggactcacactggggagaagccctatgagtgtaaaacttgtagaaaagcttttggtcactatgataacttgaaagtacatgagcgcatacatatgcgcgaaaaaagctatgaatgtccccagtgtggtaaggccttcacacacagccggttcctccaaggccacgaaaagacccacaccggggaaaatccctacgagtgcaaagaatgcgggaaagcttttgctagtctatcgagccttcatcggcacaaaaagacgcactggaagaaaacccatacgggggagaacccttatgaatgcaaggagtgcggtaaagcgtttgccagcttgtcttcactgcacagacataagaagacccactag

SEQ ID NO: 159606 - DNA, 2016 bp, Artificial Sequence
  derived and/or modified sequence
atggcatccgtggccttagaagatgtagccgttaacttcactcgggaggaatgggccctgttaggcccatgccaaaaaaacttgtacaaggacgtgatgcaagagacgatacggaatcttgattgtgtggtgatgaaatggaaagatcagaatattgaggatcagtaccggtacccacgcaaaaacctcaggtgtcgcatgcttgagaggttcgtcgagtccaaggatggcactcagtgcggtgagacatcatcacagattcaggattcaattgtgacaaaaaacactctgccgggagttgggccatgtgaatcgtctatgcgaggcgagaaggtgatgggacattcttcgttaaactgttatattcgcgtcggagcaggacacaagccgcacgaatatcacgaatgcggcgaaaaacccgacacacataagcagagaggcaaagccttctcgtatcacaatagtttccagactcatgagcggttgcacaccggcaaaaagccctatgattgcaaagagtgcggaaaaagcttttcctcactggggaacttgcagaggcatatggccgtccagcgaggggacgggccatataagtgcaaactgtgcggcaaagcctttttctggccgagtttactgcatatgcatgaacgcacccacacaggggaaaagccctatgagtgcaagcaatgctcaaaggccttttcattctactctagctacctgcgtcatgaaagaacacatacaggcgaaaaaccctacgagtgcaagcaatgcagcaaagccttccctttttattctagttacctgagacacgaacggactcacactggcgaaaagccttataaatgcaagcagtgcagcaaggctttccctgacagttcctcgtgcctcatccacgaacgcacccatacgggcgaaaaaccttatacttgcaaacaatgcgggaaggctttctccgtgagcggtagtctgcaaagacacgagacaactcactctgctgaaaagccatatgcttgccagcagtgtggcaaggctttccatcacctgggatccttccaaagacacatgatccgccacaccggcaacggtccacataagtgcaagatttgtggaaaagggttcgactgcccctcaagcctccagagccatgagagaacgcatacaggtgagaaaccctatgagtgtaagcagtgtgggaaggccctctcccataggagttcatttcgcagtcatatgattatgcacacaggagatggcccacacaaatgtaaagtgtgcggcaaggcatttgtttatccatcagtgtttcaacgacatgaaaggacccacaccgccgagaagccgtacaagtgtaaacaatgcgggaaagcatacaggataagtagctcactcagacggcatgaaacaacccataccggcgagaagccttataaatgcaaactcgggaaagcctgtattgacttttgctcattccagaaccataaaaccacacataccggagagaagccctatgagtgtaaagaatgtggaaaggccttctctaggttcagatatctgagtcggcataaacggacccatactggtgaaaagccatacgagtgtaagacgtgccggaaagcatttggacactacgacaacctgaaagtgcacgaaaggatccatagcggggaaaagccctacgaatgtaaggagtgtgggaaagccttctcgtggcttacttgcttcctgcgtcatgagcgcatccacatgcgcgagaagtcttacgaatgcccacagtgcggaaaggcctttacccactcacgcttcctgcaggggcacgaaaagactcacaccggagaaaacccttacgagtgcaaagaatgcgggaaagcatttgcctcactgagttccctgcaccggcacaagaagacacattggaagaagacccacaccggcgagaatccttatgaatgcaaggaatgcgggaaggcgtttgcttccctgagctcattgcaccggcacaaaaagacgcactag

SEQ ID NO: 159607 - DNA, 1932 bp, Artificial Sequence
  derived and/or modified sequence
atggcctccgttgctcttgaggacgttgccgtaaactttacccgagaggagtgggcattattgggaccctgccaaaagaacctgtataaagacgtcatgcaggagactataagaaaccttgactgcgtcgtgatgaagtggaaagatcaaaacatagaggatcaatatagatacccgagaaagaatctgagatgccggatgctggaaagatttgtggagtccaaggacggcacccagtgtggggaaactagcagccagatccaggattctattgtcaccaaaaacaccctccccggagtgggaccgtgcgaatcttcaatgcggggagagaaggttatggggcactcatctctcaactgctacatacgggtgggggctgggcacaagccacacgagtaccacgagtgtggggagaagccagatacccacaaacagcggggaaaggccttttcctaccataatagctttcagacccatgaacgccttcacacagggaagaagccatacgattgtaaagagtgtggaaagagtttctcaagcctgggcaatctgcagaggcacatggcagtgcagcgcggagatggtccttataagtgcaagttatgtggaaaggctttcttttggccgagtctgctgcatatgcacgagcgtacacataccggagaaaaaccatatgagtgtaagcagtgctcaaaagctttctccttttacagcagctacttaaggcatgagcgcacgcacactggtgagaaaccttacgagtgcaagcaatgtagcaaagccttcccgttttatagcagttacctgaggcatgagaggacccacaccggggaaaagccatacaaatgcaagcaatgctcaaaggcattcccagatagctcgtcttgtctgatccacgaaaggacacacacaggggagaagccctacacatgcaagcagtgcggcaaagccttttccgtgagtggcagtctacagcgacacgaaacaactcattccgccgaaaaaccatacgcatgtcaacaatgtggcaaagccttccatcacttaggctccttccagaggcacatgatcaggcatactggaaacggccctcacaagtgcaaaatttgcggaaagggattcgactgcccctcttcactacagagccacgaacggacccataccggcgaaaaaccttacgagtgcaaacaatgtgggaaagcactgagccaccgatcatctttccgatcccatatgattatgcacacaggggacggtcctcataaatgtaaggtgtgcgggaaggctttcgtctatccaagcgtcttccagcgccacgagcggacccataccgcagaaaaaccctataaatgcaagcagtgtggaaaggcataccggatcagttcctcactgcggcgacacgagacaacacacactggggagaaaccctacaaatgtaaactagggaaagcctgtatcgatttctgcagtttccagaaccacaagactacacacaccggagagaagccatacgaatgtaaggagtgcggaaaggcgttcagcagatttcgctatctttccaggcacaaacgtactcacacaggcgagaagccttacgaatgcaagacgtgccggaaggctttcggccactatgataacctcaaggttcacgaacgcatccatatgcgagaaaagagctatgagtgtccccaatgcggtaaggcgtttacacacagtcgattcttgcagggccacgaaaagacgcacaccggcgagaacccctatgaatgcaaagagtgtggaaaagctttcgcgtctctatcgtccctacatcggcataaaaagacacactggaagaaaacacacacgggggagaatccctacgaatgcaaagagtgtggtaaggccttcgctagcttgtcgagtttgcaccggcacaagaagacccactag

SEQ ID NO: 159608 - DNA, 2663 bp, Artificial Sequence
  derived and/or modified sequence
aactgtcaatcaggcactgcccagagaagtgtgtgtggttgaaaaagcccgcggcgtctgctccacccacctgcgctcggctctgggttctgtagctgagagacgacctggaagttctgaggcagcctttgtctggctggaacacgcattggcagcgggagctgtcggtaggacctgggacaccgcggaagtcgggaaatggcctcagtggctttagaggatgtggctgtgaacttcacccgagaagagtgggctttgctgggtccttgtcagaagaatctctacaaagatgtgatgcaggaaaccatcaggaacctggattgtgtagtaatgaaatggaaagaccagaacattgaagatcaatatagatatcccaggaaaaatctaagatgtcgtatgttagagagatttgttgaaagtaaagatggaactcaatgtggagaaacatctagccagattcaagatagtattgtgaccaagaacactcttcctggagtaggtccttgtgaaagcagtatgagaggagaaaaagtcatgggtcattcatcccttaattgttacatcagagttggtgctgggcacaaaccacatgagtatcatgaatgtggagagaagccagatacgcataaacaacgtgggaaagccttcagttaccacaactcatttcaaacacatgagaggcttcacactggaaagaaaccatatgattgtaaagaatgtgggaagtccttcagttctttgggaaaccttcaaagacacatggcagtgcagcgtggagatggaccttataaatgtaagttgtgtgggaaagcgtttttttggcccagtttattacatatgcatgaaagaacgcacactggagagaaaccatatgaatgtaagcagtgttctaaagccttttctttttacagttcctatctaagacatgaaagaacacatactggggagaaaccgtatgaatgtaaacagtgttctaaagcctttcctttttacagttcctatctaagacatgaaagaacacatactggggagaaaccatataaatgtaagcagtgttctaaagccttccctgattccagttcttgtctaatacatgaaagaactcacactggagagaaaccctatacatgtaaacaatgtgggaaagccttcagtgtttccggttcccttcaaagacatgaaaccactcacagtgcagagaaaccctatgcatgtcagcaatgtgggaaagcgtttcatcatctgggaagctttcaaagacacatgataaggcacactggaaatggacctcataaatgtaagatatgtgggaaaggctttgattgtcctagttcactgcaaagtcatgaaagaactcacactggagagaaaccctatgaatgcaagcagtgtgggaaagcattatctcatcgctcaagctttcgaagtcatatgataatgcacactggagatggacctcataaatgcaaggtatgtgggaaagcctttgtttatcccagtgtatttcaaagacatgaaaggactcacactgcagagaaaccctataaatgtaaacaatgtggcaaagcctaccgtatttccagttcccttcgaaggcatgaaacaactcatactggagagaaaccctataaatgcaaacttgggaaagcctgtattgatttctgttcctttcaaaatcacaaaacaactcacactggagagaagccatatgagtgtaaggaatgtgggaaagcattcagtcgtttcagatacctttctcgacataaaaggactcacacaggagagaaaccttatgagtgtaaaacatgtaggaaagccttcggtcattatgataacttaaaggtacatgaaagaattcactctggagagaagccgtatgaatgtaaggaatgtgggaaagcattctcttggctcacttgctttctacgacatgaaagaattcacatgagagagaaatcctatgaatgtccacaatgtggtaaagccttcactcattcccgttttcttcaaggacatgaaaaaactcatactggagagaacccgtatgaatgtaaggaatgtgggaaagcatttgcttctctcagttccttgcatagacataaaaagactcactggaaaaaaactcacactggagagaacccatatgaatgtaaggaatgtgggaaagcatttgcttctctcagttccttgcatagacataaaaagactcactagcattctctctaaatgtatggaatgtgggaaagcatttattaattttatttcatttcagatacttgtacgaaacacattggagatagaccctgtgaatgtaagcacttggtaaagccttaagtagtttcagtttctttccagtacagtcatcccttgatacctgctgggtattggttccagcactccgtgagccatgtccagtcccttttataaaatgacatgtttgtatgtaacttacccacatcctcttgtatagtctcaattatgtctagattacttaaaatacctcatgcattataaaagctatgcaaatagttgttctattgtattgtttagggaatcatgataaggaaaagagtctatgtattttcagtatagatgcagtaattgtgagcctatcaacatagtgtagtcagccagaacattaaagtttctttgtttcaactctc

SEQ ID NO: 159609 - DNA, 2239 bp, Artificial Sequence
  derived and/or modified sequence
gtcggtaggacctgggacaccgcggaagtcgggaaatggcctcagtggctttagaggatgtggctgtgaacttcacccgagaagagtgggctttgctgggtccttgtcagaagaatctctacaaagatgtgatgcaggaaaccatcaggaacctggattgtgtagtaatgaaatggaaagaccagaacattgaagatcaatatagatatcccaggaaaaatctaagatgtcgtatgttagagagatttgttgaaagtaaagatggaactcaatgtggagaaacatctagccagattcaagatagtattgtgaccaagaacactcttcctggagtaggtccttgtgaaagcagtatgagaggagaaaaagtcatgggtcattcatcccttaattgttacatcagagttggtgctgggcacaaaccacatgagtatcatgaatgtggagagaagccagatacgcataaacaacgtgggaaagccttcagttaccacaactcatttcaaacacatgagaggcttcacactggaaagaaaccatatgattgtaaagaatgtgggaagtccttcagttctttgggaaaccttcaaagacacatggcagtgcagcgtggagatggaccttataaatgtaagttgtgtgggaaagcgtttttttggcccagtttattacatatgcatgaaagaacgcacactggagagaaaccatatgaatgtaagcagtgttctaaagccttttctttttacagttcctatctaagacatgaaagaacacatactggggagaaaccgtatgaatgtaaacagtgttctaaagcctttcctttttacagttcctatctaagacatgaaagaacacatactggggagaaaccatataaatgtaagcagtgttctaaagccttccctgattccagttcttgtctaatacatgaaagaactcacactggagagaaaccctatacatgtaaacaatgtgggaaagccttcagtgtttccggttcccttcaaagacatgaaaccactcacagtgcagagaaaccctatgcatgtcagcaatgtgggaaagcgtttcatcatctgggaagctttcaaagacacatgataaggcacactggaaatggacctcataaatgtaagatatgtgggaaaggctttgattgtcctagttcactgcaaagtcatgaaagaactcacactggagagaaaccctatgaatgcaagcagtgtgggaaagcattatctcatcgctcaagctttcgaagtcatatgataatgcacactggagatggacctcataaatgcaaggtatgtgggaaagcctttgtttatcccagtgtatttcaaagacatgaaaggactcacactgcagagaaaccctataaatgtaaacaatgtggcaaagcctaccgtatttccagttcccttcgaaggcatgaaacaactcatactggagagaaaccctataaatgcaaacttgggaaagcctgtattgatttctgttcctttcaaaatcacaaaacaactcacactggagagaagccatatgagtgtaaggaatgtgggaaagcattcagtcgtttcagatacctttctcgacataaaaggactcacacaggagagaaaccttatgagtgtaaaacatgtaggaaagccttcggtcattatgataacttaaaggtacatgaaagaattcacatgagagagaaatcctatgaatgtccacaatgtggtaaagccttcactcattcccgttttcttcaaggacatgaaaaaactcatactggagagaacccgtatgaatgtaaggaatgtgggaaagcatttgcttctctcagttccttgcatagacataaaaagactcactggaaaaaaactcacactggagagaacccatatgaatgtaaggaatgtgggaaagcatttgcttctctcagttccttgcatagacataaaaagactcactagcattctctctaaatgtatggaatgtgggaaagcatttattaattttatttcatttcagatacttgtacgaaacacattggagatagaccctgtgaatgtaagcacttggtaaagccttaagtagtttcagtttctttccagtacagtcatcccttgatacctgctgggtattggttccagcactccgtgagccatgtccagtcccttttataaaatgacatgtttgtatgtaacttacccacatcctcttgtatagtctcaattatgtctag

SEQ ID NO: 159610 - protein, 569 aa, Artificial Sequence
  derived and/or modified sequence
MEKKWKYCAVYYIIQIHFVKGVWEKTVNTEENVYATLGSDVNLTCQTQTVGFFVQMQWSKVTNKIDLIAVYHPQYGFYCAYGRPCESLVTFTETPENGSKWTLHLRNMSCSVSGRYECMLVLYPEGIQTKIYNLLIQTHVTADEWNSNHTIEIEINQTLEIPCFQNSSSKISSEFTYAWSVEDNGTQETLISQNHLISNSTLLKDRVKLGTDYRLHLSPVQIFDDGRKFSCHIRVGPNKILRSSTTVKVFAKPEIPVIVENNSTDVLVERRFTCLLKNVFPKANITWFIDGSFLHDEKEGIYITNEERKGKDGFLELKSVLTRVHSNKPAQSDNLTIWCMALSPVPGNKVWNISSEKITFLLGSEISSTDPPLSVTESTLDTQPSPASSVSPARYPATSSVTLVDVSALRPNTTPQPSNSSMTTRGFNYPWTSSGTDTKKSVSRIPSETYSSSPSGAGSTLHDNVFTSTARAFSEVPTTANGSTKTNHVHITGIVVNKPKDGMSWPVIVAALLFCCMILFGLGVRKWCQYQKEIMERPPPFKPPPPPIKYTCIQEPNESDLPYHEMETL

SEQ ID NO: 159611 - DNA, 1710 bp, Artificial Sequence
  derived and/or modified sequence
atggaaaagaagtggaagtactgtgccgtgtactatatcattcagatccacttcgttaagggagtgtgggagaaaaccgttaacactgaagaaaacgtgtacgccactctcggtagcgacgtgaatctcacctgtcagacccagacggtcggttttttcgtgcagatgcaatggtcaaaggtcactaataagattgatttgatcgccgtgtatcatccccagtacgggttctattgcgcatatggtagaccttgcgaatcgctcgtgacctttaccgaaacccccgagaacggtagtaaatggacactccatcttagaaacatgagctgttcagtttctggcagatatgagtgcatgctagtgctgtaccccgagggcatccaaaccaagatctataatttgctgattcagacccacgtaactgcagatgagtggaacagcaatcacacaatcgagatcgagatcaatcagaccctggaaatcccctgcttccagaactcatcgagcaagatcagtagcgaattcacttacgcttggtccgtagaggacaatggaactcaggaaacgctgatttcccagaaccatctgataagtaacagtacattactgaaggaccgtgtcaagctggggacagattacaggcttcacctgagcccggtgcagatctttgacgatggtcggaaattttcgtgccacatcagggttggccctaacaagattctgaggtccagcacaacagtgaaggtatttgccaagccagaaattcccgtcatagtagagaacaattctaccgatgtgctggtggaacggcgctttacttgcctgttgaaaaacgtatttcctaaagctaatatcacctggttcatcgatggatccttcctacatgacgagaaggagggaatctacataaccaatgaggaacggaagggtaaagacggcttcttggaactgaaaagtgtactaacacgagtccatagcaacaaaccagcccagtctgacaacctgacaatttggtgcatggcactgagtccagtgccaggaaacaaggtgtggaacatttcaagcgagaagatcacatttttattaggctctgagatttcaagcaccgatccaccactgtctgtcacagagagcaccctggatacacagccatctcctgcaagcagcgttagcccagcccgctaccctgctactagctccgtgacactggtcgacgtttcagcgctgaggcccaacaccacaccacagcctagcaacagcagcatgactacgcgaggttttaattacccatggacaagctccggaacggataccaaaaagtctgtcagcaggatcccgtcagagacatacagcagttcccccagcggtgccggctctacccttcatgataacgtgtttacctccaccgcgcgagccttcagtgaagtgcctactacagctaacggaagtaccaaaactaaccacgtgcacatcacgggaatcgtggtgaataaaccaaaagatgggatgtcatggccagtgattgtggctgctttattgttttgctgtatgatcctcttcggtttgggagtccgaaagtggtgtcagtaccagaaggagatcatggaacgtccccccccctttaaacccccgcctccccccataaagtatacatgcatacaggaaccgaatgaaagtgatctgccataccacgagatggaaaccctgtag

SEQ ID NO: 159612 - DNA, 1710 bp, Artificial Sequence
  derived and/or modified sequence
atggagaagaagtggaagtactgtgctgtgtactacatcatccagatccactttgtgaagggcgtgtgggagaagacagtgaacacagaagaaaatgtgtatgccaccctgggcagtgatgtgaacctgacctgccagacccagacagtgggcttctttgtgcagatgcagtggagcaaggtgaccaacaagattgacctgattgctgtgtaccacccccagtatggcttctactgtgcctacggccggccctgtgagagcctggtgaccttcacagagaccccagaaaatggcagcaagtggaccctgcacctgaggaacatgagctgcagcgtgtctggccgctatgagtgcatgctggtgctgtacccagagggcatccagaccaagatctacaacctgctgatccagacccacgtgacagcagatgagtggaacagcaaccacaccattgaaattgagatcaaccagaccctggagatcccctgcttccagaacagcagcagcaagatcagcagcgagttcacctacgcctggagcgtggaggacaatggcacccaggagaccctcatcagccagaaccacctgatcagcaacagcaccctgctgaaggacagagtgaagctgggcacagactaccgcctgcacctgagccctgtgcagatctttgatgatggcaggaagttcagctgccacatccgggtgggccccaacaagatcctgcggagcagcaccaccgtgaaggtgtttgccaagccagagatccctgtgattgtggagaacaacagcacagatgtgctggtggagcggcgcttcacctgcctgctgaagaatgtgttccccaaggccaacatcacctggttcattgatggcagcttcctgcatgatgagaaggagggcatctacatcaccaatgaggagaggaagggcaaggatggcttcctggagctgaagtctgtgctgaccagggtgcacagcaacaagccagcccagagcgacaacctgaccatctggtgcatggccctgagccctgtgcccggcaacaaggtgtggaacatcagcagcgagaagatcaccttcctgctgggcagcgagatcagcagcacagatcctcccctgtctgtgacagagagcaccctggacacccagcccagccctgccagctctgtgtccccagcccgctacccagccaccagctctgtgaccctggtggatgtgtctgccctgcggcccaacaccaccccccagcccagcaacagctccatgaccacccggggcttcaactacccctggaccagcagcggcacagacaccaagaagtctgtgagccgcatccccagcgagacctacagcagcagccccagcggggccggcagcaccctgcatgacaacgtgttcaccagcacagcccgggccttcagcgaggtgcccaccacagccaacggcagcaccaagaccaaccacgtgcacatcaccggcatcgtggtgaacaagcccaaggatggcatgtcctggcctgtgattgtggccgccctgctcttctgctgcatgatcctgtttggcctgggcgtgaggaagtggtgccagtaccagaaggagatcatggagcggcccccacccttcaagcccccacctccacccatcaagtacacctgcatccaggagcccaatgaaagtgacctgccctaccacgagatggagaccctgtag

SEQ ID NO: 159613 - DNA, 1710 bp, Artificial Sequence
  derived and/or modified sequence
atggagaagaagtggaagtactgcgccgtgtactacatcatccagattcattttgttaagggtgtgtgggaaaagaccgtaaacactgaagagaacgtgtatgcgactttggggtcagatgtaaatctgacatgccagactcagactgttggcttcttcgttcagatgcagtggagcaaggtaaccaacaaaatcgacctgatagccgtctaccatcctcaatacggattctactgcgcttatggacgaccttgtgagtcgctggtcacctttacggaaacaccagaaaacggctctaagtggacgctgcatttgaggaacatgtcctgctctgtgagcggccgctatgaatgcatgctggtcctgtaccctgagggcatccagacaaaaatttataatctgctaattcaaacccacgtgaccgccgatgaatggaattctaaccataccatcgaaatagagattaatcaaactttggaaattccctgcttccagaactcctccagcaaaattagctccgaattcacgtacgcttggagtgtagaggacaacggaacgcaagagactcttattagccagaatcacttgatcagcaattctacattgctgaaggacagagtcaagcttggcaccgactacagacttcatttatccccagtgcagatttttgatgatgggcggaagtttagctgccacatcagggtaggaccaaacaagatacttcgcagttccacaaccgtgaaagtattcgccaagccagagattcccgtcatcgtggaaaataactctacagacgtcctcgtcgagcggcggtttacttgcttgctgaagaacgttttccccaaagctaacatcacatggtttatagatgggtctttcctgcatgatgagaaggaagggatctacatcactaatgaggaacggaaagggaaggatggatttctggagctcaagtcggtgttgacgagggtgcactccaataagcccgcccaatcagataacctgaccatctggtgcatggctctgagcccagtgcccggcaataaggtatggaacatttccagcgaaaagatcacatttctactgggcagtgagatttcttcaaccgacccccctctgtcagtgactgagtctacgctggatactcagcccagccccgccagtagcgtgagccctgcaaggtacccagccacgtcttccgttacgctggtggacgtctctgcccttagacctaacacaaccccacagcccagcaatagctcaatgaccacgcgcggatttaactacccctggaccagctcaggcacagataccaaaaagtccgttagccgaatacctagcgagacgtattcttcgtcaccatctggagcaggctccacacttcatgataacgtgttcacctccacggcccgcgcgttttccgaggtgcccacaacggctaacggaagcacaaaaacaaaccatgtacatattactggaattgtggttaacaagcccaaagacgggatgtcctggcccgtgatcgtcgccgcgctgcttttctgttgtatgatcctgttcggactcggcgtccgaaagtggtgccaataccagaaggaaatcatggaacgaccccctcctttcaagccccctccaccacctatcaagtatacatgcattcaggagccaaatgaatcagatctgccatatcacgaaatggagaccctgtag

SEQ ID NO: 159614 - DNA, 1710 bp, Artificial Sequence
  derived and/or modified sequence
atggagaagaaatggaagtattgcgccgtctactacattatccaaatccactttgtaaagggagtgtgggagaaaactgttaataccgaggagaacgtgtacgctacactcgggagtgacgtcaatctgacctgccagacccagaccgtggggttctttgttcagatgcaatggtcgaaggtgacaaacaaaatcgacctgatcgctgtgtatcacccccaatacggattttactgcgcctatggacgaccctgcgagtcgcttgttaccttcaccgaaacccctgagaatggatcaaaatggactctgcaccttaggaatatgagttgcagcgtttctggacgatatgaatgcatgctcgtgctctatcccgaaggcatccagacaaaaatctacaacctccttatccaaacccacgtgacagctgacgaatggaatagtaatcacaccattgaaatcgagattaatcaaacactggaaatcccctgttttcagaattcttcgtccaagatctctagtgagtttacttacgcctggagcgtcgaggacaacgggacccaggagactctgatcagtcagaaccacctcatttccaatagcacactgctgaaggatcgcgtgaagctgggaaccgattaccgacttcacctctcacccgtacaaatcttcgatgacggtagaaaattcagctgtcacatcagggtaggccctaataagattctgcgatcatctactacggttaaggtgtttgcgaagcccgaaatcccagtaattgttgagaacaactccactgacgtgctcgtggagcgtcggtttacctgcctgctgaagaacgtgtttcccaaagcaaatatcacgtggttcattgatggtagttttttgcacgacgaaaaagagggcatttatatcactaatgaagagcgcaagggcaaagatggctttttagagctcaaaagcgttttgacgagagttcattctaataaacccgcacagtcggataacctcactatatggtgtatggccttaagtccggtacctgggaataaggtatggaatattagttcagagaagatcactttccttctgggcagtgaaatcagctccaccgaccccccactttctgtaacagaaagtaccctggacacgcaaccgagtccagcctcttccgtctcccctgctcggtatccagccacttccagcgtgaccctggtggacgttagtgcactgcgaccaaacactaccccacagccatccaattccagcatgacgacacgaggtttcaattatccatggacaagctcagggacggatacgaagaagtcagtgtccaggataccttcagaaacctactcaagcagcccctcaggcgctgggtcaaccctgcatgataatgtgttcacgtcaaccgcccgagcctttagcgaggtccccacgactgccaacggcagcacaaagacaaaccatgttcatatcacgggtattgtggtgaataaacctaaggacggcatgtcttggcctgtcatagtcgccgcactgcttttctgctgcatgatccttttcggcctcggagtgagaaagtggtgccaatatcagaaggaaatcatggaaagacccccacctttcaagccaccacctccccctattaagtatacctgtattcaggagccaaacgagagcgacctgccataccacgaaatggagacgttatag

SEQ ID NO: 159615 - DNA, 4315 bp, Artificial Sequence
  derived and/or modified sequence
ttcctgtctacgtttcatttcctgggggcttgccaagtgataaacagacccaggcgtgtgtggtagagttcgggttttttagcacgaagtgggtggctggagtttgcttgaaaacatcaattgactttgtgatcattacagaaatgctggtgtaaggtgttcagaagacaatggagaaaaaatggaaatactgtgctgtctattacatcatccagatacattttgtcaagggagtttgggaaaaaacagtcaacacagaagaaaatgtttatgctacacttggctctgatgtcaacctgacctgccaaacacagacagtaggcttcttcgtgcagatgcaatggtccaaggtcaccaataagatagacctgattgctgtctatcatccccaatacggcttctactgtgcctatgggagaccctgtgagtcacttgtgactttcacagaaactcctgagaatgggtcaaaatggactctgcacttaaggaatatgtcttgttcagtcagtggaaggtacgagtgtatgcttgttctgtatccagagggcattcagactaaaatctacaaccttctcattcagacacacgttacagcagatgaatggaacagcaaccatacgatagaaatagagataaatcagactctggaaataccatgctttcaaaatagctcctcaaaaatttcatctgagttcacctatgcatggtcggtggaggataatggaactcaggaaacacttatctcccaaaatcacctcatcagcaattccacattacttaaagatagagtcaagcttggtacagactacagactccacctctctccagtccaaatcttcgatgatgggcggaagttctcttgccacattagagtcggtcctaacaaaatcttgaggagctccaccacagtcaaggtttttgctaaaccagaaatccctgtgattgtggaaaataactccacggatgtcttggtagagagaagatttacctgcttactaaagaatgtatttcccaaagcaaatatcacatggtttatagatggaagttttcttcatgatgaaaaagaaggaatatatattactaatgaagagagaaaaggcaaagatggatttttggaactgaagtctgttttaacaagggtacatagtaataaaccagcccaatcagacaacttgaccatttggtgtatggctctgtctccagtcccaggaaataaagtgtggaacatctcatcagaaaagatcacttttctcttaggttctgaaatttcctcaacagaccctccactgagtgttacagaatctacccttgacacccaaccttctccagccagcagtgtatctcctgcaagatatccagctacatcttcagtgacccttgtagatgtgagtgccttgaggccaaacaccactcctcaacccagcaattccagtatgactacccgaggcttcaactatccctggacctccagtgggacagataccaaaaaatcagtttcacggatacctagtgaaacatacagttcatccccgtcaggtgcaggctcaacacttcatgacaatgtctttaccagcacagccagagcattttcagaagtccccacaactgccaatggatctacgaaaactaatcacgtccatatcactggtattgtggtcaataagcccaaagatggaatgtcctggccagtgattgtagcagctttactcttttgctgcatgatattgtttggtcttggagtgagaaaatggtgtcagtaccaaaaagaaataatggaaagacctccacctttcaagccaccaccacctcccatcaagtacacttgcattcaagagcccaacgaaagtgatctgccttatcatgagatggagaccctctagtctcgtgagactttgccccatggcagaactctgctggaatcctattgagaaggtagacattgtgctttattaatatagtcgctcttcagccatgcctttgctgcagctgaaatggaagtcagaagtgagtgacctgttttcccagcaactcaccctcttccatctccaaacgcctgaagcttaaccaagagtgagaggatatgtcatgttcacactcaatgcaattcgtagtggttttcttgcttatgtaagaagtacatattagtctgccatctttaaaaaaaaatacagtattttcatttaaattctctgatggagggacaacaatggtttcaactgtatgcccatgcctgatcctcttatttgaacatctatcaacattgtaaactctttgccaaaatcctggggctttgctgcattccctaagataattacaggaaaaagaaaatgtaaaagtgctaacaaggctgccaagtaatggagaagtatggttagtcttcatattgaaattctgttgcttattttcatggaaggaaacagaatactttgcacaggaaccacattttcaatcctccttcactgtcttcctaccatgttcagcccagactcctgccacatggaccaggatgaagagggatcaaagagataattagccaaaaacccagtagcctagaagatacaaaactccactggcctctaaaattatattagccaagagtggtttcatttgagtgccttcgtgtgtatgtccatcaaactggaaccaaactgttttgtaagtaaacaggcagcctaagcccaaccctactttctaattccagttattctctttttcatctggggatttacctgttcatttaatctgcctgttttgatctgttttgaaaaagataaagagcctcaaatcagaccagcactgattaattaaccctgctcctaccaatcttttttaaagcagttgaagcagaatgtataggtgtcagagaagaaacctagtcagccagacgtgctctgtattcagcaatagtttgtgaatgaataaattactaatcctccttgtcgcttgaaaccttcccacactccctgctccaggagggaaaaacagatgttgttgacagatagagtgataggcaaattctgtgtggactttagtcccaaaaggaaactttagttcacttgcagtatgcttatccttgactgcacatgagaatgccttgtgcagagttatttggagattatgtctttttcttaaacaccatggctgtcacacttcagttcaattaaatcagaatgtctgaggagtgagacacaggcatcaacactctcaaatgattcacatgttcagccaaagttgagaaccatcgagcctgtggaagttctttctcatggctcagaatcttaggtaggtgcttaactcttgtggtggccagcctccaagatgagccccagtgttcttgcctcctactattcacatctttatgtggtcccctccaatgctgaatacagatgatttgtgtaacctgaggccaggattaaggggaggcaatcaatgcacctagggaaaaaatttaaggaggtattcacactcagggtcatgcacttgcacaatgttgagaatgagtaccactctcaccattggtatagccaaaaaagcttggaagtgaccaaggctaggtcacaaaatacactgtggcttcttctttgatctctctttgaccatactgacactgggaaaagcccattcccatgccatgaagacaccaaggcagccctattgagaaatctacctgtcgtggccgggcgcagtggctcacgcctgtaatcccagcactttgggaggccgaggtgggtggatcacgaggtcaggagatcgagaccatcctggctaacacagtgaaaccccgtctctactaaaaatacaaaaaattagccgggtgtggtgtcgggcacctgtagtcccagctactcaggaggctgaggcaggagaagggtgggaacccgggaggcagagcttgcagtgagccgagattgtgccactgcacactccaatctgggtgaaagaccgagactccgcctcaaaaaaaaaaaaaaaagaaagaaagaaagaaagaaagaaatctacctgtcaaggaactaaggtattttgctaacaagcaccaacttgccagccatgtaagggagccatcttggaagcagatcctccagcctccagtcaagtcttcagataattgcaacttcagttgatcttttgaccaagacctcaagagagccagaactacccagctaagccttttactaaatttctgaacttctaacactattagataataagtgcttattgtttaacaccattaattttgagtataatttgttacatagcgacagataactatacagctcaacaactagaaaaataaactgtttacctgccttaa

SEQ ID NO: 159616 - DNA, 1710 bp, Artificial Sequence
  derived and/or modified sequence
atggagaagaagtggaagtactgcgccgtgtactacatcatccagatccacttcgtgaagggcgtgtgggagaagaccgtgaacaccgaggagaacgtgtacgccaccctgggcagcgacgtgaacctgacctgccagacccagaccgtgggcttcttcgtgcagatgcagtggagcaaggtgaccaacaagatcgacctgatcgccgtgtaccacccccagtacggcttctactgcgcctacggcagaccctgcgagagcctggtgaccttcaccgagacccccgagaacggcagcaagtggaccctgcacctgagaaacatgagctgcagcgtgagcggcagatacgagtgcatgctggtgctgtaccccgagggcatccagaccaagatctacaacctgctgatccagacccacgtgaccgccgacgagtggaacagcaaccacaccatcgagatcgagatcaaccagaccctggagatcccctgcttccagaacagcagcagcaagatcagcagcgagttcacctacgcctggagcgtggaggacaacggcacccaggagaccctgatcagccagaaccacctgatcagcaacagcaccctgctgaaggacagagtgaagctgggcaccgactacagactgcacctgagccccgtgcagatcttcgacgacggcagaaagttcagctgccacatcagagtgggccccaacaagatcctgagaagcagcaccaccgtgaaggtgttcgccaagcccgagatccccgtgatcgtggagaacaacagcaccgacgtgctggtggagagaagattcacctgcctgctgaagaacgtgttccccaaggccaacatcacctggttcatcgacggcagcttcctgcacgacgagaaggagggcatctacatcaccaacgaggagagaaagggcaaggacggcttcctggagctgaagagcgtgctgaccagagtgcacagcaacaagcccgcccagagcgacaacctgaccatctggtgcatggccctgagccccgtgcccggcaacaaggtgtggaacatcagcagcgagaagatcaccttcctgctgggcagcgagatcagcagcaccgacccccccctgagcgtgaccgagagcaccctggacacccagcccagccccgccagcagcgtgagccccgccagataccccgccaccagcagcgtgaccctggtggacgtgagcgccctgagacccaacaccaccccccagcccagcaacagcagcatgaccaccagaggcttcaactacccctggaccagcagcggcaccgacaccaagaagagcgtgagcagaatccccagcgagacctacagcagcagccccagcggcgccggcagcaccctgcacgacaacgtgttcaccagcaccgccagagccttcagcgaggtgcccaccaccgccaacggcagcaccaagaccaaccacgtgcacatcaccggcatcgtggtgaacaagcccaaggacggcatgagctggcccgtgatcgtggccgccctgctgttctgctgcatgatcctgttcggcctgggcgtgagaaagtggtgccagtaccagaaggagatcatggagagacccccccccttcaagcccccccccccccccatcaagtacacctgcatccaggagcccaacgagagcgacctgccctaccacgagatggagaccctgtag

SEQ ID NO: 159617 - protein, 434 aa, Artificial Sequence
  derived and/or modified sequence
MSADGAEADGSTQVTVEEPVQQPSVVDRVASMPLISSTCDMVSAAYASTKESYPHIKTVCDAAEKGVRTLTAAAVSGAQPILSKLEPQIASASEYAHRGLDKLEENLPILQQPTEKVLADTKELVSSKVSGAQEMVSSAKDTVATQLSEAVDATRGAVQSGVDKTKSVVTGGVQSVMGSRLGQMVLSGVDTVLGKSEEWADNHLPLTDAELARIATSLDGFDVASVQQQRQEQSYFVRLGSLSERLRQHAYEHSLGKLRATKQRAQEALLQLSQVLSLMETVKQGVDQKLVEGQEKLHQMWLSWNQKQLQGPEKEPPKPEQVESRALTMFRDIAQQLQATCTSLGSSIQGLPTNVKDQVQQARRQVEDLQATFSSIHSFQDLSSSILAQSRERVASAREALDHMVEYVAQNTPVTWLVGPFAPGITEKAPEEKK

SEQ ID NO: 159618 - DNA, 1305 bp, Artificial Sequence
  derived and/or modified sequence
atgagtgccgacggggccgaggccgatggatcaactcaggttacagtcgaagaacccgtgcagcagccatcagtggtagatcgtgtcgcctctatgcctctcataagctctacctgcgacatggtcagtgccgcctatgcctcaaccaaagagagttaccctcacataaaaaccgtgtgcgacgctgccgagaaaggtgtaagaaccttgactgcagcggctgtttccggggcccagccgatactgagcaagctggaaccgcagattgctagtgcctcggagtatgctcacagaggcctggacaaacttgaggaaaacctgccaatattgcaacagcccacagagaaggtccttgcagataccaaagagttggtctcctctaaagtctccggagcccaagaaatggtgagttctgcaaaggacactgtggccacccagctgagtgaagctgtcgatgctacacgcggagcagttcagtccggcgtagacaagaccaaaagtgtggtaaccgggggggtgcagagcgtgatgggatccagactgggccagatggttctaagcggagtcgatactgtgctaggcaagtctgaggagtgggctgacaatcacctgccactcaccgatgctgaactggccaggatcgccactagcctggatggcttcgacgttgctagcgtgcagcagcagcgtcaggagcagtcatactttgtgcgacttgggtccctctctgaaagactccggcagcacgcctacgaacactctctgggcaagctgagggcgacaaagcagcgtgcccaagaagcgcttttgcaactgagccaggtcctaagcctgatggagactgtaaagcagggagtcgatcagaaattggtggagggtcaggagaaactgcaccaaatgtggctaagctggaaccagaagcagcttcagggacctgagaaggagccccccaagccagaacaggttgagtccagggcactcaccatgttccgcgatatcgcccagcaactgcaggctacgtgcaccagcctcggaagtagcattcagggcctgcctacgaacgttaaggatcaagtgcagcaggcaagacgacaggtcgaggatctacaagccactttcagttcgattcacagtttccaggaccttagctcaagcattctcgctcaatctagggaacgggttgcgtcagcccgggaggcccttgaccatatggtggaatacgtagctcagaacacacccgtgacctggctggtggggccttttgcccctgggattaccgagaaggctcccgaggagaaaaaatag

SEQ ID NO: 159619 - DNA, 1305 bp, Artificial Sequence
  derived and/or modified sequence
atgtctgcagatggagctgaggctgatggcagcacccaggtgacagtggaggagcctgtgcagcagcccagcgtggtggacagagtggcctccatgcccctcatcagcagcacctgtgacatggtgtctgctgcctatgccagcaccaaggagagctacccccacatcaagacagtgtgtgatgctgctgagaagggcgtgaggaccctgacagctgctgctgtgtctggggcccagcccatcctgagcaagctggagccccagatcgccagcgcctctgaatatgcccaccggggcctggacaagctggaggagaacctgcccatcctgcagcagcccacagagaaggtgctggccgacaccaaggagctggtgagcagcaaggtgtctggggcccaggagatggtgagcagcgccaaggacacagtggccacccagctgtctgaggccgtggatgccaccagaggagctgtgcagagcggcgtggacaagaccaagtctgtggtgactggaggagtgcagagcgtgatgggcagccggctgggccagatggtgctgtctggagtggacacagtgctgggcaagtctgaggagtgggccgacaaccacctgcccctgacagatgctgagctggcccgcatcgccaccagcctggatggctttgatgtggcctctgtgcagcagcagaggcaggagcagagctactttgtgcggctgggcagcctgtctgagcggctgcggcagcacgcctatgagcacagcctgggcaagctgcgggccaccaagcagagggcccaggaggccctgctgcagctgagccaggtgctgagcctgatggagaccgtgaagcagggcgtggaccagaagctggtggagggccaggagaagctgcaccagatgtggctgtcctggaaccagaagcagctgcagggccctgagaaggagccccccaagccagagcaggtggagagccgggccctgaccatgttccgggacatcgcccagcagctgcaggccacctgcaccagcctgggcagcagcatccagggcctgcccaccaacgtgaaggaccaggtgcagcaggcccggcggcaggtggaggacctgcaggccaccttcagcagcatccacagcttccaggacctgagcagcagcatcctggcccagagccgggagcgggtggccagcgcccgggaggccctggaccacatggtggagtatgtggcccagaacacccctgtgacctggctggtgggcccctttgcccctggcatcacagagaaggcccctgaggagaagaagtag

SEQ ID NO: 159620 - DNA, 1305 bp, Artificial Sequence
  derived and/or modified sequence
atgagcgccgacggcgccgaggccgacggcagcacccaggtgaccgttgaggaaccagtgcagcaaccaagcgttgtggatcgcgtggcctccatgcccctcattagcagcacatgcgacatggtgagcgcggcatacgcctccactaaggaaagttaccctcatatcaagaccgtttgcgacgctgccgaaaagggggtgcgcactcttaccgctgcggcagtcagcggcgcacagccgatcctaagtaagttggagccacagattgccagcgcctcggagtatgcccacagagggttagataaactggaagagaatcttccaatcttgcaacagcctacagaaaaggtcctcgctgataccaaagagctggtctcctccaaggtgagcggtgcccaggaaatggttagcagtgcaaaagataccgtggcgacacagctgtccgaggctgtagatgctactaggggagccgttcagtcaggtgtggacaaaaccaaatctgtcgtgacaggaggcgttcagtcagtcatgggatccaggttgggccaaatggtgttgtcgggagtggacaccgttctgggcaaatccgaagaatgggcggacaaccacctcccccttactgacgccgagctggcacgtattgctacctcacttgatgggtttgacgtggcatctgtccagcagcaacggcaagagcagtcctatttcgtaagactaggatctctttccgagcggctgagacagcatgcctacgagcacagcctcggcaagctgcgggccaccaagcagagggcccaggaagcacttttacagttgagccaggtactgagccttatggaaactgtgaaacagggcgtcgaccagaaactggtcgaagggcaggaaaagctccatcagatgtggttatcatggaaccagaaacagcttcagggccctgagaaggagccaccaaagccagaacaggtggaatcccgagccctcacgatgtttagggatatcgctcagcagctacaggccacatgtactagtttgggatcaagtatccagggtctgcctaccaacgtgaaggatcaagtgcaacaggccagacgtcaggtcgaagacttgcaggctaccttctcatccatacacagctttcaggacctgtccagctccattctcgcccaaagtcgagagagagtagctagcgccagggaagccctggatcacatggttgagtatgtagcccaaaatacccccgtcacctggcttgtgggcccttttgcccccggaataactgagaaggctccagaggagaagaaatag

SEQ ID NO: 159621 - DNA, 1305 bp, Artificial Sequence
  derived and/or modified sequence
atgtcggcagacggcgcagaggccgatggcagcacacaagtaacagtcgaagagccggtccagcagccatccgtagtggaccgggttgcgtcgatgcctctgattagctccacatgtgacatggtctccgccgcttatgcatcaaccaaagagagttaccctcacatcaagacagtctgcgatgcagcggaaaagggagttcgtaccctcactgcggctgcggtatccggggctcaaccaattttatcaaagttggaaccccaaatcgccagcgcctccgaatatgcccacaggggcctggataaactagaggaaaatctgccgatcttgcaacagccaacagaaaaagtgttagctgacaccaaggaactagtgtcctcaaaggtctccggcgctcaggagatggtctcctccgcgaaggataccgtggccacgcagctgagcgaggccgtcgatgctacacggggtgcagtccagagcggagtggacaagaccaaatccgtggtgacaggcggagtgcagtccgtgatgggctcccgtctgggccagatggttttgtccggtgtggatacagtcttaggtaagtccgaggagtgggctgacaatcatctgcccttgacggatgccgaattagctcgcattgctacgagtcttgatggctttgacgtggcttccgtgcagcagcagcggcaagaacagagttactttgtccggcttggaagcttgagtgaaagactgagacaacacgcttacgagcacagtctgggcaaattaagagcaacaaaacagcgggctcaggaggccctactgcagctgtcccaggtgctctcactcatggaaactgtgaaacagggggtggaccagaaactcgtggagggacaagagaaactgcaccagatgtggctgagctggaaccagaaacagttacagggccctgagaaagaaccacctaaaccagagcaggtggagtccagggctcttacaatgtttagggatattgcacagcagttacaggcgacctgcaccagcttgggatcttcgattcaggggctgcccaccaacgtgaaggatcaagttcaacaggctaggaggcaggtcgaagacctccaggccacgttttcgtctatccattccttccaagatctctcctccagtatactggctcaaagcagagaaagagtggcgtcagcccgagaggctttagaccacatggtggaatacgtcgcccagaacacccccgttacttggttagtcgggcctttcgcccctggcattacagagaaggcccctgaagagaagaaatag

SEQ ID NO: 159622 - DNA, 1305 bp, Artificial Sequence
  derived and/or modified sequence
atgagcgccgacggcgccgaggccgacggcagcacccaggtgaccgtggaggagcccgtgcagcagcccagcgtggtggacagagtggccagcatgcccctgatcagcagcacctgcgacatggtgagcgccgcctacgccagcaccaaggagagctacccccacatcaagaccgtgtgcgacgccgccgagaagggcgtgagaaccctgaccgccgccgccgtgagcggcgcccagcccatcctgagcaagctggagccccagatcgccagcgccagcgagtacgcccacagaggcctggacaagctggaggagaacctgcccatcctgcagcagcccaccgagaaggtgctggccgacaccaaggagctggtgagcagcaaggtgagcggcgcccaggagatggtgagcagcgccaaggacaccgtggccacccagctgagcgaggccgtggacgccaccagaggcgccgtgcagagcggcgtggacaagaccaagagcgtggtgaccggcggcgtgcagagcgtgatgggcagcagactgggccagatggtgctgagcggcgtggacaccgtgctgggcaagagcgaggagtgggccgacaaccacctgcccctgaccgacgccgagctggccagaatcgccaccagcctggacggcttcgacgtggccagcgtgcagcagcagagacaggagcagagctacttcgtgagactgggcagcctgagcgagagactgagacagcacgcctacgagcacagcctgggcaagctgagagccaccaagcagagagcccaggaggccctgctgcagctgagccaggtgctgagcctgatggagaccgtgaagcagggcgtggaccagaagctggtggagggccaggagaagctgcaccagatgtggctgagctggaaccagaagcagctgcagggccccgagaaggagccccccaagcccgagcaggtggagagcagagccctgaccatgttcagagacatcgcccagcagctgcaggccacctgcaccagcctgggcagcagcatccagggcctgcccaccaacgtgaaggaccaggtgcagcaggccagaagacaggtggaggacctgcaggccaccttcagcagcatccacagcttccaggacctgagcagcagcatcctggcccagagcagagagagagtggccagcgccagagaggccctggaccacatggtggagtacgtggcccagaacacccccgtgacctggctggtgggccccttcgcccccggcatcaccgagaaggcccccgaggagaagaagtag

SEQ ID NO: 159623 - DNA, 2340 bp, Artificial Sequence
  derived and/or modified sequence
tggcgcgggcaatccctcaacctgattggtcccctcgcccgtcactccagtgcgcccccaacctaccacgcagtaaaagccacccccgcctcggcccggacggtttccaagctggttttgaagtcgcggcagctgttcctgggacgtccggttgaccgcgcgtctgctgcagagaccatgtctgccgacggggcagaggctgatggcagcacccaggtgacagtggaagaaccggtacagcagcccagtgtggtggaccgtgtggccagcatgcctctgatcagctccacctgcgacatggtgtccgcagcctatgcctccaccaaggagagctacccgcacatcaagactgtctgcgacgcagcagagaagggagtgaggaccctcacggcggctgctgtcagcggggctcagccgatcctctccaagctggagccccagattgcatcagccagcgaatacgcccacagggggctggacaagttggaggagaacctccccatcctgcagcagcccacggagaaggtcctggcggacaccaaggagcttgtgtcgtctaaggtgtcgggggcccaagagatggtgtctagcgccaaggacacggtggccacccaattgtcggaggcggtggacgcgacccgcggtgctgtgcagagcggcgtggacaagacaaagtccgtagtgaccggcggcgtccaatcggtcatgggctcccgcttgggccagatggtgttgagtggggtcgacacggtgctggggaagtcggaggagtgggcggacaaccacctgccccttacggatgccgaactggcccgcatcgccacatccctggatggctttgacgtcgcgtccgtgcagcagcagcggcaggaacagagctacttcgtacgtctgggctccctgtcggagaggctgcggcagcacgcctatgagcactcgctgggcaagcttcgagccaccaagcagagggcacaggaggctctgctgcagctgtcgcaggtcctaagcctgatggaaactgtcaagcaaggcgttgatcagaagctggtggaaggccaggagaagctgcaccagatgtggctcagctggaaccagaagcagctccagggccccgagaaggagccgcccaagccagagcaggtcgagtcccgggcgctcaccatgttccgggacattgcccagcaactgcaggccacctgtacctccctggggtccagcattcagggcctccccaccaatgtgaaggaccaggtgcagcaggcccgccgccaggtggaggacctccaggccacgttttccagcatccactccttccaggacctgtccagcagcattctggcccagagccgtgagcgtgtcgccagcgcccgcgaggccctggaccacatggtggaatatgtggcccagaacacacctgtcacgtggctcgtgggaccctttgcccctggaatcactgagaaagccccggaggagaagaagtagggggagaggagaggactcagcgggccccgtctctataatgcagctgtgctctggagtcctcaacccggggctcatttcaaacttattttctagccactcctcccagctcttctgtgctgtccacttgggaagctaaggctctcaaaacgggcatcacccagttgacccatctctcagcctctctgagcttggaagaagcctgttctgagcctcaccctatcagtcagtagagagagatgtccagaaaaaatatctttcaggaaagttctcccctgcagaattttttttccttgttaaatatcaggaatataggccgggtgcggtggctcacacctgtaatcccagcactttgggaggctgaggcgggcggaacacctgaggtcaggtgttcgagaccagccaggccaacatggtgaaaccccgtctctactaaaaatacaaaaaaaaatgagccgggcatggtagcaggtgtctgttatcccagttaggaggctgaggcaagagaatctcttgaacctgagaggcggaggttgcagtgagccaagatcgcgccattgcactccagcctgggggacaagagtgagacttagtctcaaaaaaaaaaaaaaagaaaaaaaaatcagggatatagttcatatcccacttctttgtttacaccgatgtccctgaatatcagcctgtagctaatggacttgggatttctggtctaagtgggcctcctggggatggggtggtacactgagcttctgagcctcattgtagagtagaaaggtactggggcctgtgtggtaagccttgttgaaatgctctggtattcagtattgccttaataaacttcacccacaactgcatacaggc

SEQ ID NO: 159624 - protein, 255 aa, Artificial Sequence
  derived and/or modified sequence
MSMEDPFFVVKGEVQKAVNTAQGLFQRWTELLQDPSTATREEIDWTTNELRNNLRSIEWDLEDLDETISIVEANPRKFNLDATELSIRKAFITSTRQVVRDMKDQMSTSSVQALAERKNRQALLGDSGSQNWSTGTTDKYGRLDRELQRANSHFIEEQQAQQQLIVEQQDEQLELVSGSIGVLKNMSQRIGGELEEQAVMLEDFSHELESTQSRLDNVMKKLAKVSHMTSDRRQWCAIAILFAVLLVVLILFLVL

SEQ ID NO: 159625 - protein, 154 aa, Artificial Sequence
  derived and/or modified sequence
MKDQMSTSSVQALAERKNRQALLGDSGSQNWSTGTTDKYGRLDRELQRANSHFIEEQQAQQQLIVEQQDEQLELVSGSIGVLKNMSQRIGGELEEQAVMLEDFSHELESTQSRLDNVMKKLAKVSHMTSDRRQWCAIAILFAVLLVVLILFLVL

SEQ ID NO: 159626 - DNA, 768 bp, Artificial Sequence
  derived and/or modified sequence
atgagcatggaggaccccttcttcgtggtgaagggcgaggtgcagaaggccgtgaacaccgcccagggcctgttccagagatggaccgagctgctgcaggaccccagcaccgccaccagagaggagatcgactggaccaccaacgagctgagaaacaacctgagaagcatcgagtgggacctggaggacctggacgagaccatcagcatcgtggaggccaaccccagaaagttcaacctggacgccaccgagctgagcatcagaaaggccttcatcaccagcaccagacaggtggtgagagacatgaaggaccagatgagcaccagcagcgtgcaggccctggccgagagaaagaacagacaggccctgctgggcgacagcggcagccagaactggagcaccggcaccaccgacaagtacggcagactggacagagagctgcagagagccaacagccacttcatcgaggagcagcaggcccagcagcagctgatcgtggagcagcaggacgagcagctggagctggtgagcggcagcatcggcgtgctgaagaacatgagccagagaatcggcggcgagctggaggagcaggccgtgatgctggaggacttcagccacgagctggagagcacccagagcagactggacaacgtgatgaagaagctggccaaggtgagccacatgaccagcgacagaagacagtggtgcgccatcgccatcctgttcgccgtgctgctggtggtgctgatcctgttcctggtgctgtag

SEQ ID NO: 159627 - DNA, 768 bp, Artificial Sequence
  derived and/or modified sequence
atgtccatggaagatccgttcttcgtcgtgaagggcgaagtacaaaaagccgttaataccgctcagggtctctttcagcgctggactgagctccttcaggacccttcaaccgccacccgggaagaaattgattggaccacaaatgagctgaggaataacctccggagtatagagtgggatctggaggatctggacgagacgatatctattgtcgaagctaaccccagaaagtttaacctagacgccacagagctgagcatcagaaaggccttcatcacttctacccgccaggtggtgagggatatgaaggaccaaatgtctacgagtagtgtacaggctctcgcagaaagaaagaacaggcaggccctgttgggggactctggttcacagaattggagtactggcactacagataagtacggtaggttggaccgagaacttcaacgggcaaattcccacttcatcgaggaacaacaggcccagcagcagttgatcgtggagcagcaggacgagcagctggaactcgtttcaggctctattggagtactgaagaatatgtcacagcggatagggggcgagctggaggagcaggcagtgatgctggaagacttctctcatgaactggaaagtacgcaaagtaggctcgataacgtgatgaagaaattagccaaagtctcacatatgaccagcgacagacgccagtggtgtgcgatcgccatactgtttgccgtgttactagtggttctaatccttttcctggtgctgtag

SEQ ID NO: 159628 - DNA, 768 bp, Artificial Sequence
  derived and/or modified sequence
atgtccatggaggaccccttctttgtggtgaagggggaggtgcagaaggctgtgaacacagcccagggcctcttccagcgctggacagagctgctgcaggaccccagcacagccacccgggaggagattgactggaccaccaatgagctgaggaacaacctgcggagcattgagtgggacctggaggacctggatgagaccatcagcatcgtggaggccaaccccaggaagttcaacctggatgccacagagctgagcatcaggaaggccttcatcaccagcacccggcaggtggtgcgggacatgaaggaccagatgagcaccagctctgtgcaggccctggccgagaggaagaaccggcaggccctgctgggggacagcggcagccagaactggagcacaggcaccacagacaagtatggccgcctggaccgggagctgcagagggccaacagccacttcatcgaggagcagcaggcccagcagcagctgattgtggagcagcaggatgagcagctggagctggtgtctggcagcattggagtgctgaagaacatgagccagagaattggaggagagctggaggagcaggccgtgatgctggaggacttcagccatgagctggagagcacccagagccggctggacaacgtgatgaagaagctggccaaggtgagccacatgaccagtgaccggcggcagtggtgtgccatcgccatcctgtttgctgtgctgctggtggtgctgatcctcttcctggtgctgtag

SEQ ID NO: 159629 - DNA, 768 bp, Artificial Sequence
  derived and/or modified sequence
atgagcatggaggaccccttcttcgtggtgaagggcgaggtgcagaaggccgttaacacggcacaggggctgttccagagatggaccgagttgttacaagatccttcaactgcgacacgagaggagattgactggactactaacgagttgcgcaacaacctgagatccattgagtgggatctggaggacctcgatgaaaccatttcaatcgttgaggccaatccaaggaagttcaacctggatgcaaccgagctctctattaggaaggcatttataacaagtacccgtcaggtcgtgcgtgacatgaaggaccagatgtccacctcttctgtgcaggcactggctgaacgaaaaaatagacaggcactgttgggtgacagtgggagtcaaaattggtcgaccggcacaaccgataagtacggacggttggatagagagttgcagcgagccaacagtcatttcatcgaagaacagcaagctcagcagcagctcattgtggagcaacaggatgaacaactcgaactggtgtctggcagcatcggagttctgaaaaatatgtcccaacggatcgggggggaactcgaagagcaggcagtgatgcttgaggacttcagtcacgagctcgaatcaacacagtcgagactggacaacgtcatgaagaagctcgccaaagtctcacatatgacaagtgaccggcggcagtggtgtgcgatcgccatcctgttcgccgtgctgttggtcgttcttatcctgttcctcgttctctag

SEQ ID NO: 159630 - DNA, 768 bp, Artificial Sequence
  derived and/or modified sequence
atgtcaatggaggaccccttttttgtggttaagggcgaagtgcaaaaagccgtgaacaccgctcagggtttattccagcggtggacagagctgctgcaagaccctagcactgcaactcgcgaggagattgactggacaacaaatgagctgcggaataacctgcgatccattgagtgggatctggaagatctcgacgagaccatctctattgtagaagcgaatcccaggaagttcaaccttgatgcaaccgagctttccattcggaaggcattcattacttctacgaggcaggtcgttcgggatatgaaggatcagatgtcaacctccagtgtgcaggcgttagcggagagaaagaaccgccaggctttgttgggagactccggcagtcaaaactggtctactggcaccaccgataaatacggaagactcgatagagaacttcagcgggctaactctcattttattgaggagcagcaagctcagcagcagctaattgtagaacagcaggacgaacagctcgagctggtgtctgggtctattggcgtcttgaagaatatgtcacagcgaatcggtggtgaacttgaggaacaggcagtgatgctggaagatttttctcacgagctggagtcaacccagagccgcctggataatgtcatgaaaaagctggccaaggttagtcatatgacctccgaccgtcgacagtggtgcgccatcgccatcctttttgcggttctgcttgtggtgcttatcctgtttctcgtcctgtag

SEQ ID NO: 159631 - DNA, 4851 bp, Artificial Sequence
  derived and/or modified sequence
cgggactggaggctgccgagggggccggcgcccgagtccgggattcggccagtggtgctgagcgagtgctggaccagcggccgtcctgtgcacctggcctgtgcgcgtgcccgctgctcggcttcacccagactaaggcgcgggcagctgcgggaacaggcggggtgggcggagggagaccgggaggcacgggcgccctgtgcgcggaggaggtgaaggcggccggggccgggacgccatgtccatggaggaccccttctttgtggtgaaaggagaggtacagaaagcagtcaacactgcccagggattgtttcagagatggacagagctcctccaggacccctccacagcaacaagggaagaaatcgactggaccaccaacgagctgagaaataacctccggagcatagagtgggatctagaggaccttgatgaaaccatcagcatagttgaagcaaatcctagaaaatttaaccttgatgcaactgaattgagtataagaaaagccttcattacaagtactcggcaagttgtcagggacatgaaagatcagatgtcaacttcatctgtgcaggcattagctgaaagaaaaaatagacaggcactgctgggagacagtggcagccagaactggagcactggaacaacagataaatatgggcgtctggaccgagagctccagagagccaattctcatttcattgaggagcagcaggcacagcagcagttgatcgtggaacagcaggatgagcagttggagctggtctctggcagcatcggggtgctgaagaacatgtcccagcgcatcggaggggagctggaggaacaggcagttatgttggaagatttctctcacgaattggagagcactcagtcccggctggacaatgtgatgaagaaacttgcaaaagtatctcatatgaccagtgatcggcgccaatggtgtgccatagccatcctctttgcagtcctgttggttgtgctcatcctcttcttagtgctgtgacggcggggcctctgggtgcgagttcctcctgcatatgaaccgaggggaggaggagaagctgagcacgtgtgacattgccgtctactcacattcctatcctggaaacatactgctgcactgacttttctccgtgtgaccccacaattgacatggctcctccatcccagcgctggaagggccagtgggaagaggaaatagatgtctgcactcctggctgcagctggacaacagaagccccatgccgcctgtccagttcggaggagaactagctgctgccttgccttccgggacctcgtttgctgaggagggacttacagactccactggtgttttgctgttgctcattccatgcatctttggcagctcttttcttctgctcagacccttccccgtgctcagacagtgcaccgctgtcccatctaaagaaacctgtcaggaatacgagcttctgggtatgtttcgtttcccattgctgtagcatttcttatcccctgagagctgatgattattgaggacagaaggctcagaaacagtttgtgacagaaaatgcagtgtttcatttttcagggataaatgctaagataaaattgcttttccaggtcatttttttttgtggtaagaataactaatggaaaataatgaaacaccctggggtttgggggtgctaacaacttgtggctttaactgacaggagcaattaaaaagagcaagagggttctgcattggcatagcttagggaagggttaatgatgtcgccacaggtcagctcctgatccttgccgacttgatgttgctgtaccagggcttcctccccagaggtgcagcttgcgttttgagggtgattgctacatatgttgttgctaaacagctcagtaacacacttgaatgaatttggataccagattgtcctcattacagttcttttactcttagggcactctacactgggggttggggttgggagtggttagtacatttattacatttattaagaaacgtaatgacataaaaggttagctctgggccagacttctcttactctgtgggtaatggcaaggatgtgtaggtaaacttggttcttttttttccctaagatgacagcttgattttatcatctgcagtcaaataactgagccaatccaaatttaaatgatagatgctttaattgagtttaagtagctgaaactgctgagacactaaactttaaccttctgatgactttttaaaatgcctcaaatgtgcacatgtatataggatatttttataacttccctgatgaataatctgatattaaagtagtatttggacccagagccagaactcggtggtggaggctgctggtctctcctcaccaccttcttttgcacttggaaagaacagcaacatctggatagagttctagctttgacttctcatttccttgtctttttgggtgcattcctcagcacactttttttttaaacctttttgttttgttttgtttgtatttcatgtggttttatttgggggttttggttttttcacccttttttgtgatttgcaatgatgtgcttgcccagctaacttttgaattgcactttttaataaatattcttaacaatttttgaagaaggatattttatctcatttgagatcatggtaggttaagaaaatatgcctgttgatgaaagctaaaagcaaatttatgaaactaaaagggtgattgacatccatgtttacactccgctctaatgtttgatatataaataagttattttcaaattaggaaaaaacagtgagtattacaaagggcttcagatgtttagagtactaggttatttatgttttacaaagtttgaatcttctataaactaagaaaggggatgatccttagatttgcattaaaatatagaagtcttttaaagtaaatgtgaaccttgtctaagtactgtaatccacacaacacattataagaagcaaaccagcatcttaaggaattataaaattaccctatttaaaagccatgctattgttctgctattaccagatttattgtgccacacaaaaggatcatgtgtgtcagcaggggccgtttggaacaaacctagtcattaatgagtaagatactcctgttagttcagggaccaagttttatgacccagaggcttaatgatgtttggatatatttcaaatcggcgtgcttacctcactgatttaaattattttctaaatagtggccattgtagacctgactcaggctgaagctaaatagagaacaatttagaaagttaactaacaatacagtgcattctacccgtagggccaccatgcccttctgcccctggctgatttgatcctgtgtctgatcccattgcaccctgactgggcagtccctacagaaccagtgttaatttgaagggcctccactcaggctccaaatgtggcagccaaagagaacaatccagggaacctacatttatttttaaggacaaatatttcctcctcagtggtcctaatgttcagggctttagagggaacccaggtggtctcttcaccctgtgtcctagaatgggagagtaagtagacagtggtgataaccccacactgcttataagtgcatctttatagtatttggggctttcctacccctttagccttctgtacctagtaccatattccagttttaaagaactggcagaatgtgatggataacagaggaagagctcaatttatgtttattggaagaacattttacttaaatgatttgaggggtgggagggagtgaactactgagtttgccagagtgaaaatccatctgaaaaactcagctacctttagtttttagtcctcatttttggtcttgtctctgcggactgtgaagaatcacaatgctctatatgccctggactgtgtggcaaatgcaggttgcagcgtgtgtgttacatgaggatcttccacaatttcagaatgcacgccagagctgaagggggaaacttggtaacttgcccattattctctgcttttagccagagttaaacagactgatgggtctggtagccaacaacttggcaacttccactccttctcacctcgtgagattaagggctgtgaaaagaaatctagtctaactccaacagaaatctgtctctgttaagtgttttaccttctgtaagtagagatggtagagccaagatttttcttttggtaatttccctgtctataaagtgagaccaaagggatatctgttccctgttacctttttggagaattcataacatttgaagatcaaaaaattgaatgataaatatgaatggcttttcaattctgtggactttgtaccatttggcttcaccttgtactgcaagatgaatttgtaaacaaaacaaaattggactgtctggaaagctaaagttctgaaatatggaatgtactgcctctaatttttctttgtcttcctctcactggcatttttttctctcccaggtttcttaagaataatgttttttaaaggaggctttttgcccatcaagaataaaaagaaataaaaccaaagggttaccggacttaagcccccgcagtcactgtgcgccatccctgagcaaagtccgcccctgaggacagtgcccctgccccagtgacaggccttactcctcccagggcctttgcttctaatagggggtggtctttcttttctttctctcctttttttttttttgattaaaaaataaaaccaaaccagaatttgctgaaagcaggtacctttcagtagctccgatcagagtaactcagcttagagatactgttactcaggacaacagtatgtacaaaagtctccggaaaaggaaaataaaacaacctgaaaagaa

SEQ ID NO: 159632 - DNA, 979 bp, Artificial Sequence
  derived and/or modified sequence
attcggccagtggtgctgagcgagtgctggaccagcggccgtcctgtgcacctggcctgtgcgcgtgcccgctgctcggcttcacccagactaaggcgcgggcagctgcgggaacaggcggggtgggcggagggagaccgggaggcacgggcgccctgtgcgcggaggaggtgaaggcggccggggccgggacgccatgtccatggaggaccccttctttgtggtgaaagggacatgaaagatcagatgtcaacttcatctgtgcaggcattagctgaaagaaaaaatagacaggcactgctgggagacagtggcagccagaactggagcactggaacaacagataaatatgggcgtctggaccgagagctccagagagccaattctcatttcattgaggagcagcaggcacagcagcagttgatcgtggaacagcaggatgagcagttggagctggtctctggcagcatcggggtgctgaagaacatgtcccagcgcatcggaggggagctggaggaacaggcagttatgttggaagatttctctcacgaattggagagcactcagtcccggctggacaatgtgatgaagaaacttgcaaaagtatctcatatgaccagtgatcggcgccaatggtgtgccatagccatcctctttgcagtcctgttggttgtgctcatcctcttcttagtgctgtgacggcggggcctctgggtgcgagttcctcctgcatatgaaccgaggggaggaggagaagctgagcacgtgtgacattgccgtctactcacattcctatcctggaaacatactgctgcactgacttttctccgtgtgaccccacaattgacatggctcctccatcccagcgctggaagggccagtgggaagaggaaatagatgtctgcactcctggctgcagctggacaacagaagccccatgccgcctgtccagttcggaggagaactagctgctgccttg

SEQ ID NO: 159633 - protein, 197 aa, Artificial Sequence [sequence omitted]

SEQ ID NO: 159634 - DNA, 594 bp, Artificial Sequence
  derived and/or modified sequence
atgcctgcaccttctatggattgcgacgtgagtacgctggttgcctgtgtggtggacgtcgaggtcttcactaaccaggaggtcaaagagaaattcgaaggtctttttcgcacttacgatgactgtgttaccttccaactgttcaaatccttcagacgagtacggatcaacttcagtaacccgaaatcagccgcacgcgctagaattgagttacacgagacccagttccgcggcaagaagttgaagctctattttgcccaggtgcagacccccgaaacagatggtgataagttgcacctggcacccccccagccagcgaagcagtttttaattagccccccctctagcccacccgtcggctggcagcccattaacgacgctactccagtactgaattatgatctgctgtatgcagtggctaagttaggacccggtgaaaagtacgagctgcatgctggcacagaatccactccatctgtggtagtccacgtctgtgacagtgacattgaggaggaagaggacccgaagacaagccctaaacccaagattatccagaccaggcggccgggcctgcccccatccgtctccaattag

SEQ ID NO: 159635 - DNA, 594 bp, Artificial Sequence
  derived and/or modified sequence
atgcctgcccccagcatggactgtgatgtgtccaccctggtggcctgtgtggtggatgtggaggtgttcaccaaccaggaggtgaaggagaagtttgagggcctcttccgcacctatgatgactgtgtgaccttccagctgttcaagagcttccggcgggtgcgcatcaacttcagcaaccccaagtctgctgcccgggccagaattgagctgcacgagacccagttccggggcaagaagctgaagctgtactttgcccaggtgcagaccccagagacagatggagacaagctgcacctggccccaccccagcctgccaagcagttcctgatcagcccccccagcagcccccctgtgggctggcagcccatcaatgatgccacccctgtgctgaactatgacctgctgtatgctgtggccaagctgggccctggagagaagtatgagctgcacgccggcacagagagcaccccatctgtggtggtgcacgtgtgtgacagcgacatcgaggaggaggaggaccccaagaccagccccaagcccaagatcatccagaccaggaggcctggcctgccccccagcgtgagcaactag

SEQ ID NO: 159636 - DNA, 594 bp, Artificial Sequence
  derived and/or modified sequence
atgcccgcccccagcatggactgcgacgtgagcaccctggtggcctgcgtcgtcgatgtggaggtcttcaccaatcaagaggttaaggaaaaattcgaaggtctgttcaggacatacgacgattgcgtgacctttcaactgtttaaaagctttcgccgggttcgaatcaatttctccaatcccaagtcggccgcacgtgcacgaatagagctgcacgagactcagtttcggggaaagaagctaaagctgtatttcgcccaggtgcagaccccagaaacagacggggataaattacacctagcaccgccacagccggccaagcagttcctgatctcaccaccatcctcccctccggtcggctggcaacccataaacgatgctacgcccgtccttaactatgacctgctgtacgcagttgcaaagctgggtcccggggaaaaatacgaactgcacgcaggcactgaaagcactccttctgttgtggtacacgtttgtgattctgatatcgaagaggaagaggatcccaagacatctccgaaacccaaaattatccagaccaggaggccaggcttacccccaagcgtttcaaactag

SEQ ID NO: 159637 - DNA, 594 bp, Artificial Sequence
  derived and/or modified sequence
atgcccgcaccctccatggattgcgatgtctcaacactcgtagcatgcgtggtggatgtcgaagtcttcaccaatcaagaagtcaaagagaagtttgaaggattgtttcgcacttacgatgattgtgtgactttccagttgtttaaatctttccgcagagtcagaattaattttagcaatcccaaatctgcggcaagggctcgaatcgaactacacgaaacccagttcagggggaagaaactcaagctttacttcgcacaggtgcagactccggaaacggacggcgacaaactgcatctggctcctccccaacctgctaaacaattcctgatctctcccccttcctctccacccgtaggctggcagccgattaatgacgcgacccccgttttgaactacgatttgctctacgccgtggctaagttggggccaggcgaaaagtacgaactgcacgcagggaccgagtctacaccaagcgtcgtcgtacacgtctgcgattcggatatcgaggaggaggaggatcccaaaacgtcacccaagcctaagattatacagacacggaggccaggactcccgccaagcgtgtcaaattag

SEQ ID NO: 159638 - DNA, 3186 bp, Artificial Sequence
  derived and/or modified sequence
ctctgctgtgctgcctcagacgcggagggctgcgtgcagtgggagcgggctccaggagcccgagcctccagccgtccccagagcaaggcagcaccgaggcctggccacagcaatatccatctggaagctcttcccttcactcccaactctgaggttgcctaactctttattaaaaattcagaagggggaatgccagcccctagcatggactgtgatgtttccactctggttgcctgtgtggtggatgtcgaggtctttaccaatcaggaggttaaggaaaaatttgagggactgtttcggacttatgatgactgtgtgacgttccagctatttaagagtttcagacgtgtccgtataaacttcagcaatcctaaatctgcagcccgagctaggatagagcttcatgaaacccaattcagagggaaaaaattaaagctctactttgcacaggttcagactccagagacagatggagacaaactgcacttggctccaccccagcctgccaaacagtttctcatctcgcccccttcctccccacctgttggctggcagcccatcaacgatgccacgccagtcctcaactatgacctcctctatgctgtggccaaactaggaccaggagagaagtatgagctccatgcagggactgagtccaccccaagtgtcgtcgtgcacgtgtgcgacagtgacatagaggaagaagaggacccaaagacttccccaaagccaaaaatcatccaaactcggcgtcctggcctgccaccctccgtgtccaactgagctgcctgctccttctcgataatagccgtctcctctttatcatgctttttccccctgttgtttgtcaaaaaaaattgcctttaaattcctgggtgtttggttgtttgagattccttccttgttatcaagcctctcggacaaaagggctaggaaaaggtgatatgtctcctgatcatatcatacccattaagtataacccattatttagaaggttctagggaaaaaagtagtattttcttattaaacaatcagcacagcctatatctttgttctctcatgttgatccaagccagagacatcagtaacaaatagcacctgtgttgtttgtgagctgtttcagtcccagtcctgatgtgtgtgcgttgttctctcctggccacttaaataggaccatatgtaaacttgactttgactgcatgagatatccctatctggtctcactcagtcctctgcatcccaacattcccaggacatgcatgatcaccagcatttattttcattatttgaggatatcttataactcacagattgtcagcatccagccatgtcctatctagattaggaaaatgatcagaatattccagctcaacaagtctgggtatattcactattgtgagtcaatacaccatagctctgttgaaattcctggaggcaaaattgaccttggccccaaagatattcctcaatagatttcaaacaccactcccctgtagaactctcccagcctcgttggggaggcttgtccagggtgatagagactgatttcagacaaacctatttattacaaaagtttcatggtgtctgaatgattgttttctctctttgtatatttgtacaaatgtttcagctgtgcttttaaaaaatctggatgttttttatttagtgattgttcgacaattagctgcttcaaaacataatgtgcattgcttatgaatgccttcatatactaatacagatactctgataatattacactctaataaggataatgctgaattttgaaaggacacaaaacatctaatgccaatatatacatgattagccaacatctttgctatcaagaccacttgtttttaaataaagatgcaagtgtcagttgtagattattgggatgaagctaaatccccagaatgcagcagcagctgagcatgttaaaatggggaaggatgatagctacatgtatgccggtcctactcacgcgacacccgtgtgctcaaaaaagttatttgtttttgttacgtgtgatttttctatttctctagcccaaagtgcattacagaagatacacctatagaaccattaccttctgctatgtgtgccaggcctcatctactcctgtacattaatgaattactttagatgcaaacgcagattacaatggagtggggaagtactttcattacccaagcctcagaaaaacacacaagaacaataacacagcaaacagattgagggattgttgtggtttttgactaaggtgtatgttagtttcatcagaaacttaaaacatagactgatcactcagaaattaaagtccgttttactgtgaatatagcaatatagtactggacacagtactggtgaaactgaggagagcattgcttgtaaaatcctgagtttccataaggaaaatgaaaactccttttaaaaataaaatctgaggagtgtacaataagcatatgctttgactttcctttgctgtggaggtttttggtttttcattgatgataaacgactacagacttagtagtggagaaatggtgtcctctagtggaagaaatagtaggctccgctattcagatgcagagcactgcagcatccagcctttcaaagctgactcttctcaatcatctgtgggtcatttgacttgattttttaagctaccctgaatttccagaatgcaggttctaaagaaatctagatgagagaaagtatttgaaaatgatttttaaatgttttttaaaagacacatctgacatttttaacaacttagtaaaagttgaaatgaccattctgtgtagtcataaaagaaacacaatgaagtgtatggcctctggagttagtcttagtaaaacttattgctctgtgtcaatgttaacctgtctcagatcaagtaattctttcactaggttgggtttggggaggggggaaaagaggggcttttcctaggagaacgataagaaatggaaagactccttgaagtgttgcaagggaacctcctagcactgtgaaagtcagaatcgcctcagcatttccatgacgcacattatgcaaatctctttagcactattttaagtttgaaaactttaacaatgaaggggaaggggaagatttccaccaactgaatcatttgtgcacgtgtatagctcaaagagcttagacttcaaatatatctggtgaatg

SEQ ID NO: 159639 - DNA, 594 bp, Artificial Sequence
  derived and/or modified sequence
atgcccgcccccagcatggactgcgacgtgagcaccctggtggcctgcgtggtggacgtggaggtgttcaccaaccaggaggtgaaggagaagttcgagggcctgttcagaacctacgacgactgcgtgaccttccagctgttcaagagcttcagaagagtgagaatcaacttcagcaaccccaagagcgccgccagagccagaatcgagctgcacgagacccagttcagaggcaagaagctgaagctgtacttcgcccaggtgcagacccccgagaccgacggcgacaagctgcacctggcccccccccagcccgccaagcagttcctgatcagcccccccagcagcccccccgtgggctggcagcccatcaacgacgccacccccgtgctgaactacgacctgctgtacgccgtggccaagctgggccccggcgagaagtacgagctgcacgccggcaccgagagcacccccagcgtggtggtgcacgtgtgcgacagcgacatcgaggaggaggaggaccccaagaccagccccaagcccaagatcatccagaccagaagacccggcctgccccccagcgtgagcaactag

SEQ ID NO: 159640 - protein, 313 aa, Artificial Sequence
  derived and/or modified sequence
MRVVTIVILLCFCKAAELRKASPGSVRSRVNHGRAGGGRRGSNPVKRYAPGLPCDVYTYLHEKYLDCQERKLVYVLPGWPQDLLHMLLARNKIRTLKNNMFSKFKKLKSLDLQQNEISKIESEAFFGLNKLTTLLLQHNQIKVLTEEVFIYTPLLSYLRLYDNPWHCTCEIETLISMLQIPRNRNLGNYAKCESPQEQKNKKLRQIKSEQLCNEEEKEQLDPKPQVSGRPPVIKPEVDSTFCHNYVFPIQTLDCKRKELKKVPNNIPPDIVKLDLSYNKINQLRPKEFEDVHELKKLNLSSNGIEFIDPGSLR

SEQ ID NO: 159641 - DNA, 942 bp, Artificial Sequence
  derived and/or modified sequence
atgcgggtggttactattgtgattctgttgtgcttctgtaaagcggctgagctgaggaaggctagccccggtagcgtgcgctctagagtgaaccatggacgggcaggaggcggtcgccgtggttccaatccagtgaagagatacgcccctgggctgccctgtgatgtttacacatatctgcacgagaagtatctggactgccaggaaagaaaactggtgtacgtactaccgggatggccccaggatctcttacatatgctgctggctcgtaacaagatcaggaccctcaagaacaatatgttttccaagtttaagaagttgaagtctttagatttgcagcagaatgaaattagtaaaatcgagagtgaggcattctttggattaaataaactcaccacactcctgttacagcataaccagatcaaggtcttgacggaagaggttttcatctacacgccactgttatcttacctccgcctatatgacaatccttggcattgcacatgcgagatcgagacgctcatctccatgttgcagatccctaggaatagaaatttgggaaattatgctaaatgtgagtcccctcaggaacagaagaataagaagctccggcagattaagtcggagcagctgtgtaacgaagaagagaaggaacaactcgaccccaagccgcaggtttctggtaggccccctgtgattaagcctgaagtggacagcaccttttgccataattatgtttttccaattcagaccctcgattgcaaacggaaggagctgaagaaagtacccaacaatatcccgcctgacatcgtaaaactcgatctcagttacaataagattaaccaactcaggccgaaagagttcgaagacgtccatgagctaaagaaactgaatctgtcctctaacggaatcgaattcatcgatccaggctcactaagatag

SEQ ID NO: 159642 - DNA, 315 bp, Artificial Sequence
  derived and/or modified sequence
atgcgtgtcgtgaccatcgtgatcctcctgtgtttttgcaaagccgcagagttgaggaaagcttctcctgggagtgttagaagcagggtgaaccacggacgcgctgggggaggaagaaggggatctaacccagttaaacggtacgctcccggacttccatgcgatgtgtatacgtacctgcacgaaaagtatttggattgtcaggaaaggaagctcgtatacgtcctaccgggttggccccaagatttactacacatgctcctggccaggaataaaataaggactctgaaaaataatatgttctccaagttctag

SEQ ID NO: 159643 - DNA, 942 bp, Artificial Sequence
  derived and/or modified sequence
atgcgggttgtgacaatagtgattctgctctgcttctgtaaggccgcagagctgaggaaggcctcccccggcagcgttagaagtagagttaaccacggcagagcgggcggagggagacgcggctcaaatccggtaaaacggtatgcgcctggattgccttgcgacgtctacacataccttcacgagaaatatttggactgtcaggagcgtaagctggtctacgtccttcctggatggcctcaggacttgctccacatgctgttggcccgcaataagattcgcacacttaagaacaacatgttcagcaagtttaaaaagttgaaaagcctagacctgcagcagaacgaaatttccaagatcgagagcgaagcgttttttggccttaacaagcttacgaccctgctgttacagcataaccagatcaaggttctgacagaagaagttttcatctatacacctctgttgtcttatttacgactgtacgacaacccgtggcattgcacctgtgaaatagaaactttaatctccatgctgcagattccacgcaaccgcaatctggggaattatgctaagtgtgaaagcccacaggaacaaaaaaataaaaagttacgccagatcaagtcagaacagttatgcaacgaagaagagaaagagcagctggatccgaaaccccaggtatcaggaaggcctcctgttattaaaccggaggtcgattctacattctgtcataattacgtctttccaattcagaccctcgactgcaaaaggaaggaactcaagaaagtacccaacaatataccaccagatattgtgaagttagatctctcctacaacaaaataaaccaactgaggccgaaggaattcgaggatgtgcacgaacttaagaagctgaatctgtcttcgaatggaattgaatttatagaccctggatcgttgagatag

SEQ ID NO: 159644 - DNA, 315 bp, Artificial Sequence
  derived and/or modified sequence
atgcgagtagtgactatagtcatcctcctgtgcttttgcaaagcagcagaattaagaaaagctagccccggtagcgtgcgatctcgagtaaatcatggacgggccggtgggggaaggaggggatcaaatccagtgaaacgatatgctcccggactgccctgcgacgtttatacgtacctccacgagaagtacctcgattgccaggaacggaaactagtatatgtgttaccagggtggccccaggacctactgcacatgctccttgccagaaataagatcaggacactcaagaataatatgttcagcaagttctag

SEQ ID NO: 159645 - DNA, 942 bp, Artificial Sequence
  derived and/or modified sequence
atgagagtcgtgaccattgtgatcctgctttgtttctgtaaagccgcggagctgcgcaaagctagtccaggatctgtgaggagccgggtgaatcacggccgtgctggaggaggaaggagaggctccaatcctgtcaaacgctatgctcccgggctgccgtgcgacgtctatacatatctccacgaaaaatatcttgattgccaagagcggaaattggtttacgttctgccaggctggccacaggacttactgcacatgctgcttgcacgaaataaaatacgaacattaaaaaacaacatgttttcaaagtttaagaagctcaaatccctggacctacaacagaacgagatttccaaaattgagagtgaagccttttttgggttaaacaagctgactaccctactgctgcagcacaaccaaattaaggtcctcaccgaagaggtgtttatctatactcccttgctatcatacttaaggctctatgacaacccctggcattgtacctgtgaaatagaaacactgatttctatgctgcagatccctcgaaaccggaatctgggtaactatgcgaaatgcgagtctccccaggaacaaaaaaacaagaaactccgtcagatcaagtccgagcagctgtgtaacgaagaggagaaggagcagctggatcccaagcctcaggttagtgggcggccccccgttattaagccagaagtggattcaacattctgccataattatgtatttcccatccaaaccctagattgtaaaagaaaagaactcaaaaaagtcccgaacaacattccaccagacatcgtaaaactggacctgagttacaacaaaatcaaccaattgcggccgaaggagttcgaagatgttcatgaactcaaaaagctgaatctcagctcgaatggaattgaatttatagaccctggatcgttgagatag

SEQ ID NO: 159646 - DNA, 801 bp, Artificial Sequence
  derived and/or modified sequence
tctggagcccacacccaacatggttggtgactgggagacagaaaaggatagaaaaaaaaaaggctcaggaagacaacaattcaagtcctacccttgtgtgtgcatctcaaggctgtgttcttttaaagaaggagaattctttgaatttcttaaatccgatgtgatggtgaactgcaggcttcggttttcatcatgctgagtcctaacatttgtgactacttcccccggggtggccatgtgaagcatcttatgcgcatgagcctattttatcctcccaacaatattaggaggtatcctcggtccgttttacagatgctgaagatgacccaggttgatacagttaagcagcctagggactccacgtaccccagctgggtctcattgttccagaactgcattagttaagattacccagacttggatttcaaaggaatactttcattgttccgtctgtaacacgaagtaattggggccagctggatgtcaggatgcgtgtggttaccattgtaatcttgctctgcttttgcaaagcggctgagctgcgcaaagcaagcccaggcagtgtgagaagccgagtgaatcatggccgggcgggtggaggccggagaggctccaacccggtcaaacgctacgcaccaggcctcccgtgtgacgtgtacacatatctccatgagaaatacttagattgtcaagaaagaaaattagtttatgtgctgcctggttggcctcaggatttgctgcacatgctgctagcaagaaacaagatccgcacattgaagaacaacatgttttccaagttta

SEQ ID NO: 159647 - DNA, 315 bp, Artificial Sequence
  derived and/or modified sequence
atgcgagtagtgactatagtcatcctcctgtgcttttgcaaagcagcagaattaagaaaagctagccccggtagcgtgcgatctcgagtaaatcatggacgggccggtgggggaaggaggggatcaaatccagtgaaacgatatgctcccggactgccctgcgacgtttatacgtacctccacgagaagtacctcgattgccaggaacggaaactagtatatgtgttaccagggtggccccaggacctactgcacatgctccttgccagaaataagatcaggacactcaagaataatatgttctctaagttctag

SEQ ID NO: 159648 - DNA, 942 bp, Artificial Sequence
  derived and/or modified sequence
atgagagtggtgaccatcgtgatcctgctgtgcttctgcaaggccgccgagctgagaaaggccagccccggcagcgtgagaagcagagtgaaccacggcagagccggcggcggcagaagaggcagcaaccccgtgaagagatacgcccccggcctgccctgcgacgtgtacacctacctgcacgagaagtacctggactgccaggagagaaagctggtgtacgtgctgcccggctggccccaggacctgctgcacatgctgctggccagaaacaagatcagaaccctgaagaacaacatgttcagcaagttcaagaagctgaagagcctggacctgcagcagaacgagatcagcaagatcgagagcgaggccttcttcggcctgaacaagctgaccaccctgctgctgcagcacaaccagatcaaggtgctgaccgaggaggtgttcatctacacccccctgctgagctacctgagactgtacgacaacccctggcactgcacctgcgagatcgagaccctgatcagcatgctgcagatccccagaaacagaaacctgggcaactacgccaagtgcgagagcccccaggagcagaagaacaagaagctgagacagatcaagagcgagcagctgtgcaacgaggaggagaaggagcagctggaccccaagccccaggtgagcggcagaccccccgtgatcaagcccgaggtggacagcaccttctgccacaactacgtgttccccatccagaccctggactgcaagagaaaggagctgaagaaggtgcccaacaacatcccccccgacatcgtgaagctggacctgagctacaacaagatcaaccagctgagacccaaggagttcgaggacgtgcacgagctgaagaagctgaacctgagcagcaacggcatcgagttcatcgaccccggcagcctgagatag

SEQ ID NO: 159649 - DNA, 315 bp, Artificial Sequence
  derived and/or modified sequence
atgagagtggtgaccatcgtgatcctgctgtgcttctgcaaggccgccgagctgagaaaggccagccccggcagcgtgagaagcagagtgaaccacggcagagccggcggcggcagaagaggcagcaaccccgtgaagagatacgcccccggcctgccctgcgacgtgtacacctacctgcacgagaagtacctggactgccaggagagaaagctggtgtacgtgctgcccggctggccccaggacctgctgcacatgctgctggccagaaacaagatcagaaccctgaagaacaacatgttcagcaagttctag

SEQ ID NO: 159650 - DNA, 942 bp, Artificial Sequence
  derived and/or modified sequence
atgcgcgtggtcaccatcgtcatccttctatgcttttgcaaggctgctgaactcagaaaggcaagtcccggctccgttcgctccagggttaatcacggaagggctgggggcgggagaagaggtagcaatcccgtgaagagatatgctcctggactcccttgcgatgtgtatacgtacttacatgaaaagtacctcgactgccaggaacggaaactggtgtacgtcctgccaggatggccccaggacctgctgcacatgctgctcgcaaggaataaaatacggacattaaagaacaatatgtttagcaagttcaagaagcttaagtcactggacttgcaacaaaatgaaataagcaagattgaatcagaggccttcttcggcttaaataaactaacgaccttgctgttacaacataaccagattaaggtattgacagaggaggtgttcatctacaccccgctcctgagttatctaaggctctacgataacccgtggcattgtacatgcgagattgagacattaattagcatgctgcagatccctcggaacaggaatctcgggaattatgcaaagtgtgagtcgccacaagagcagaagaacaagaaattacgacagatcaagtctgagcaactgtgcaatgaggaggagaaggaacagctcgacccaaaaccccaagtgagcggccgtcctccagtgataaagcccgaggtggactctaccttctgccacaattacgtattccctattcagacattagactgcaagcggaaggagctaaagaaggtccctaacaacattccaccagacattgtcaaactggacctcagttataacaaaattaaccaactcagacctaaagagtttgaagatgttcacgagctgaagaagttgaatctgagctcgaacggtattgagttcatcgacccaggttctttaagatag

SEQ ID NO: 159651 - DNA, 315 bp, Artificial Sequence
  derived and/or modified sequence
atgcgcgtggttacaattgtcatcttgctgtgtttttgcaaagccgcagagctcagaaaagccagtcccggctccgtccggagtcgggtaaatcatggacgcgccggaggggggaggcgcggctctaacccagttaagcgatacgcaccagggttgccttgcgacgtgtatacataccttcatgaaaaatacctggactgccaggaacgaaaactggtttacgtactgccaggatggcctcaggatctgcttcatatgcttctcgcaagaaataagatccgcacgctcaaaaataacatgttttctaaattctag

SEQ ID NO: 159652 - DNA, 942 bp, Artificial Sequence
  derived and/or modified sequence
atgagggtggtgaccatcgtcatcctgctgtgcttctgcaaggctgctgagctgaggaaggccagccctggctctgtgcgcagccgggtgaaccacggccgggccggcggcggcagaagaggcagcaaccctgtgaagagatatgcccctggcctgccctgtgatgtgtacacctacctgcacgagaagtacctggactgccaggagaggaagctggtgtatgtgctgcccggctggccccaggacctgctgcacatgctgctggccaggaacaagatccgcaccctgaagaacaacatgttcagcaagttcaagaagctgaagagcctggacctgcagcagaatgagatcagcaagattgagagcgaggccttcttcggcctgaacaagctgaccaccctgctgctgcagcacaaccagatcaaggtgctgacagaggaggtgttcatctacacccccctgctgagctacctgcggctgtatgacaacccctggcactgcacctgtgaaattgagaccctcatctccatgctgcagatccccaggaacagaaacctgggcaactatgccaagtgtgagagcccccaggagcagaagaacaagaagctgcggcagatcaagtctgagcagctgtgcaatgaggaggagaaggagcagctggaccccaagccccaggtgtctggccggccccctgtgatcaagccagaggtggacagcaccttctgccacaactacgtgttccccatccagaccctggactgcaagaggaaggagctgaagaaggtgcccaacaacatccccccagacatcgtgaagctggacctgagctacaacaagatcaaccagctgcggcccaaggagtttgaagatgtgcatgagctgaagaagctgaacctgagcagcaatggcatcgagttcattgatcctggcagcctgaggtag

SEQ ID NO: 159653 - DNA, 315 bp, Artificial Sequence
  derived and/or modified sequence
atgagggtggtgaccatcgtcatcctgctgtgcttctgcaaggctgctgagctgaggaaggccagccctggctctgtgcgcagccgggtgaaccacggccgggccggcggcggcagaagaggcagcaaccctgtgaagagatatgcccctggcctgccctgtgatgtgtacacctacctgcacgagaagtacctggactgccaggagaggaagctggtgtatgtgctgcccggctggccccaggacctgctgcacatgctgctggccaggaacaagatccgcaccctgaagaacaacatgttcagcaagttctag

SEQ ID NO: 159654 - DNA, 942 bp, Artificial Sequence
  derived and/or modified sequence
atgcgggtggtgaccatcgtgatcctgctgtgcttctgcaaggccgcggagcttagaaaagcctctcctgggtccgttcgatcccgcgtaaatcatggtcgcgcaggcgggggaaggcgcggtagtaatcccgtgaagcggtacgcgccaggtctgccttgcgacgtgtatacctacctccatgagaagtacctcgactgtcaagaaaggaaactggtttatgtccttcctggttggccacaggatctgctccacatgctgctggccagaaacaagattaggacactgaagaataacatgttctccaagttcaaaaaattgaagagtctcgatctgcagcaaaatgagatctcgaagatagagagtgaggcatttttcggactgaacaagttaaccaccctgctcctacaacacaaccagatcaaggtgctgacggaagaagtttttatttataccccccttctgtcttacctccggctgtatgataatccatggcactgtacttgtgagattgaaacgctgatctctatgctgcagatccctagaaataggaacttgggtaactacgcaaagtgcgagtctcctcaagagcaaaagaacaaaaagttgcgccagatcaagtcagagcaactttgtaatgaggaggagaaggagcagctggatccaaagccccaagtgtctggccggccgccagtcattaagcctgaggttgattccacgttctgccataattatgtgttccccattcagactctcgattgcaaaagaaaagagcttaagaaggtgccaaataacatcccccccgacatcgtgaaactagacctgagctacaacaagatcaaccagcttcggcctaaagaatttgaagacgtgcacgaactgaaaaagcttaacctatccagcaatggtattgagttcattgatcctggctcactgagatag

SEQ ID NO: 159655 - DNA, 315 bp, Artificial Sequence
  derived and/or modified sequence
atgcgggtggtgaccatcgtgatcctgctgtgcttctgcaaggccgccgaattgcgcaaagcctcccctggctctgtgaggagtagggtcaaccatgggagggccggtggggggaggcgaggtagcaacccggtgaagaggtacgcaccgggcctgccatgtgacgtgtacacttacttacatgaaaagtacctcgattgccaggagcggaagcttgtgtatgtcctgccggggtggccccaggacctgctgcatatgctgctggcgcgaaataagattcggacgctgaagaataacatgttctccaaattctag

SEQ ID NO: 159656 - RNA, 942 nt, Artificial Sequence
  derived and/or modified sequence
augcggguugugacaauagugauucugcucugcuucuguaaggccgcagagcugaggaaggccucccccggcagcguuagaaguagaguuaaccacggcagagcgggcggagggagacgcggcucaaauccgguaaaacgguaugcgccuggauugccuugcgacgucuacacauaccuucacgagaaauauuuggacugucaggagcguaagcuggucuacguccuuccuggauggccucaggacuugcuccacaugcuguuggcccgcaauaagauucgcacacuuaagaacaacauguucagcaaguuuaaaaaguugaaaagccuagaccugcagcagaacgaaauuuccaagaucgagagcgaagcguuuuuuggccuuaacaagcuuacgacccugcuguuacagcauaaccagaucaagguucugacagaagaaguuuucaucuauacaccucuguugucuuauuuacgacuguacgacaacccguggcauugcaccugugaaauagaaacuuuaaucuccaugcugcagauuccacgcaaccgcaaucuggggaauuaugcuaagugugaaagcccacaggaacaaaaaaauaaaaaguuacgccagaucaagucagaacaguuaugcaacgaagaagagaaagagcagcuggauccgaaaccccagguaucaggaaggccuccuguuauuaaaccggaggucgauucuacauucugucauaauuacgucuuuccaauucagacccucgacugcaaaaggaaggaacucaagaaaguacccaacaauauaccaccagauauugugaaguuagaucucuccuacaacaaaauaaaccaacugaggccgaaggaauucgaggaugugcacgaacuuaagaagcugaaucugucuucgaauggaauugaauuuauagacccuggaucguugagauag

SEQ ID NO: 159657 - RNA, 315 nt, Artificial Sequence
  derived and/or modified sequence
augcgaguagugacuauagucauccuccugugcuuuugcaaagcagcagaauuaagaaaagcuagccccgguagcgugcgaucucgaguaaaucauggacgggccggugggggaaggaggggaucaaauccagugaaacgauaugcucccggacugcccugcgacguuuauacguaccuccacgagaaguaccucgauugccaggaacggaaacuaguauauguguuaccaggguggccccaggaccuacugcacaugcuccuugccagaaauaagaucaggacacucaagaauaauauguucagcaaguucuag

SEQ ID NO: 159658 - RNA, 942 nt, Artificial Sequence
  derived and/or modified sequence
augagagucgugaccauugugauccugcuuuguuucuguaaagccgcggagcugcgcaaagcuaguccaggaucugugaggagccgggugaaucacggccgugcuggaggaggaaggagaggcuccaauccugucaaacgcuaugcucccgggcugccgugcgacgucuauacauaucuccacgaaaaauaucuugauugccaagagcggaaauugguuuacguucugccaggcuggccacaggacuuacugcacaugcugcuugcacgaaauaaaauacgaacauuaaaaaacaacauguuuucaaaguuuaagaagcucaaaucccuggaccuacaacagaacgagauuuccaaaauugagagugaagccuuuuuuggguuaaacaagcugacuacccuacugcugcagcacaaccaaauuaagguccucaccgaagagguguuuaucuauacucccuugcuaucauacuuaaggcucuaugacaaccccuggcauuguaccugugaaauagaaacacugauuucuaugcugcagaucccucgaaaccggaaucuggguaacuaugcgaaaugcgagucuccccaggaacaaaaaaacaagaaacuccgucagaucaaguccgagcagcuguguaacgaagaggagaaggagcagcuggaucccaagccucagguuagugggcggccccccguuauuaagccagaaguggauucaacauucugccauaauuauguauuucccauccaaacccuagauuguaaaagaaaagaacucaaaaaagucccgaacaacauuccaccagacaucguaaaacuggaccugaguuacaacaaaaucaaccaauugcggccgaaggaguucgaagauguucaugaacucaaaaagcugaaucucagcucgaauggaauugaauuuauagacccuggaucguugagauag

SEQ ID NO: 159659 - RNA, 315 nt, Artificial Sequence
  derived and/or modified sequence
augcgaguagugacuauagucauccuccugugcuuuugcaaagcagcagaauuaagaaaagcuagccccgguagcgugcgaucucgaguaaaucauggacgggccggugggggaaggaggggaucaaauccagugaaacgauaugcucccggacugcccugcgacguuuauacguaccuccacgagaaguaccucgauugccaggaacggaaacuaguauauguguuaccaggguggccccaggaccuacugcacaugcuccuugccagaaauaagaucaggacacucaagaauaauauguucucuaaguucuag

SEQ ID NO: 159660 - protein, 342 aa, Artificial Sequence
  derived and/or modified sequence
MSLHGKRKEIYKYEAPWTVYAMNWSVRPDKRFRLALGSFVEEYNNKVQLVGLDEESSEFICRNTFDHPYPTTKLMWIPDTKGVYPDLLATSGDYLRVWRVGETETRLECLLNNNKNSDFCAPLTSFDWNEVDPYLLGTSSIDTTCTIWGLETGQVLGRVNLVSGHVKTQLIAHDKEVYDIAFSRAGGGRDMFASVGADGSVRMFDLRHLEHSTIIYEDPQHHPLLRLCWNKQDPNYLATMAMDGMEVVILDVRVPCTPVARLNNHRACVNGIAWAPHSSCHICTAADDHQALIWDIQQMPRAIEDPILAYTAEGEINNVQWASTQPDWIAICYNNCLEILRV

SEQ ID NO: 159661 - protein, 142 aa, Artificial Sequence
  derived and/or modified sequence
MSLHGKRKEIYKYEAPWTVYAMNWSVRPDKRFRLALGSFVEEYNNKVVILDVRVPCTPVARLNNHRACVNGIAWAPHSSCHICTAADDHQALIWDIQQMPRAIEDPILAYTAEGEINNVQWASTQPDWIAICYNNCLEILRV

SEQ ID NO: 159662 - protein, 165 aa, Artificial Sequence
  derived and/or modified sequence
MSLHGKRKEIYKYEAPWTVYAMNWSVRPDKRFRLALGSFVEEYNNKVQLVGLDEESSEFICRNTFDHPYPTTKLMWIPDTKGVYPDLLATSGDYLRVWRVGETETRLECLLNNNKNSDFCAPLTSFDWNEVDPYLLGTSSIDTTCCFQWPVCLSLLCTHCYQKLL

SEQ ID NO: 159663 - DNA, 429 bp, Artificial Sequence
  derived and/or modified sequence
atgagcctgcacggcaagagaaaggagatctacaagtacgaggccccctggaccgtgtacgccatgaactggagcgtgagacccgacaagagattcagactggccctgggcagcttcgtggaggagtacaacaacaaggtggtgatcctggacgtgagagtgccctgcacccccgtggccagactgaacaaccacagagcctgcgtgaacggcatcgcctgggccccccacagcagctgccacatctgcaccgccgccgacgaccaccaggccctgatctgggacatccagcagatgcccagagccatcgaggaccccatcctggcctacaccgccgagggcgagatcaacaacgtgcagtgggccagcacccagcccgactggatcgccatctgctacaacaactgcctggagatcctgagagtgtag

SEQ ID NO: 159664 - DNA, 498 bp, Artificial Sequence
  derived and/or modified sequence
atgagcctgcacggcaagagaaaggagatctacaagtacgaggccccctggaccgtgtacgccatgaactggagcgtgagacccgacaagagattcagactggccctgggcagcttcgtggaggagtacaacaacaaggtgcagctggtgggcctggacgaggagagcagcgagttcatctgcagaaacaccttcgaccacccctaccccaccaccaagctgatgtggatccccgacaccaagggcgtgtaccccgacctgctggccaccagcggcgactacctgagagtgtggagagtgggcgagaccgagaccagactggagtgcctgctgaacaacaacaagaacagcgacttctgcgcccccctgaccagcttcgactggaacgaggtggacccctacctgctgggcaccagcagcatcgacaccacctgctgcttccagtggcccgtgtgcctgagcctgctgtgcacccactgctaccagaagctgctgtag

SEQ ID NO: 159665 - DNA, 1029 bp, Artificial Sequence
  derived and/or modified sequence
atgtccctgcatgggaagagaaaagagatctataagtatgaagcaccctggacagtttacgctatgaactggagcgtgcggcccgataaaagatttagactggcactcgggtcttttgtcgaggaatataataacaaagtgcaactggtcggactggatgaagagagctccgaatttatctgcaggaataccttcgaccacccatatccgacaaccaagttgatgtggatccccgatactaaaggtgtgtaccccgacctcctggccacatccggagactacctgagggtgtggagggtgggggaaaccgaaacaaggctggaatgtctgctgaataacaataagaacagtgacttttgcgccccccttacctcattcgattggaacgaggtagacccatatctattggggaccagcagtatagacacaacatgcactatctggggcctggagaccggtcaggtgctgggtcgcgtgaacttagtatctggacatgtgaagacccagttaatagcacatgataaggaagtttacgacatagcctttagtagagccgggggaggccgcgacatgtttgcctcggtgggtgctgacgggagcgtcaggatgttcgatctaagacacctcgagcattccacaattatttacgaggatccgcagcaccatccgctgctgcggctgtgctggaacaaacaagaccctaactacctcgccacaatggcaatggacgggatggaagttgtgatcttggatgtcagggtcccgtgcacgcctgtagcccggctcaacaatcacagggcttgtgtgaatggcatcgcctgggccccacatagttcgtgccacatctgcactgccgctgacgaccatcaagccctgatctgggatattcaacaaatgcccagggctatcgaagatccaattttggcctatacagccgaaggcgagattaataacgttcagtgggcaagcacacaacccgactggatagcaatctgctacaacaactgcctcgagattctccgcgtttag

SEQ ID NO: 159666 - DNA, 429 bp, Artificial Sequence
  derived and/or modified sequence
atgagcctgcatgggaaacggaaggaaatttacaagtacgaggccccttggacagtttacgctatgaattggagtgttaggccggacaaacgctttcggttagctttaggctcctttgtggaggagtataataataaagtcgtcatactggatgtgcgagtgccttgtacacctgttgcccgcctcaacaaccaccgagcctgcgttaatgggattgcctgggccccacacagctcctgtcatatttgcaccgctgccgatgaccatcaagccctgatatgggacatccaacagatgccccgagctatcgaagatcccattttggcctacactgccgagggcgagattaataacgtgcagtgggcctctacacagcctgactggattgccatctgctacaataactgcctggaaattctgcgagtgtag

SEQ ID NO: 159667 - DNA, 498 bp, Artificial Sequence
  derived and/or modified sequence
atgtccctgcacggtaagaggaaggagatttacaagtacgaagccccctggacagtctacgcaatgaattggagcgtgcgtcccgacaagcgctttagacttgcactgggaagttttgtcgaggagtacaataataaggtccagcttgtgggtctcgacgaagagtcatctgaatttatatgtcgtaacaccttcgaccatccataccctacaacaaaattgatgtggattcccgatacaaagggggtctaccccgatcttctggccacctccggagactacctaagggtatggcgcgtgggcgaaacggaaacccgcctcgagtgcctcctgaataataataagaacagcgatttttgtgcgcccttgacaagcttcgattggaacgaagtggacccctacctgttgggtacctcttccatcgataccacctgttgcttccagtggcctgtgtgtctgagtttgctgtgtacccactgctatcagaaactgctgtag

SEQ ID NO: 159668 - DNA, 1029 bp, Artificial Sequence
  derived and/or modified sequence
atgagcctgcacggcaagaggaaggagatctacaagtatgaggccccctggacagtgtatgccatgaactggagcgtgcggccagacaagcgcttccggctggccctgggcagctttgtggaggagtacaacaacaaggtgcagctggtgggcctggatgaggagagcagcgagttcatctgcaggaacacctttgaccacccctaccccaccaccaagctgatgtggatcccagacaccaagggcgtgtacccagacctgctggccaccagcggggactacctgcgggtgtggagggtgggggagacagagacccggctggagtgcctgctgaacaacaacaagaacagcgacttctgtgcccccctgaccagctttgactggaatgaggtggacccctacctgctgggcaccagcagcattgacaccacctgcaccatctggggcctggagaccggccaggtgctgggccgggtgaacctggtgtctggccacgtgaagacccagctgattgcccatgacaaggaggtgtatgacatcgccttcagcagagctgggggcggccgggacatgtttgcctctgtgggcgcagatggctctgtgaggatgtttgacctgcggcacctggagcacagcaccatcatctatgaggacccccagcaccaccccctgctgcggctgtgctggaacaagcaggaccccaactacctggccaccatggccatggatggcatggaggtggtgatcctggatgtgcgggtgccctgcacccctgtggcccggctgaacaaccaccgggcctgtgtgaatggcatcgcctgggccccccacagcagctgccacatctgcacagctgctgatgaccaccaggccctgatctgggacatccagcagatgccccgggccatcgaggaccccatcctggcctacacagctgagggggagatcaacaacgtgcagtgggccagcacccagcctgactggatcgccatctgctacaacaactgcctggagatcctgcgggtgtag

SEQ ID NO: 159669 - DNA, 429 bp, Artificial Sequence
  derived and/or modified sequence
atgagcctgcacggcaagaggaaggagatctacaagtatgaggccccctggacagtgtatgccatgaactggagcgtgcggccagacaagcgcttccggctggccctgggcagctttgtggaggagtacaacaacaaggtggtgatcctggatgtgcgggtgccctgcacccctgtggcccggctgaacaaccaccgggcctgtgtgaatggcatcgcctgggccccccacagcagctgccacatctgcacagctgctgatgaccaccaggccctgatctgggacatccagcagatgccccgggccatcgaggaccccatcctggcctacacagctgagggggagatcaacaacgtgcagtgggccagcacccagcctgactggatcgccatctgctacaacaactgcctggagatcctgcgggtgtag

SEQ ID NO: 159670 - DNA, 498 bp, Artificial Sequence
  derived and/or modified sequence
atgagcctgcacggcaagaggaaggagatctacaagtatgaggccccctggacagtgtatgccatgaactggagcgtgcggccagacaagcgcttccggctggccctgggcagctttgtggaggagtacaacaacaaggtgcagctggtgggcctggatgaggagagcagcgagttcatctgcaggaacacctttgaccacccctaccccaccaccaagctgatgtggatcccagacaccaagggcgtgtacccagacctgctggccaccagcggggactacctgcgggtgtggagggtgggggagacagagacccggctggagtgcctgctgaacaacaacaagaacagcgacttctgtgcccccctgaccagctttgactggaatgaggtggacccctacctgctgggcaccagcagcattgacaccacctgctgcttccagtggcctgtgtgcctgagcctgctgtgcacccactgctaccagaagctgctgtag

SEQ ID NO: 159671 - DNA, 1029 bp, Artificial Sequence
  derived and/or modified sequence
atgagcctgcacggcaagcggaaggagatctacaagtacgaggccccatggaccgtgtatgccatgaactggtcagtgcgccccgataagagatttcgcttagccctcgggagcttcgtggaagagtataacaataaggtgcaacttgttgggctggacgaggaatccagcgagtttatttgcaggaacacctttgaccatccctatccgactacgaagctgatgtggatcccagatacaaagggagtgtaccctgatttattggccaccagtggggattacctcagagtgtggcgcgtgggcgagacggagacaagacttgaatgcctcttaaataacaataagaatagtgacttctgcgctcccttgacctccttcgattggaacgaggtcgacccttatttgctcggcacctcatcaattgacaccacgtgtaccatctggggactggagaccgggcaggtcctgggccgggtaaatctggtttcaggccacgtgaaaacccaactgatagcccatgataaggaggtctacgatatagcttttagccgggcagggggcggcagggacatgttcgcatccgtcggcgcagatggttctgttcggatgtttgatctccgacatctggagcattcaaccataatttacgaggacccacagcatcacccattactgcggttgtgctggaataagcaggacccaaactaccttgccactatggcaatggacggcatggaggtggtaattctggacgtgcgcgtcccttgtactccagtggccagattaaataaccatcgggcatgtgtcaacggcatcgcatgggcaccccattctagttgtcacatttgtactgcggctgacgatcatcaggcacttatttgggatatccagcagatgccgagggctatcgaggacccaatactggcctatactgccgagggagaaattaacaatgtgcagtgggcatctactcagccagactggatcgcaatctgctataataattgcctggagatcctgcgggtgtag

SEQ ID NO: 159672 - DNA, 429 bp, Artificial Sequence
  derived and/or modified sequence
atgagcctgcacggcaagcggaaggagatctacaagtacgaggccccatggaccgtgtacgctatgaactggtccgttcgccctgacaaacgatttaggctggcactaggatctttcgtggaagagtataacaataaagtggttatcctggatgtgagagtgccatgtacaccggtggcaagattaaacaaccacagagcatgcgttaacgggattgcttgggccccccatagcagctgtcacatctgtacagctgctgacgaccaccaagcactgatatgggacatccaacagatgccccgggccatcgaggaccctattctcgcatataccgctgagggggagattaacaacgtgcaatgggcgtctacccagccagattggattgctatctgttacaataactgtctggagattcttcgagtatag

SEQ ID NO: 159673 - DNA, 498 bp, Artificial Sequence
  derived and/or modified sequence
atgagcctgcacggcaagcggaaggagatctacaagtacgaggccccttggacggtgtatgccatgaattggtctgtgcgacccgataagcgctttcgccttgccctcggctctttcgtcgaagagtacaacaataaggtacagctggttggcttagatgaagagtcatccgagttcatctgcaggaacactttcgaccacccatatcccactactaaactgatgtggatcccagatactaagggtgtttatcctgacttgttggcgacaagcggcgattatctgcgtgtttggcgggtgggagagaccgagacccgcctggagtgtctactgaacaacaacaagaattccgatttctgtgcccccttaacatcttttgactggaacgaggtggatccctacctgttggggaccagctccatagacactacatgctgttttcagtggcctgtctgcctgagtctcctttgcacacattgttaccagaagctgctctag

SEQ ID NO: 159674 - DNA, 1220 bp, Artificial Sequence
  derived and/or modified sequence
gaaactaggggtcgggctcggccgtcgtcgttgtttgtcgccgcatccccgcttccgggttaggccgttcctgcccgccccctcctctcctcccttcggacccatagatctcaggctcggctccccgcccgccgcagcccactgttgacccggcccgtactgcggccccgtggccaccatgtccctgcacggcaaacggaaggagatctacaagtatgaagcgccctggacagtctacgcgatgaactggagtgtgcggcccgataagcgctttcgcttggcgctgggcagcttcgtggaggagtacaacaacaaggtggtgattctagatgtccgggttccctgcacacctgtcgccaggttaaacaaccatcgagcatgtgtcaatggcattgcttgggccccacattcatcctgccacatctgcactgcagcggatgaccaccaggctctcatctgggacatccagcaaatgccccgagccattgaggaccctatcctggcctacacagctgaaggagagatcaacaatgtgcagtgggcatcaactcagcccgactggatcgccatctgctacaacaactgcctggagatactcagagtgtagtgttggtggcgctgtgcccacgaggcaggggcttttgtatttcctgcctctgccccacccccaaagtaagaagaaacatgtttccagtggccagtatgtctttcattgctttgcacccactgttaccagaagctgctctaggagttcctggccagtcaccccatcgccctctgtggcagactcagtgctgtgtggcgcctcctcagcccagggctgagttttaagattttctctcctttcctcttctcctttggttcctcaattaaaaaatgtgtgtatatttgtttgtcaggcgttgtgttgaggagcagttcacgcactggctgtgtctattcctctgcccaggtgtctctgtttgctgcccaaggcagcagttcatgtctcgtccatgtccatgttcgtgttagcacttacgtgggaacaaataccaatttgtcttttctcctagtatcagtgtgtttaacaaattttaactttgtatatttgttatctatcaggctaatttttttatgaaaagaattttactctcctgcttcatttctttgtcttatagtcctccctctttgcaccttcttctcttccctcagtgcctggagctggtactgggcccctg

SEQ ID NO: 159675 - DNA, 1029 bp, Artificial Sequence
  derived and/or modified sequence
atgtctctacacggaaagcgaaaggaaatttataaatatgaggccccatggacagtctacgctatgaactggagcgttcgccctgacaagaggtttcggctcgcccttgggagcttcgtggaggaatataataacaaagtccaactggtgggtctggatgaggagtctagtgagttcatttgcaggaataccttcgatcacccctaccctacaaccaagctgatgtggatccctgatacaaagggtgtctacccagaccttctggccacctctggcgactatctgcgggtgtggcgggtgggggagacggagactcgactcgaatgcctgttgaataacaacaaaaatagtgacttctgtgctccactcacaagctttgattggaacgaagtggacccctatctgcttgggacaagctctatcgacacaacgtgcactatttggggattggagaccggtcaggtcctcggtcgagttaacctagtatcagggcacgtgaagacgcagctcatcgcccacgacaaggaagtttacgatatcgcctttagccgggcagggggtgggagggacatgtttgcttctgtcggtgccgacggctcggtgcggatgtttgacctcagacacctggagcattctactattatctatgaggacccccagcatcaccctcttttgcggctttgctggaacaagcaggatccgaattatctggctacaatggcaatggatggtatggaggtagtgatcctggacgtgcgcgtcccatgtaccccagtcgccagactgaacaaccacagggcctgcgtcaatggcatcgcctgggcaccacacagctcctgccatatctgcacagccgcagacgaccatcaggctttaatttgggatatccagcagatgcctcgtgccatcgaggacccaatactcgcttacacagcagagggggaaataaacaacgtacagtgggcctcaacacagccagattggatagccatttgctacaacaactgtttagagattctgcgggtttag

SEQ ID NO: 159676 - DNA, 429 bp, Artificial Sequence
  derived and/or modified sequence
atgagccttcacgggaagcggaaagagatctacaaatatgaagctccatggaccgtttacgcaatgaactggagtgttcggccagacaagaggttcagactcgccctgggtagcttcgtcgaggagtacaataataaggttgtgatcctggacgtgagggtcccctgtacaccagtggcaaggttgaataaccatcgcgcatgtgtcaacggcatcgcctgggcaccccactcctcctgtcatatctgtacggccgcagatgaccatcaggccctgatctgggatattcagcagatgcccagagctatcgaagaccccatattagcgtacactgccgagggtgaaataaataatgtgcagtgggctagtacacagccagattggatcgcaatctgctacaacaactgcctggagatactgagagtgtag

SEQ ID NO: 159677 - DNA, 498 bp, Artificial Sequence
  derived and/or modified sequence
atgtcacttcacgggaagcggaaggaaatatacaaatacgaagccccttggaccgtctacgccatgaattggtctgtgcggccagacaaacgttttcggctggcactgggatctttcgtcgaggagtacaataataaggtccaactggtggggcttgacgaggaaagcagcgaatttatttgtagaaacaccttcgaccacccctaccctaccaccaaacttatgtggattcctgatactaaaggcgtctatcctgatctgctggctaccagcggggattatctgcgggtgtggagagtcggtgagaccgagacacgactggagtgcctgctaaacaacaataagaatagcgatttctgcgcacccctgacatcctttgattggaatgaggtagacccatatttgctgggcacaagcagtatcgataccacatgctgttttcagtggccagtctgtctgtctctcttatgcacccactgttaccagaagcttttgtag

SEQ ID NO: 159678 - DNA, 694 bp, Artificial Sequence
  derived and/or modified sequence
ccgttcccaagctggtttgaaactaggggtcgggctcggccgtcgtcgttgtttgtcgccgcatccccgcttccgggttaggccgttcctgcccgccccctcctctcctcccttcggacccatagatctcaggctcggctccccgcccgccgcagcccactgttgacccggcccgtactgcggccccgtggccaccatgtccctgcacggcaaacggaaggagatctacaagtatgaagcgccctggacagtctacgcgatgaactggagtgtgcggcccgataagcgctttcgcttggcgctgggcagcttcgtggaggagtacaacaacaaggttcagcttgttggtttagatgaggagagttcagagtttatttgcagaaacacctttgaccacccataccccaccacaaagctcatgtggatccctgacacaaaaggcgtctatccagacctactggcaacaagcggtgactatctccgtgtgtggagggttggtgaaacagagaccaggctggagtgtttgctaaacaataataagaactctgatttctgtgctcccctgacctcctttgactggaatgaggtggatccttatcttttaggtacctcaagcattgatacgacatgctgtttccagtggccagtatgtctttcattgctttgcacccactgttaccagaagctgctctag

SEQ ID NO: 159679 - DNA, 6351 bp, Artificial Sequence
  derived and/or modified sequence
aaaacggaaggtggttgtcgtccgttcccaagctggtttgaaactaggggtcgggctcggccgtcgtcgttgtttgtcgccgcatccccgcttccgggttaggccgttcctgcccgccccctcctctcctcccttcggacccatagatctcaggctcggctccccgcccgccgcagcccactgttgacccggcccgtactgcggccccgtggccaccatgtccctgcacggcaaacggaaggagatctacaagtatgaagcgccctggacagtctacgcgatgaactggagtgtgcggcccgataagcgctttcgcttggcgctgggcagcttcgtggaggagtacaacaacaaggttcagcttgttggtttagatgaggagagttcagagtttatttgcagaaacacctttgaccacccataccccaccacaaagctcatgtggatccctgacacaaaaggcgtctatccagacctactggcaacaagcggtgactatctccgtgtgtggagggttggtgaaacagagaccaggctggagtgtttgctaaacaataataagaactctgatttctgtgctcccctgacctcctttgactggaatgaggtggatccttatcttttaggtacctcaagcattgatacgacatgcaccatctgggggctggagacagggcaggtgttagggcgagtgaatctcgtgtctggccacgtgaagacccagctgatcgcccatgacaaagaggtctatgatattgcatttagccgggccgggggtggcagggacatgtttgcctctgtgggtgctgatggctcggtgcggatgtttgacctccgccatctagaacacagcaccatcatttacgaagacccacagcatcacccactgcttcgcctctgctggaacaagcaggaccctaactacctggccaccatggccatggatggaatggaggtggtgattctagatgtccgggttccctgcacacctgtcgccaggttaaacaaccatcgagcatgtgtcaatggcattgcttgggccccacattcatcctgccacatctgcactgcagcggatgaccaccaggctctcatctgggacatccagcaaatgccccgagccattgaggaccctatcctggcctacacagctgaaggagagatcaacaatgtgcagtgggcatcaactcagcccgactggatcgccatctgctacaacaactgcctggagatactcagagtgtagtgttggtggcgctgtgcccacgaggcaggggcttttgtatttcctgcctctgccccacccccaaagtaagaagaaacatgtttccagtggccagtatgtctttcattgctttgcacccactgttaccagaagctgctctaggagttcctggccagtcaccccatcgccctctgtggcagactcagtgctgtgtggcgcctcctcagcccagggctgagttttaagattttctctcctttcctcttctcctttggttcctcaattaaaaaatgtgtgtatatttgtttgtcaggcgttgtgttgaggagcagttcacgcactggctgtgtctattcctctgcccaggtgtctctgtttgctgcccaaggcagcagttcatgtctcgtccatgtccatgttcgtgttagcacttacgtgggaacaaataccaatttgtcttttctcctagtatcagtgtgtttaacaaattttaactttgtatatttgttatctatcaggctaatttttttatgaaaagaattttactctcctgcttcatttctttgtcttatagtcctccctctttgcaccttcttctcttccctcagtgcctggagctggtactgggcccctggccccatgagcagtttgccttcttgagtcactgcctgtgtagtacatacctgaccgggagtccaaaccaccttggtgctctgaagtccactgactcatcacacctttcttagcctggctcctctcaagggcattctgggcttgtaaacagacataggaagcctctgtttaccctgaagcaccactgtccagcccattggttcccactggcagcatggtagagctgagagaaacaggctctcagggtacctgacttgaggggaatcgtttcatgaagctgaacttcaagcatatttccagtacattctttcagagtctgtttttccatccaaatataagccccaggccattccacttagtgtcttttcaatgataggcaagaatgatatctgagttgaacttcggtgcttctgttgtttgagtttactgtgcctggtggtatattgggcattctttggattgagtgttctgaggtgagagagtcttcccgaggcatcctgtctgtgcttccaaccctgaacaagaccttacatgagagatggactgatggactgcggcaatcctgggctgtcaagtggatagatagttaaaaagcattatactgtgggtaatgaaaagggaggaaaaaaaaagaaggaaaaggaattatagacccccagggtcagccagttaagagctctacccacacctgtcaacccctctctcccccagtttaggttctgagcagtattggacttgtagcctgcagttgtcttttgacttgcaggccgcaggtgtctttctgttatgtgaatgagttccatggaggggcatatgtgtgattccaccgttagatgagcccttggggcaggcagtttgggatgtgctcttgggggaaagttggctgtttccttgcgctctgctcctacccgaaggtttttaagtccctctgaattgctcatctgagattagtagagtagcaggcctgaaggatgatggttttgtcctctttggttctcacctgcttgagaagtaaaacagtaactttgttcttctgggcccttaagcttttttggttaagtcttccttttcagaagtagatgtcattatatgccaaaagtctagctctttgctttaccatacagggacctgtcccaaagaaaaaggctctttttttagccagcatatttccccttctacccttttactttgttgttctgattttaggactctggctggccatgtgcttgtggttgcctctcctgcatttgccactggatttgcactgcatcgtttggagatacaaagcgagcagttcttggtcagaaccctcctctgcttttcattgtgtttgataatggttactgggtccttctctcaagggtagcaaggccaagctgatggctgcttgtttaggaggccatcagttccttcctgtggagaagggtctgaaatggaagtcagtggtagaaggggctggtctgctgggcagggcttacatccactgagttctaagattcctttcctgatctgcacctacgcctggtctgtatggtggaatttgtcagctggaactcagaaacaacaacttgaaaaaaaaataataattagaacatatttgcataagatagctatttactctggaaaccaacaacttttgagatttcccttgccctgtggacgcccagctcctgtcatccttccttaggtcctgcagtacagtcttcccctgaatgccaccggggacccagggggactccacccccctaagcaagcacacacatactcacagttgatgagttgctggtctttgagtcccagctctcttaccctccctttactccaccagcccgacgacccatgactgaggaggggatttctacagtctcaggatttagaaagtctgtaagccatccatgctccagaaagcaccgatctgttgtagttgcaaaaacaactctgtaatttgttgaggttctcaaactgacagccagcgagactgggtgggaggccctggatctgttctccctgactgcgggaggagcagccactaggactttagcaggaagcccacatggaggctccgccaggctgtggcccagctggtgatggcccttttgctcctggcagcctgaggcacagctgcctgtattgtcctcatctgttctgactgaaggatggaggtgctgaataaattaggcctcaggcctctaccaccagagagctggagaatgggtccacgtcattcaaggacctgaattttttatgctcaggagcattggaatcctcttcttccagggaggaattagcctgcaaggttaggacttgaagagggaaggtatttaataactgggcgaggatgggtgtggtggctcacacctgtaatcccagcattttgggaggctgaggtggccagatcccaaggtcagaagatcgagaccatcctggctaacatggtgaaaccccatctctactaaaaatacaaaaaaaaattagccgggggtggtggcgggtacctgtagtcctagctacttgggaggctgaggcaggagaatggcgtgaacctgggaggtggagcttgcagtgagccaagatcgtgccactgcactccagcctgggcgacagagcaagactccgtctcaaaaaataaaaaaaaaaaaaaaataggtgaaaattccttataaatccaggattggctctgagagaactggctaagattcaggaagaaacaaaaaattcagaatcctacaaggttttgatgacaattagggccaaaattttaggaggagatgtaggatgcaggagaaaattaaagtgttttctttatatcagaggaggaaatagtagaggtcagtgaaggtctggggtagggaaacattcagactgtccattgcatggctgtggagtgagactgcccttagcctgggtcagccttcctgggccataaattgggcatccgtgatgctaggtaactgtgggaacaaaatgacagcttagagcagccatgggtgatgtttggtggtaaaaaacctacaggcgtttggggtcccatgattgttccagaccatgactcttcctggttgtgggtttgttacagagcaggagaagcagaggttatgacagttatgcagactttccccctcctttttctcttttctcttccccttgcttttccactgtttcttcctgctgccacctgggccttgaattcctgggctgtgaagacatgtagcagctgcagggtttaccacacgtgggagggcagcccagtactgtccctctgccttccccactttgagaatatggcagcccctttcattcctggcttggggtaggggagaccattgaagtagaagcctcaaagcagacttttccctttactgtgtgtactccaggacgaagaaggaagatcatgcttgatacttagattggttttcccagggaagagggcggagcagagcaaagtcactgtgaaccctgggccaggccctggctgggccagctcctgagagcgtctcgtgttgcagacccttgcccacttcacccacctgcaccttctccccctctcacagtgtcactgctgctaatggtcaaagtcaaatgtgtggccacatgggatgggccaggtcctctcaggctactttctggatgtcatttttaaaatatggaaacatgcaggtgccttcccaaagaggcttggactggtatatccaacgagaaacaaataagctaaagaaagtttaaactcaagaagaaagatgttgacagtctatgtaacagctggaaagtttataggcacccacctttgggacaacccagtgattatgaacatgtgatatctactatttaaaagaaatgttctcaccttgggttgattgtggtataccatgtgttatgaaaattgttgagctgaagctttgaatcgatttagttgagtctgactcacttgctttggttcctgtgtattttactacccctcttgtcagtgaccttccttccccaccccacccagagtgaatttgtagcatgattgtataaacctctatgtagaaaatggagatttcttgctctgaaatgttaagctctaactgatccatttctgtgtcctttagcctagtatgtctgaacttccattcttgttatatatttaaactttccctctatattataggttttgtggcatccacggtcaggtgtagaggaagctgccccttgcagaactgtactgtaatatttttcttttataaatattttcacaggactgattgtacacagggcttgtaataaaattttaacactgtgctgtgaaacaactatggggaatctccattgaaggctacttcatgggcacctgaaagtggagtgttatagctatgactttctatttcttgtttcctaagtaaattaaacctaattttcaccctttcattctgtttcagcctcctgtataagaagtaccgtattttctgcccatcatactttgtaataaaacttgaacatgtatagattgactg

SEQ ID NO: 159680 - DNA, 1029 bp, Artificial Sequence
  derived and/or modified sequence
atgagcctgcacggcaagagaaaggagatctacaagtacgaggccccctggaccgtgtacgccatgaactggagcgtgagacccgacaagagattcagactggccctgggcagcttcgtggaggagtacaacaacaaggtgcagctggtgggcctggacgaggagagcagcgagttcatctgcagaaacaccttcgaccacccctaccccaccaccaagctgatgtggatccccgacaccaagggcgtgtaccccgacctgctggccaccagcggcgactacctgagagtgtggagagtgggcgagaccgagaccagactggagtgcctgctgaacaacaacaagaacagcgacttctgcgcccccctgaccagcttcgactggaacgaggtggacccctacctgctgggcaccagcagcatcgacaccacctgcaccatctggggcctggagaccggccaggtgctgggcagagtgaacctggtgagcggccacgtgaagacccagctgatcgcccacgacaaggaggtgtacgacatcgccttcagcagagccggcggcggcagagacatgttcgccagcgtgggcgccgacggcagcgtgagaatgttcgacctgagacacctggagcacagcaccatcatctacgaggacccccagcaccaccccctgctgagactgtgctggaacaagcaggaccccaactacctggccaccatggccatggacggcatggaggtggtgatcctggacgtgagagtgccctgcacccccgtggccagactgaacaaccacagagcctgcgtgaacggcatcgcctgggccccccacagcagctgccacatctgcaccgccgccgacgaccaccaggccctgatctgggacatccagcagatgcccagagccatcgaggaccccatcctggcctacaccgccgagggcgagatcaacaacgtgcagtgggccagcacccagcccgactggatcgccatctgctacaacaactgcctggagatcctgagagtgtag

SEQ ID NO: 159681 - protein, 193 aa, Artificial Sequence
  derived and/or modified sequence
MIQAILVFNNHGKPRLVRFYQRFPEEIQQQIVRETFHLVLKRDDNICNFLEGGSLIGGSDYKLIYRHYATLYFVFCVDSSESELGILDLIQVFVETLDKCFENVCELDLIFHMDKVHYILQEVVMGGMVLETNMNEIVAQIEAQNRLEKSEGGLSAAPARAVSAVKNINLPEIPRNINIGDLNIKVPNLSQFV

SEQ ID NO: 159682 - protein, 124 aa, Artificial Sequence
  derived and/or modified sequence
MIQAILVFNNHGKPRLVRFYQRFPEEIQQQIVRETFHLVLKRDDNICNFLEGGSLIGGSDYKLIYRHYATLYFVFCVDSSESELGILDLIQLKKRERKKSQCNTLQTGTLALWEQGPDIRTRRL

SEQ ID NO: 159683 - DNA, 582 bp, Artificial Sequence
  derived and/or modified sequence
atgatccaggccatcctggtgttcaacaaccacggcaagcccagactggtgagattctaccagagattccccgaggagatccagcagcagatcgtgagagagaccttccacctggtgctgaagagagacgacaacatctgcaacttcctggagggcggcagcctgatcggcggcagcgactacaagctgatctacagacactacgccaccctgtacttcgtgttctgcgtggacagcagcgagagcgagctgggcatcctggacctgatccaggtgttcgtggagaccctggacaagtgcttcgagaacgtgtgcgagctggacctgatcttccacatggacaaggtgcactacatcctgcaggaggtggtgatgggcggcatggtgctggagaccaacatgaacgagatcgtggcccagatcgaggcccagaacagactggagaagagcgagggcggcctgagcgccgcccccgccagagccgtgagcgccgtgaagaacatcaacctgcccgagatccccagaaacatcaacatcggcgacctgaacatcaaggtgcccaacctgagccagttcgtgtag

SEQ ID NO: 159684 - DNA, 375 bp, Artificial Sequence
  derived and/or modified sequence
atgatccaggccatcctggtgttcaacaaccacggcaagcccagactggtgagattctaccagagattccccgaggagatccagcagcagatcgtgagagagaccttccacctggtgctgaagagagacgacaacatctgcaacttcctggagggcggcagcctgatcggcggcagcgactacaagctgatctacagacactacgccaccctgtacttcgtgttctgcgtggacagcagcgagagcgagctgggcatcctggacctgatccagctgaagaagagagagagaaagaagagccagtgcaacaccctgcagaccggcaccctggccctgtgggagcagggccccgacatcagaaccagaagactgtag

SEQ ID NO: 159685 - DNA, 582 bp, Artificial Sequence
  derived and/or modified sequence
atgattcaggctatcctggtatttaataaccatggtaagccacggttggtaaggttctatcagcgttttcctgaagaaatccagcagcagattgtgagggaaacattccatttagttctgaaaagagacgacaatatttgcaatttcctggaaggggggtcactgatagggggctctgattacaaattgatttaccgccactatgccaccctgtattttgtgttttgtgtagattcctctgaatctgagctgggcatcctggacctgatccaggtgttcgtggagacacttgacaagtgttttgagaacgtctgcgagctggacttaatttttcatatggacaaggtacactatattctgcaggaagtcgtcatgggaggtatggtgcttgaaacaaatatgaatgagatcgtggcacaaattgaagctcaaaacagactggagaaaagcgagggggggttgtccgccgcgcctgctcgcgccgtctctgccgtgaagaatataaacctgcccgagattcccaggaacataaacatcggggacctgaatataaaggtcccaaacctttcgcagtttgtatag

SEQ ID NO: 159686 - DNA, 375 bp, Artificial Sequence
  derived and/or modified sequence
atgatccaagctattctggttttcaacaaccacggcaaacccagactggttcgcttctaccagcgctttcccgaagagattcagcagcagatcgtgcgcgaaacgttccaccttgtgctgaagagggacgacaacatctgtaattttttggaaggggggagcttgatcggcggatcagactacaagctcatctatcgacattatgccacactgtactttgttttttgcgtcgattcttccgagagtgaactgggtattctggatcttattcagctgaaaaagcgagagagaaaaaaaagtcagtgcaacacgctgcagaccggcacgttagctctgtgggagcagggaccagatatccgcacacgacggctgtag

SEQ ID NO: 159687 - DNA, 375 bp, Artificial Sequence
  derived and/or modified sequence
atgattcaggctatcttagtgttcaacaatcacggaaagcctaggttagtccgtttctaccagcggtttcccgaggagattcagcagcagattgtgcgtgagacctttcatttagtgctgaagagggatgacaatatctgcaatttcctggaagggggatcattgattgggggatcagattacaagcttatctaccgtcactatgcaactctatacttcgtgttttgcgtcgattccagcgagtccgagctgggaatcctcgacctgattcagcttaagaaacgagaacggaagaagtcgcagtgtaataccctgcaaaccggaactttggccctctgggaacagggtccagatataagaacccgcaggctgtag
